United States Patent Application Publication US 2015/0354009 A1 - sequence listing, part 3

SEQ ID NO: 49 - DNA, 266180 bp, Homo sapiens
accagcaccccgcccagagcagtgccgctgcccaaatcctcgcaggcagctcatcaacgcaattgcaactccggctggagccccggacctgcaagcctgggtgtccgtgggtccgtctgcccagccatctgctggtggcacctctccctcctgccgcctccctcggtgaaccccaccttgcagaagtgcagctcgcccggagcagcccaggagctcagcatgcgtcccccaggcttcaggaacttcttgctgctggcgtcctcccttctctttgctgggttgtcagctgttcctcaaagcttctcgccatctctgaggtaagtttggtttgttattcttcagtacagacctgccctgcttatgtggcagggctcaagcttgcaggatggctgccctaagccaagagctgttattaaattggacaagggataaactgttttcaacctgttccttttcctctccttatatctacagcgtgtattgcctcatgtctgtccttttgcttttcctttggaaaaatgcaatcattgaataaaaatataattttcttttctgcaaatacatatcaggaggaattcctgctgtgagttaaaatgctatgtgtaccagtatcttctcacaacatgtaaagcagaatgatctgtttcccaagggcagcaacaggaggtctgtgttacattttgtatcatcctgaaagagactgagtgaggcacactgcaatagtgaaactaaactttttaaaagtagagttcctaaagactgcttaatgcaaattatgcccgatgctatcatagcatgtctaactctttctatagattcacgttttctcttctgtaatataagtgcccattggccatcagatagcagtgggacgttttttaaaggagaactgaaaagtcagctgagtgccgtaccttggattactttgtatttaatctaaatgtgcatataagatttagtgataaactaccaaagagcagggcagttcacctctgtccacctggaggaaggacctgtgtccgggggcaggtcacccattacacattttgggccctggtcatttctctggtgggtgatacctgtttgcttgggaaaatacagcccttccaggcagcgcttggaccccagagagatgtgggcctcaggcgtcctgttcttggggttgtacgtctgcacctggaggggacactggggaggaaacgtgggttcggagcagggggcggcgtccgcgtctgacccggcctgccggttgcttgtcgcccgcgcaggagctggccgggcgccgcctgcaggctgtcccgggccgagtcggagcgacgctgccgcgcacctgggcagcccccgggggccgcgctgtgccacggccggggccgctgcgactgcggcgtctgcatctgccacgtgactgagccgggcatgttcttcgggcccctgtgtgagtgccatgagtgggtgtgcgagacctacgacgggagcacctgtgcaggtaagagggcggcgctgtctcctccctcgggaggtcgaaactcctcttctgggatttctgccactccctagaagagtgaagggtggggacacgcctcccttcacataagcaccaattaagttactgcgattgtcacactttggctagttaattctggcatcatttatcacaacacttttatcccccaggctctgaacttgaatggaagtaaagttttaaaaattcattcacttaattatatattttattgtaattatgattttttaaagttgggatcttgctatgttgccctggctggtccccccccccccccccaactcctggaatcaagctatcctccctcctgagcttcccaaagtgttgggattacaggcgtgagccactgcacctggccgtcatttgcttaattctaaaatctcacttgcctctaaagttcctcattatagactaaattccccaatgtcctcacaaatggagttattttactgggttctcctatccctatcaagaatgttaatgataatatttgtagatcttaggcctgtattttattttacataggaaacagtgggagggggaatgtattattttcctccattctagggaggcaggttttgtctttgaagcctgatttgccctctcattattagaatatagttcacaggcaggagtgcatatcagaaaactgtaacaaggaaaaaagtaaacgggcacatatttacttagaatgactgttcttgcattgttctagctgcttgaatttttgagttgcaatgaaacttggtattttctgagggtggagtgaaaatacattcatttcccttgcacatttttaaggagtgattcaggttctgatattggaaagggtcaaaaaattccttcccagagaacacccttaacctctttacctgtgtcgttttacttaaggccaagagcctcaattagtgccttgtgagtgacacagaactccattagtgaaagcacaacacaatgcattccagccagggtttggcaaatttgtaggaaaaaccagccacttattttaccctcaatgtagctaagaataataagacagccaacactaacatagaaagatcaagaatgagtttatagcaaaatatttttttctcggaacctgggcccagtagtgtataagttacttaatatgcaggctgcttggcaatgcaaaaaatagtcatagaagaaatttggaggggcgcaggtgcatctacttgatttgttttccctgtgaaggctgtggatcaactctttaaaaatactgaatgctgggtggggtggctcacacctgtaatcccagcactttgggaggccgaggcaggtgaatcacttgaggtcaggagttcaagaccagcctcgccaacttgctgaaacccagtctctactaaaaatacaaaaattagctgggcgtcgtggcatgtgcctgtaatcccagctacttgggaggccgaggcagaattgcttgaacctgggaggcagaggttgcagagagccaagatcatgccactgcactccagcctgggcaacagagcgagacttcatctcaataaataaattaataaataaaattaaaatattggatgccacaacttgttatttaacttcgcagtcctacaaaccgcagtataattaagggtagccctttggaatgaaagctaagttaccgcctaatatttcattccaaatttgactgttacttggcttctctgacctatggcctctggcaagccctcttcaatatcatgaattttgaacaaattttccagggctttttctcttgttttattagagaagtaagaggtaagatgcagcctttaactggtgaaagttgtgagtgtcgtcagattcactttccctgttgaagaacctaggctggtgcttttctccgagaaactatgcagaaggaatgctgtggtagacagcattcctttttccctcccatagaaaatgatatgttgtttactcatagcatcttagtcactgcattccttccttcttgatacgaaatgcaggactgagtcaagcatggttttgtttggttatgcatgcatttctgtagaagatgaaatgcttctctttattttaatactgaatggaataatgaagttcattttttattctcatcttgctgactgatgcccatcaaaacttactctacagggccttgagcagaatctgtccccgcaaatgccctgaccacgtttgtggggcccatgcggagatccctacaagtagcacctagggctgccttgcgagcccgtcgatgtattccatgcttcaaatttagcttctcagttttatttttaagagatagttccagttgtatcactggaatatggaaatatagcaggtttcctatgtttatgtgcccctgtgctttcacctccatgaaagttcctgtaggtcctttccagaaatagagtaactttcggagacctctccaacttctaagaagaaaacaaaatccttctcttatagtactatatcatggagtgattaaaagtgtgggctctgggctgggtgtggtggttcatgcctataatcctagcactttggaagcctgaagcaggtggattacctgaggtcaggattcaagactagcctggagaacatggtgaaacaccatccctactaaaaaacacaaaaattagctgggcttggtggcatgtgcctgtaatcccagctacttggaaggctgaggcaggagaatcgcttgaacccggcaggcagaggttgcagtgagctgagatgatgccgttgcactctagcctaggaaacaagaatgagacgctgtctcaaaaaaaaagtgtggactctgggagacaatttccaggattcaaatcctagtcctattacttaatagctgtatgaacttgggcagttacttaaacattctgagccttgatttcttcatctgtaaaatgggaataacagtacctaacttatagagctgttgtaaggtttaacatatgtaaaatacttagactagtgtctgacatgaagtaagtgctcagtacatattaaaatgtatatatacataatattattacaatgatgcataacaagtgggctagtatggatggaaggatgggtggatggagatgacagatgggtagatagatagctggcccagtgtttgttgggcatttaatgcagtgagagcaatttacttctcttcatgtagtctgggtctgttactgattcaaggcccaaaaagtcaagtagggataactattttggcccagcctcagggcagctgtattagatacactatgcccttttaaagttaagtccattgggattattatactgtgaatcataagaaccatacttattatagtttgcgctggttgaaagtgattaggttccctccattagaagtctgtttcttccagtgtccacttgttcgtggcacatgcatcttccacagacttttatagcataaagatccagccaagtgagtgttcctatggatgtgatggtctattaaggggtaaaataattttggtagaatggtgaaaccctgtctctactaaatatacaaaaattagctgggtgtgatggtgtgcgccttgtagtcccagctactcgggaggctgaggcaggagaattgcttgaacccaggaggcagaggttgcagtgagccaagattgcgccattgcactccagcctgagtgacagaacgacactccatcacaaaaaaggaaagaaaaaaagaaagaatggcaaaatgtttgattgcatggaaagaaactttcagttgatatttctaaagcattcctggttgaccccatgaccagctacaatgacacttaaataatgtattgttttcttagaaatcttttgaaattgctgttgaaatatgtcacttaaagagtttcagttttagtaatttaggaagagctaattgaattcaatttagcaacacttatgaagcactgcatattttctaggctctgtcctgttgaagggagtgtaaagatgagggatagaaggcagcttaccattgagtagggagacacagagaaataccagatatctataatgtaatgcaaaatatcatctgtacaaatttttatgagggctccattgagccaggggttatatattatggctaaaagttcttgagaaagaggtagcatttgacataagcacttgagtactgggagattttttaatccaaaaagtggactgttggaattctgagtaaggaaaatcttaagcaaaagtgtagaagcagaaaaacatgtggatgtttgggaaatagggctacaagggttggcttggctggatcttagagctgtaaggaaagtaataaaagatatgttgagaattacagttgatcatattgtagagagtttgttcttgattaaacagcatataagagctattaagagtccaaatataggagtgatcattagtgctctgatttatggaaagaaatacagtcattccttgatatctgctgggaattagttctagggagcctcccccaccagtggataccaaggatgttccagtctctcatataaaatggtgtagtatttgcatgtaacctatacacatcctctagtaaactttaaatcatctcttgattacatataatacctcatgcaatgtaaatgctatgtaaatagttgttatactgtatgttagttgtattattttgtactacacttttttattttctgaatagttttaatctgccaatgaggagcccacagatatggaggcccgaccgtatggtgcccaaaagcatggcaagttaaagtagagaaccaatggggaggaactccacgggagaggcaataagaacagaattattatttttttaaaggccatttaaaagtaaaatcaatatgaattagtgtccaaggatgagtaagatgaattaaaactcatgctgggtttttaagtctgcgagatcagaagtgtgatggaactgatggagtcaagaaatcacaggaaagaaccagataaccaaatccatgacttaaagttcttttaaaagaactctcatttttaagtggaattgatataaaatgaaaaattaatgctagcagaaagagattctgatttcattggccaccacgtttggggcaggatgggaatcttgtctgaattgttaacgtgggttaacttgtttatgttgttaaccttgagccaggtttttaatttacctgatatttagtgcctttttctgtaacagtatccttatggatatgaagaaccttctattctgtgtgacattgagcatgattttatgtatgtatgtataaatttatttaatattcatatcctttatatacttctacatttattcagactatacgccatccttagctgggtgtggtggctcacacctgtaatcccagcactttgggaggctgaggtagctgggatggcttgatctcaggagtctgagaccagcctggggaacatggtgaaactctgtctctacaaaagatacaaaaattagctgggcatggtgcacacctgtagtcccagctactagggaggctgagaggggaggatggcttgagcccaggaggcataggttgcagtgagccatgatcatgccaccgcactgcagcctgagcaacagagggaggccctgtttcaaataaataagaaataaatataaaaaataaatataagccattcttataaacattgatttatgtgttcaaatattaacaatataacaattaaaataattagaatacattgaaacatttttaatatgtaaaaattagtaattttttttcttgaagatatttgacttttatactacgaagtaagtagtatgggaattatatgtggttattcatgagaactggacttcctggctcttgaggctgcctgaggactgttcgacttgcctttcccttccaattgcatttttcttagattgttgaacgatctccctccaagcctacttgtggatttactcaggctttttctttactagtctttttctatttttcatcttctctcccttccttcaatcctcatcctgtcttccttgcccactccttcacctccgtctagcccatcttggatttaccgccccctctctttcgcaaaatagcccttccatgtctctgagtcggaggcaccaagcacgtaagaatattatctgccttgaatccccttcaccagtaaataaatgtctgtaacagacagactggctttcacattgcctctttcctgtattttcttcatagtcttcacatcgcttgtagtttttggaaacacattcaggagttccccactagctcacccactgcatgtaagccatttttcgggagctctactttcttacattcatctgtgttcgataaatgcatattgtcttagcccaagtgacgtataaaagttaaatgttttctttctgaaagcaagtgccaaacatgcacagcaattttcctcaattgtactgctttatttggacagggctctgcagctctaccatggtttcttagtctgttttgtgttgctgtaaaagaatacctgagactgggtaggttgtaaaggaaagaggtttatttggcttacagttttgcaggctgtacaagcaaggcaccagcatgtgctaggcttctggtgaggcctcaggaagcctttacttatggaaagtgaggagggactggcatgtcacatggcaagagatagagggaggggtaccacattcttttaagcaaccagctgtcctgtgaacaaatagagaactcactcatgaccttggggagggcaccaagccattcatgagggatccacccccataacccaaacacttcccacttgattccacctacaagattggggatcacatttcaacatgagatttggaggggacacacatccaaactatatcacacagagacagacataccttgccctggactaggtcatccctgcaccttgatgatctagaggaacatatttatagcattgtggtatttagataaaatagtataaatgtgagaaattcaggagttattttctatgtaaagtttccccagaatgagaaaggaaaggaacatatggaaacaaatttatttgtattacaaattttaaatttgcaaaacataaacctccctcataaggttctcagagtcttcaatatattttgaaacacaatgctaaaactgacatcgcatgttcttgatatcataaacccccacaaaagctgctcagctctctgagcctcatatacatattgttacatctgaccttgtgactcaccatgttcatgttcttgaggtaggtgatcaatgccctaggagggactgggtgtagtggctcacatcgcctgtaatcctagcactttgggaagttgaggtgggaggatccttgaagcccagtggtttgagaccggcctgggcagcatagcgagacctgctccctactaaaaattttttaaaaattgccagacccagtggtgggtgactgtagtgccagctatcaggaggctaatacaggaggctcatttgagcatgggagattgaggctgcagtgagctatgatcaggccactgcactccagcctaggtgagagaattagaccctgtctcaaaaaaataaaataaaaaattccctgggagcagagagccccgttatcattctttgggggaattccctgtctgcaaaattatgaagtaagacgagacattttgccaagcttcatatcctgcccttgtattatttttctattgctgctacaacaaattaccacaaaccttgaggcttaaacagctcagatgtcttttctagagttctgtaggtctcaaggtcccctgacatgggacttccagggccaaggtgttgatagcctctgttcttttctgaagactctaggagagaatccgtttcctggttattggtgttgagataatttagttctgtgtggttgtaagactgtggtccccagttccttgctggctgtcagttggggtccctcttgtcttctagaagctactttcgggtccttacaagtaccccactcccaaatctcaaaactggaaacaggttgtgagacctttctcacaccgctgtctcccagagcctcttccatcatcacatcccttcttaccaccgtcggaaaacatactccacttttaaggtgtattttaactagactgaacccagataatccaggataagcttcccatccaagactcataaacttcatcacatcagcaaagtcacttttgccacgtaaggtgacatatttacaggtttcaggagcaagggtatggctatctttgaaggcccatagtcttctcagcatagtcaccctcctataaagtgcagggcactctgtatgtgtgaatggcaagggagaggttccaactccattcatatctggctgttggtatgctccatcgaggatgcaagggctgagtcttttccttcttttccgaggttatctatatgatctaattgctctggcccatcttttccatatcattattttttttgagttggattctcgctgtgttgccgaggctggagtgcagtggagcaatctcagctcgctgcaacctccacctcccggggtcaagtgatactcctgcctcagcctcctgagtagctgggactgtaggcatgcgcccccacacctggctaatttttgtatgtttagtagagacagggcttcaccatgttggccaggctggtctctaacttctgacctcaggtgatccacctgccttggcctcccaaagtgctgcgattacaagcgtgagccatggcacctggccttttccatatcatttctgataaagaacactaagtgtctttctaaagcatgaagagagggacttaagcccaacagttgcctgcattcagttcctgacattgtcacttgcccactgtggagctacagggaggttacccaagaggttacaacctctgtttccttatggttgaaaagagggcaataataagaccaaatagggataatgacagtgccaaacacatatgagtgattaataaatcactggagttattatgcttaaatatgctagacacccctctcctaccctagcgtaattcctggtcctaagatatttattttcaaataagcaattttctttccatgttatatcttcctccattactaaattcatgtcttggaattactctgatagtctttgaactattatatcccaacaagcttgcctactctatagtgccagggctgggtgtgccctcagccctggccagcatgaggaatctgagagcttactgtatcatgccccaactcactgcactgccagccgtctgagtcttgtatatgtctttgtctcagaacctgccttttgtgttcctgtccctgaaatctgtaccctgatttatatgatcataattgatctaatggaatgctccagaaccctaccctcagaactgtataattagtccttgaatttggaattttcatgctttttctctgctggaaacctttagacgtctgcagactcccagggcttactctataagtgcaattctgcttctgactcttccctccactgagatgcctgtacttctagggtgttccttgatctcctctaaattgttgatcccaaataggttgatcccagaaactgcttcttcagttgcaaaactgcagaaagcaacacaataaaaaaacaaaatcaaaataactcacatatttttaaaaatatgtaataaacattactgaatgttgtggagacattgggttgtgtgttatttaatcataagaatgcaaactactgaagattgaataggagtcattctagttctttttttttttttttttttccgagacagattctcgctgtgtcacccagactggagtgcagtggtgtgatctcagctcactgcaacctccaccccccggattcaaacgaatctcctgcctcagcctcctgagtagcagggactacaggcgcccatcatcacacctggctaatttttgtatttttagtagagactgggttggccaggctggtctgaaactcctgacctcaggcgatccacccgcctcagcctcccaaagtgctgggattacaggcatgagccaccacgcctgacccattcttaaaactcccaatgctttgttatgtacttcagcctctcttctttatcctgtttgatcccctccttctcatcacatttctgtttttttatttcactttcaaataatgttcatttttcacaaggagtttagttattatttctgtcatctcattttttgcccatccatggcctctaaaatcttggcttgtaccccaagtgttgatgtactcagatattaaggacacagacatatatgcatgtgtctgtatgtatatatgtagttttttacattctggtttattatgtatatgtatacatagaagacccagagagggtctctctctctctctatatatatatatatgcatatgtttatatatcctcctatatattatttatgcttgtatagccaatcaaaatacatatattttacccatttatatttggtatatgtatatattttgattgcctgtacaaacataatatatatacacatatttatatatgtatacatacatatttgataccctaattttatacacatacgccatacatatgtgaatatgtaagtatgtgcacaaacatacatatatatgtgtgtttgtatatatgtgtgagtctaaatgttatacacagggacatacatgcgtaagcccttttctggtagaccactacctgcagatcgaagtcaagtccactttcaaatttctgtaatgctgacactcttgatataaaggttgcttgggattgatgccacatgtgtaaacctgctagaaatcaatatctcattggggaatacttttgtgtctttatctgtttaatgaatgccatgaaaacaatgacgtatcatttgggtgattcataattggattcttttttcactatggagttaactaaatgcttttaggctattcaagtcacattcgaattacagttaatagttggtaaatggtcctcatattgttatactaaaactgtgcaaagatagaaaagagaaaacagcttcttttcttttttcaaaataaataatagtgacattcttatgactaatatattttaatgctatatacatttttgtggagtatttggaaatgtcaccaaaattaggtttcattggaaatccttgagtctagggttggagacaaaaatcactcaggattctcttatagctgtcctctgaaagacatagtcttaaaaatataaaactatgataaattttctctatctttgaggcaataatagctgcttgtattattttgcttctaataataaattctgatatctattaacagatatgctattctttgctaaattactgtgaattttgtagtcacatctcagaaggaagaaaaaaggaaataaaataatgtgataaatcagctttagatttgtccggttttaagaccctctgccttaagaagcagcttgcatcagtggaaagataactggattaggagacaggagaaacaggccctattatctacttttccacttatctactatgtgatcttggcaaataacagtcacccatttatatttggtatggtacttctgacttttttgaagagaaggtatgaggttgaggatccctgcaatgagtaattggcagtttgtaggggctcagtaaatatatgttcagtgaataaatgagattcagcttatttaaattaccattatggctatggaataaatatttaggtaaaggcatctgaaaagattaataattgaggatagcggtaactgtagagcgtagaggataaagacactcataactttaagagcagaggtagtgatgttactgataaacagttgacaagccaaccaaaatgaagacgtggagtcagaaaggccaagaaaacttggaggggaggggatcctcttagtcatccaactaaactatggccaactttgactcatccttttcatttgctctcatatcctgccaatattgctaatgtttttacttaattttctgctgaatttagttctattgctagtgacttagcttagccttcatttcccttgacaaggaatattagtaatagtaaagttcttatcacacctcatgcttcattcaggctgtcttcccttctgtctatcctgtataccaccacttggtgaatcaccgtaagtgacattttgtcaagtatctgtgcttttcaaattcacttcaaagatcattctaaccatttatactggccacttattctgtacccctgctttgattcacttcatgaacacacattgagggtatatactataggtatcaaatctaaattttggcttctaatctacttggccattaagacattctagaatctgattcctctttaatggcatgctgacccgcttcctctttctcaccttgtatgctcccatctctctagttagatcttaacatcactgtcacttaatacagtctacaccaaacacatttttcatgatttcacgtgttttcttatgtttacaaatatgctgaatattctgaatactagcaccatctcacatatttttctggaaactaaaaacaaaaatatttagcacaaaaaataggtatttagcacagttctgagtaaacagtacagatcgatctttcctggagctctgctttgtatggttttgaattactgtctagtgtccttttatgtcaacccgaaggaaggactcctttagaatttgttgcagggtagatggtttagtccattcaggctgctgtaacaagataccctagactgagtaatttagaaacaggacaaatttaatgctcacagttctggaggctgggaagtctagaatcaaggtgccaacagattcagtgtatggtgagggctcattttcagcttcctggatggcaactgtatcctcacatgttggaaggggtaaacaggctcccccaagcctcttttataagggcactaatcccactaatgagcctggagtgctcatgacctaatcacctcctgcaggcccacccaccttcttaatactgtcacgttggggattaggttccaaaatatgggtcaatatttatatcatagcagccggtctactagctgaccttggcaaagggaaacctcacatcagtgggacggggatattgaagcctttgtcctttgggaaatttagcttccaaacctggtctgagatttaaaggcaagagtcacatctaagaaggtggaaaagtctggtacagctagactgagagtatcaggggaatttaccagggcgtttttgggactctacgtgggtaaattctcaagctattttctaataacttctaaattgataaagatagagagctgcatgggggttgcaaatctcattttctttggaaaaggagtgctttgtctttccaagaatcacatttcctggcaaataagaaactatattttgtaatagaagtcattctcctgtctactctaaatcatcttacttaaggctgggtagaagaatgagggctttataaagagaaaagaaaaataagacttttataagggtgcttactgatttgactttgtacaaccccactcttaggttatacgataaaatcagtccctgtaccaagagccctatcgttgtaattgtttgtacatagtcactagttcaaacaccgaattatttaaagtgaatacctacccactctagtttcctgttctgttattttatctggaaacttcctagggaaaggtaggctaaatttttttttttaaaagaggtcaatgagtttgggcattgcttaaaaacttctcttacggcaaggtattaactgtaaattcatgacttagtcaatggggtagagtaaggagccaaaatcagaaaatgaaaacgtggtaaatgcatttcctaattgttcattactgctttttcaaagctatcattttctgctgagcaaaatagttagacaaaactagttatttttataaacaaagtgacttggccatttaagcagtttcctctccaaaatacaaaagacaagttatagactattttcttttctttcctgggcaacaccattagttatatgagctctaagagctgtcttgacatggaaataattcacttgcttcaagaaagaaagtatttgatttgttaactatgtgctcgagagacttctctcagttgcctgtttggataattttaagccttgaaattaatgctacattagaaatacaaatgagtaagagtagtatctacctatatttgagtatagtatgctggaaaatattttcatacatatgaattcattcactttttataataacttttaagagatagtcaaaacaattatcctccaactattgtgctaagtaagcctgaggagaaattcctcccaccccaaatcaatagaagggttttcttcagcattatagtaaaattatcctaaaagcacatatgtagggataatttcttcatgaattttggagtactgaaagaaaaacataattttcagaaactttatttacatttaaaaatataacttctttttggaaaagtagattttgattcttatttttgtcttagagagtgcatgtaaaagctcaaatggtaagaaagtactgggcaaaagaacccgttatgcatctcatgttaaagaaagtgagatagccgaaatcactgggacaaaattacttgtcgtactgataatgagcattttctcagctgtagttgaagtttttagagagattgcatttaacatcaaccatatccaaataagaaggatcctcctgagtcagcctttgaaggaactcctccataacctaatttttcttgtctataaaagtgaaagaaaaggtaggtaggagagttgaatctacatatttgttatttccttgggcattaccttacattattttgtgtattacatattttggctattacgaataagtcacatcagagattctcttttgttcttataacattacatttcataaagtgagctccaaaaatttaaacacatgcaggttttaatatacgtatagcctttttgagatcaaagctatgcgagccaacaatactgcaaagagagagaagaaaggcatttacagaaagctgaacagttttgaatggatcatcatgtaggttcactttgcatcttggaaatgaatgggtggaccgtgggtcataatatgaaggcttatggggacatcctgcctacctgggattctggatattgtggtctttcaatatttcaaatatccctgttaatacaccagttgttgccaggcgctgtggctcatgcctgtagtcccagcacttagggaggccgaggcaggtggatcacctgaggtcacgagttcgagaccagcctggccaacatgggtgaaaccctgtctctactaaaaatacaaaaattagctgggcatggtggtgggtgcctgtaatcccagctacttgggaggctgagacaggataattgcttgaaaccgggaggtggaggttgcagtgagctgagatcacaccattgtactccagcctgggtgacaagagtgaaactccatctttccatctataaaaaaacaaaaacaaaaaacaccacaaaaacagatgttgtattttaagacctatgagtggcaatgcgctgatcttttattaaaagatagtacagtctttactgaatttaacaatcttttccttgggaaaactaagcaggcaggtttgggtaggatgaaaatgcagaggcagaatgctctggaaaatgcttgggaattggaattaaaaaacaaagctgtttgatctttctccgctattgttgctgcctgtgtgatcttgcacaaatcacgtaacttctctgagcctcagttcagttaaattcaaaaggcacttattaaacatctccagaaggatgtctagagaagaacagggaaatcttatgatcagacctagcctcattagctgtgagatttcagccatcagatggcaacaggagctggatctccagttactgtagatttgataagagggtggaaagaatttgttttcttacagttgactgcaaaacgaaatattctgttaccttagctaaccttggaagctctgctttccttgaggatttaagaactttcatatccataaataattatttaatgcatgtccagtgcttgaaagatagtataatataggcattactattttattccttttttaattaatttattttttttttttgagatggagtctcgctctgtcacccaggctggagtgcagtggcgcgatctcggctcactgcaaactccacctcctgggttccagtgattctcctgcctatgcattactattttataaagtagacgtggtgtttgtctttaattccccaactatatgcacacagtctgttaaagcacaatgaaataatgatatttgtgtgcatctcaacatttaccctctgggtgtatagttatcaaaaaccataatagtctctgctgccctttatatgaaagtcaactaggcaacctagcaagagagccatgactttgaagaacaactaatgaatgaggtgtgtgtgggaggggtggaggggtggtgtttagaagagaatagcaatagtctggaaaaaaattccttttctagtaggacaacattctatggggtgcccttaaaaatctatttaattataatcatcctatatgcttattcttaatttgaaataaggtaatgataatacagctaacatttatttagaattgctacatccttcttgtgtggtgttaaattctcccaataaacaaatatcatcttaccattctaaagataaaagcatgagcctcaaaaagattaaataaaatgtttaagatcacatgttgtctgaaataaaaactgtgcaatcagtcactttgttattaagttacaccatttagtacagtgacactggctaacaaatgccccaagaagtattaaatctcttttctgaattttgaattatcacatgcattattaatctaccataattaaatgtcattttcatatgtgaaagtgtgagagggagaatgctgaggagattgaaggagaaagactatatgggttccaaaactggctcgattttgggaagttagttgatttgcttgtgcctctgtttcctcttatcatagtgttattattgagaaaactcccttgcaggtaataaatcctcaacagcaacttctttttgttatcagtattatcaggccattcccatgtcactatgattaaattatatactcctcaagggcaggaatagtatctgattttctgtaagattttctcttaggtctttgttgttattgcttcaagaatgcttcattacagaccaccacaacatttagtggcttacagaaaggcaacacaaatatatatgtgtgtgtgtgtgtgtatgtatgtgtgtgtgtgtgtgtgtgtgtgtgtgtgtgtgtgtatatatatttctcactcttgggtgtgcaaatgagctacaactcagctaggcaagcctggacttcaggctgaaggctggctgcattctgctgcacgttatttttatgctacccaagctacgttttcggtattgtggatcacaggagcactagaaagtgagacgaaatacttgagatctcttaaatctttgactctgaaccaataacatgcactttatatccaaacatcactgggcaaaaggagccacaggcccaagccagatatctctgctctgcatggtgggagtgagtgaggagctcacagcagtaataccatcagtaggatttagaagggatattcaaatattcagtgaaattaatttattgacatgatcataaacatctgacatttaaatttaatttggaaataaatacattttatttttattttaagtataaccatattaatcaattacatagtaaattatattgacatcataagacattaggtctatgtttagggaattcatttttatgagattgatatgaactctcttatgtattaacttctggatgtatttttacttgtttaaaaattttcatgtcccttcacaaaaatccttaatttcctaaatatagacttaatgtcttatgagttaaagaacactgcactgaaatatatccaatatgccactttatggcaccttccaaatgctcttagtgtaaatgtatgttacaaatcccataaagcacagcaaagataacaaccaaactgttggtacaaatcatgagacagattcagtagttgtctgtttttatatgcacattcagtaagctgcttacctatgttttgttacattactttaattttcgtgcgttttctaccttaaaataatattttatgtaggataatatgcttagatctttgaataagctacttttagaatttcttgagaacttcaagagtattggaagcagtcaacatattattattcagatttctgttttgggggtttttaaaccatataactcaacttacttgagaagaaaggaaaacgtaaatggttttaaatggtgttagctctcacacaggcattgggtggccagtcaactgttttaaattaactgacaatgctattgtgaagtccattaacttaatgcagagggttgtttcattttttttaatgaggaactttaattcctttaggaactaatatttccataaagtttcatcaattttgaaatttaatatacattttgatttgatgtccatatttgtataaatatatttgacaaacatatttatccatatcaaatgaacacaatctttaagaattaaaactctaaaaatggactgctttctcatatatagagtcaaggatttatatattgatatataaattaagagttgtatatatttatgttgtgtgtataattatgttgttcaatcaacagttatttattaaggaactactatttataagatgctatatttgtagctgcagaggttataaagattaaaatgtgattcttgagagggaagtggaacaagatagccaactagaaccctccaatgatcatccaccccacagaaacaccaaactgaacaattatccatgcaggaaagcacctttatgagaaccaaaaaccagatgagtgatcacagtacccggtttcaataccatatcaaagaaagaggcaatgaagaggtaggaaagacagtcttgaatcaccacaccatgcctaccccatccgccggcagcagccatgtagtgtggagagatcatctctgtgctgttgagggagagggaacagtgattgtggaactttggattggaactcagttttgccctgtacagtggaagacaacaaggggcaggattcagctgatgcctacagacagatcattttgatcagccctagccagagcggaatcatccattctagcagttggagcctgagttctggctagcaccaccactgtggactaaagtagtctggtgttttaaataaacttgaaagacaatctagaccataagaactaagatttctgggcaagtcctgctctgtgctgggcttggagccagtggatgtgggatgcatgtgacctggtgagacaccagccagggcagccaagggagtgtgtgcatcacccctcctttgaccctaggcagtgcagctcatagctccaggaggagagggtaaagaggaatttgtcttacaacttgcataccagctcagccacaataaaatagtgtaccagagcccccattcgaggcactagctccttgtgccagaaggaaacccactaccttgaagagaaggacccagtgctggcagaattcatcacctggctaaagagcacctgggttttgaataaatatcagtggtacccaggcagtacttgctgtgggccatgggtgagacccagggccatgctagattcaggtgtgatccaacatatttcaagctgtgttggccatggagagagatttcttttgcttgaagaaaggagaaagaaaagtaaaggggactttgtcttacagcttgggcaacagcttggcccagtgggttagaggatcaagtgaatccctggggtccccagttctacagttctaggccttgactcctggatggcatttctggacccacactgggccagagggaagcccactgccctgaagggagagaccaaggcctggtagcattcaccacaagctgagccttgagtgaacattggtaccaagcctggggtggtaatggccatggatagacactctttctgactgaggaaaggagagggaagggtgggaagaactttgttttgcagcttgggtgccaactcaagtcacagcagaacagtgcactaagtagattattaagtttcctgactccacgcactggctcatggacagcatttctgggccagccttgagccagggagtagcttgctgccctgaagggaggaacacaatcctggctcagtttgcaacctgctgactgaagagcccctgggccttgaacaaaattggcagtagccaggcagtgtggttgctatgagccttgggtgagacctagtaccatgctggctttgggactgacccagagtagtcccagtagtagttgcaacaggggtgcttgtgttacccctcccccagttccaggcagatcagtgtgaaaagagagactacatttgtttggaggaaagtaagggaagagaacatgagtctgcctggtaattcaaggaattctcctggatcttatccaggaccaccaaggagatacctttacaagtctgtaagaatcacggcattactgggcttggggtgccccctaatgcagacacagctgcaatgaccaaagatttagataacaacactcaattccctttgaatgcttggaaatcccttctaagaaggacagatacaaataagcctggacagtgaagacaacaataaatacctaactctttaatgcttagacatcagtgaatatccacaagcatcaaggccatccaggaaaacatgacctcaccaaacaaactgaataaggcaccagggaccaatcctggagtgacagagttatgtgacctgtcaaagataatttaaaatacctgttttggggaagatcagtgaaattcaggataacacagagaaggaattcagaattctatcagataaatttagcaaagagattgaaataattaaaaaaagcagaaattctggagctgaaaaattcagttgacatactgaagaatgcatcagtatctatcaaccacagaattgatcaaacagaagaaagaattagtgagtttgaagacaggctatttgaatagttagaagagacaaaagacaaaaagaatgaagtttgcttacaagacccagaaaatagcctcaaaagggtaaatctaagagctatttgtcttaaggagaagggggagagagagatcagcatagaaaatttattcaaagggatagccgagaaatttccaaacctagagaaatatgtcaatactcaggtacaagaaggttatagaacatcaaatagatttaacccaaataagactacctcaaggaattcaatagtcaaattcccaaaggtccaggataaagaaaagattcttaaattagcaagagaaaagaaacaagtaacattcaaaggaactccaatacattggagcagacttctcagtggaaaccctacaggccaaaagggactggtgcaacatatttaaaatgctgatggggggcaggtggtgggggctggggaggtggggaacaacttttatcctacagtaacatattcagtgaaaatatccttcaaacataaagaagcaacaaaactttcccagataaacaaaagcttaggatttcatcaatatcagatgtgtcctatgggaaatgctagtttttcaatctaaaagaaaaggatgttaacaagcaataagaaattatctgaaggtacaaaactctctggtaatagtaagtaaacagacaaatacagaatattatagcactgtaattgtgtgtaaaatatttatattttgagtagaaagactaaaagatgaacctatcaaaaataataactccaataacttcttaagacataataacataaatagaaacaataaaaagttaaaaagtgggtggatgaagttagtgtagagttttcattagttttctctttgcttgttagttcatttttgcaatcagtgttgtcatcagtttaaaataatgaattataagatattatttgcaagcttcatagtaacctcaattccaaaaactgacagataaaaagtttaaaaatgaaattaaaacataccatcagaaaaaataatcttcacaaaaaggaagacaagaaggaaggcaagaaagaaggaaagatgacaaaacaaccagaaaacaagtaacaaaatggcaagattaagtctttacttattaataataatattgaatataaatggactaaactctctaatcaaaagacatggagtgacttactggattcaaaaactaaacaaaacaaatgagacccaatgaacatttgcccacaactaacacacttcatctgtaagacacaaatagactgaaaataaagggatgaaaaaacatattccatacaaacagaaaccaaagaagagcaggaatagctatacttatgtcagacaatatagatttcaagacaaaaactatataagaggcaagtttattatgtaatgataaaggagtcaactcagcaagaagttatagcaagtgtaaatatatatacacccaaaactggagcacctagacatgtaaagcaaatattattagagctaaagtgagagatagaccccaatacaataagagctaaagactttaacaccccactttcagcattggacagatcatctagacagaaaatcaacaaagaaacatcagacataatctgcactacagaccaattgaacctgataggtatttccaagaacatcgatggctgcaaagtgcacatgcttctcctctgcacatggatcattctcaagggtagactatatgttaggccacaaaacaagtattaaagaattcaaaaatattgaaattatatcacatatcttctcagaccacaatggaataaaactagaaatcaataacaagaggaactttggaaactatgcagacacacagaaattaaacaatatgctcctgaatgaccaatgggtcaatgaagtaattaagaaataaatttaaaaatttcttaaaacaaatggaaagactacatacccaaacctatggaatacaatgaaaacaatactaagaggaaagtttatagtaataaggacctacatcaaaaaagtacaaaaacttcaaataaacaacctagtggtgcatgttaaagaattagaaaagcaagaacaaaccaaaccccaaattactggaagaaaatagtgaagatcatagccgaaataaatgagatcaaattaaaaaaataacaaaagatcaaccaaagggaaagttggtgttttgaaaagataaacaaaattgccaaacctttagccagactaaaaaagaagagccaaataaataaaatcagagatgaaaaaggagacattacagctgatactacagaaattcaaaggatcatttgtgactactatgaacaactatatatatgccaataaattagaaaacctggaagaaatggataaattcctagacacatacaacctatcaagattgaaccaagaagaaattcaaaacctaaatagtccaataacagtaataaaattgaaaccatagtttattgtacattgatgaaaagtttcctggcctagtaaagcccaggactcaatggtttcactgctcaattttacaaaacatttaaagaaataataccgatcctactttaactatttcaaaaaatggaggaggagggaatacttccaaactaattctgtgaggctaatattaccctgataccaaaaccagacaaaaacacatcaaagtaagaaaactataggccaatatccctgataagcattggtgcaaaaatcctcaacaaaatactagcaaaccagatttaacaacacattaaaaagatcattcatcatgactaagtgggatttatccctgggatgcaaggatggttcaacatatgcaaatcaatcaacgtgatacaacatatcagcagaatgaaggacaaagccatatgatcatttcagttgatactgaaaaagcattggataagtcactattacttcatgataaaaaccctcaaaaaactgggtatagaaggaacaaacttcaacacaataaaagccacatatgacagacctatggctagtatcatactgattggggaaaaactgaaaggctttccttgaagatcaagaacacgatacggatgcccacttttaccagtgttattcaacacagtactggaagtcctagtcagacaatcagataagaaaaagaaataatgttcatccacatgggaaaggaagaagtcaaattatccttgtttgcagatgatatgatcttatgcttagaaaaacccacagactccaccaaaaaactattagaactgataaattcagtaaagtttcaggatataaaatcaaaatataaaaatcaatagcacttctaaatgccaacagcaaacaatttgaaaaagaaatcaagaaagtaacctcatttacaacagctacaaataaaatgagttaaccaaagaagagaaagatctctacaatgaaaactataaacattgatgcaaaaaattgaagaggactcaaaaaatggaaagagatttcatgttcatggattagaagactcaatattgttaaagcatccatactacccaaagcaatctacagataaaatgtaatctctatcaaaataccaatgacattcttcacaagaatagaaaaagtaatcttaaaatttattgaactacaaaatacccagaataaccaaagccatcttgagcaaaaagaacaaaactggaggcatcatattacctgacttcaaattataacacagagctatagtaacccaaatagtatagtactagcataaaaacagacatatagactgaaggaatagaatagagaacacataaataaatccatacatctacagtgacctcattttttataaaggtgccaagaacatacattgaggaaaacacaatctcttcaataaatggctctgggaaaactgatatccatatgcagaagaataaaactagacccttatctctcaccacatacaaaaatcaaatcaaaatgtattaaagacttaaatctaagacctcaaactaggaaactactaaaagaaacagttgaggaaactctctaggacatcggtctgggcaaagatttcttgagtaataccccacaagcacaggcaaccaaagcaaaaatggacaaatgggatcacatcaagtgaaaaagcttctgcacagcaaaggcaacaatcaacaaagtgaagagacaacccacagaataggataaaatatttgcaaactattcatttgacaagagattaatatcaagaatatataagaagcccacacaactcaacaggaaaaaaaaaatctaaaaatccaatcaaaatgggccaaagatctgaatggatattttttgaagacatacaaatagcaaacaggcatatgaaaaggtgctcaacatgacagatcatcagagaaatgcaaatcaaagctacaatgagatatcgtttcaccccagttaaagtggctttaatccaaaaggcaggcagtaacattcccaccaacagtgtatgagagttggagaaaaaggaaccctcttacagtgttggtgggaatgaaaattagcatagccactgtgaagaacaatttggaagttcctcaaaaaactaaaaatagagctatcatatgatcaagcaatcccactgctggatacataccgaaaagaaaagaaatcagggtatggaagagatatctgccctgttatgtttattgcagcactattcactatcacaaaagacttggaagcaacctaagtggccataaacagatgaacagttaaagaaaatgtggtatctatacacagtggagtactattcagccataaaaaatgaatgagatcttgtcatttgaaacaacatggatggaactggaggacgttattttaagtgaataagccaggaacaaaaagacagactctgcatgtcctcactaagttgtgggagctaaaaatcaatgcaattgaattcatggatacagagagtagaatgatggttactagaggctgggaagggcagtgagtggcagaggggtggaagtgggaatgagtaaagtgtacaaaaatatagttagatacagtgtataagatctagtatttgatagctcaatgatgctattttttccatttgataacacaaatactagatgaatgtagggtgactacagtcaaaaataatttattgtacatttaaaaataactaaaagaatacaattggaatgtttgtaacacaaataaatgataagtgcttgaggagataaataccccatttaccctgatgtgattattacacattctatgcctgtatccaagtatctcacaccctgtaaatatatacatctaccatgtacccataaaaagtaagaataaaaaaataaattcagagtaaaaaatcatatgattttgtccttgagaaacttagtagtaggtttatagtatagcataatgcagtattagagaagtacaaagtgctttatatgtgaggagttggggttgttttgaaaatgagcatgatgttgactggtgggtatgaaaagaattgcattgtagtcaaacaagcaaaattttaaggtaggatatcatggacattttgcttgcctaggccagcaggttcttttaaagatgctgttggagagaaaccttcagagatcaataggagcagctcatagggagccttttaatgccaaaagatatgtgtgtgtgtgtgtgtgtgtgtgtgtgtgtgtgtactcatatatgtgtaactatatacacacacatacatatatatacacacatatatatacacacacgtgcatgtatatacacatatatatacacatgtgcatatatatatgtatatatatatatatgagagagagcatatatatacatatgagagagagagagagagactgtgaacgcccttggcaggcaatgtgagcagagaattggcttttccagaaaggagtttctgggacatcactcttgggataaataggaaaaagataaaagccttcaaatggaggtaccaaggagaaagctatttagctattttaatagctaatagtgaaattaataatattctaaaattttgtgggtggctataggaagaaaagggaaagaatgatgctaggcacattgtgatattatagaactgacaggaattggagactgggttaagaggtggagatggggctgcaatttggtaaatgtaactagttatggacttctggctctcaaatattgcaagttctacaacccttcctccaccttatcccagagatatctgagtgtctttttggtttgaatttcaagttaaaaccctgaatatctggaggaacacccacgcccatcatgctctgatgttaagtactaataccttttgctcatccttggttaaatctttttaaattcattcattgttctctctatatatactcctcactaacatgcaagattttctttttattttgagttgtatatatttttatttttccccatttaatttttagttgagattaatgttgcacatattcacggtaggcaaagtgatatttcaatatatgtatacaatgtataatgatcaaatcaaggtgattagcgtatccatcaccgcaaatatttatcgtacctgggagagtcaaggggaatgtggtggggccagaaaggggaaatttagaaggcaatatttgggaggcaaaggaatgaggggcagttgttcatgaaatgacagtctgaaggtagaaagtgggggccaaagaagacatcaactcccaaagattaccagtttattacgtaatgagcatgtattagccgagaaggcttgaaaaagttgacttttgaatgcgacacattttctttaaaatattgaatctggatgtttttctagttatttaaatttttatttgtaggtatctgtctagggcactttgaccctttaggtgtgggttagccatttctcattaggactgggaaagatgagtgagaaataaaattatagattgcatgttaaaaagaaaaacactggttgtgacactgagtataggttttttttttttactatatctgaagtaaaatgatacttatctgccttgttaattatatttatttgtaaaaatagtttccatttaaatttgtcaataataaaattcctcatgaaaaatatcagaaacctactctcttttataatgaaaagaaacctaagtattagttttttatgtacctatgacatttgattacaatatggaatgaaatttaattgtagcatagtatgaaatggaaaacaccctaaatataccatgaaatttatgttatgctgtgtaataatttcctcatatactttccatatataggcactaaataaagtgaagtaatttaggttaatttaggaggcagatgtttttcaaatactcataggtgtatcaggtaggatacacctgattgtgacattatttggggtccgtataatagaaaacccaagccaagggtgtgtaaggaaaaaaattgcaatttactggaccacttaactgaagtagttaggactgtgatttccaaagtgtgattcttgaatcagcagcacacgcatcaacgggggacttgttaaaactgtgaattctcagtttcatactcacggcatcagagactctggctgtggagctcaacagcctgtgtattaccaagtcctccagcttccgatgcttccatagtcaagtttaagaaacactggtatagagctggatctatccctgggtgcaaatcaacttacggttcaaaggataccaccaggatctaaaggtggactctgctaggcactgggatagccccacacccaggcttcacatggtggctaatgacaacagtagatacatatcatcacagcaccctgtccagtggacagagaaattatctcacctggaatcctcttgatgttcctgggtagcctgactcagggagtatctctgtccttcagccaatcacaatgctgagtgaatgggatgttccagttgtcttattctagtcatattgtccactgtcaaggttgcaattaatttagtatgggggcattgccacaagaaggacaagaagatgtagaatatcattgacaatgtgtcacaaacagcaaagattcagttgtttcagaagacaacctcaggccaaaatttatttaactgaagttattgatgaaagaaaaattcagagatgctctagaagtcaatcacttgactggagaaggagaaaaatgttcacttgcacagaaaatgcacagtcccattttccaatgtcctattacctagagggcaattttagtttcataaccttgattacactattaatactgggctatttgggctagtgtggaggataggcttgatgtttgtaaaataacatttatttgaatatgtttttctaaaattcaatttttttccttcttaatataaaaattgtccttattttactatcttaccacatatttttgaaatctaatctgattgttatcacatatttctttaagtggaatggcttaaataactcagataattaaaggctaattaaaggctttgtcatcattaagataattaaagtatcaattagctttttaaaaggaagcttagccttaatcagaaatcctctattcacacagcagggcctcagatatggcagatattcctgaaatggaaaaacagtacttcaaagttgaggctctgtggaacttcgtcatgatttttcttcatcaatctctattcttttttgtagacggcatatttggtttttttttcccctgctttttgtctaactagttatatattgcttattgtagatacttttgcaaataccaaaaaaaatgaaactcccagaagcaacattttagctaatttttcccagcatttttctaagttttatttttatttttgtggttaaaagggataggtaaaaacccatcagcataaaaaatttacttctctaataccctaggaaaacaagagaattacaaaatacctagaactgaatgataatgatttctggtttcaaatatttcctgccatgaatttagttttatttatcctatcagtgattatgtatagcttttctacatggtttatttaattcttaaaaattctcagtgatttttctattccaacattgtgaattgacccaagttgagtttctggatatgaaaaccacaatatttgatatgaaaaatactatatgggattaacagcagattcacatcacagaagaaaaaacggtgaatttgaagatggagcattcgaagctatccaaattaaaacagaaaaatatttttatttgtataaattttaggattacaagtgcagttttgctacatgaatatgttgtatagcgggggaagtctgggtttttagtgtaatcatctcctaggactattcagaaaataggttttaaaaatgaatggaacatcagttagctgtgaaacaattttaaatgatctaatagaggtataatttaatttgtgaaggacaggaactggcaaaatatttgaagaaataataatgaaaatatttcaaatttgatgaacattgtatatccacaagcacaagacgctcaataaacttgaactataaacaaagaaatctgaagacactacactgaggcatgtcaaaattaaattgctcaaaaccgttaatagggagacaatcttaaaaagcatctagagaaaaaaccgtatactgtatacagaggaacgaaaataaggatgatagcagatttctcttatttcaaagacagtagaacaacatctttaaaggattgaagaaaaaatgtaaacctagaagtctaaactcagcaaaatacttttcaaaaacaaatgtgaaattaagacttttttcaggcttacaaaagagaatcatcactggtcgatgtcagctagaagaaatgctagaggaagttctgcaggcacaaggaaaatcatgccaagtggaaagatgaatctacactaagtcatgaaaagaactagaaatggtaattacatgggtaaatatatgtggtgcatttttcttttattcacatgtcttttaaagagaagtttgcatcaaaaagtgggtaaaggatatgaatagacagttctcaaaaaaagatatacaaacagctaacaaacatatgaaaaaatgctcaaaatcacgaatcatcagggaaatgcaaactaaaacctcagtgagatactaccttactcctataagaatggccgtaattaggccaggtgcggtggttcacgtcggtaatctcagcactttgggagaccgaggtgggctgatcacgaggtcaggagatcgagaccacagtgaaaccccgtctctactaaaaatacaaaaaattacctgggcgtggtggcaggcgcccgtagtcccagctgcttgggaggctgaggcaggagaatggcgtgaacccgggaggcagagcttgcagtgagccaagatcacgccactgtactccagcctggtcaacagcgcgagactctgtctcagaacaaaacaaaacaaaagaatggccataattaaaacatcaaaaaaacaatagatgttggtagggatgtggtgaaaagggcacacttttacactgctggtgagaatataaattagtgtaatacaaccagtatggaaaacagtgtggagatttcttaaaaaactaaaagtagaactaccatcaatccagcaatcccactcctgggtatctacccaatggaaaagaaatcattagacgaaaaagataaacgcacacatgtgtttacagcagcaccattgcaaagatgtggaaccaacctaagtgtccatcaaccaacgagtggataaaaaaaaaatgtggtatatatacaccagggaatactactcagccttgaaaaggagtgaaataatgtcttctgaagcaacttggatggagctgggggccattattctaagtgaagtaactgaggaatcaaaaaccaaatatatgttctcacttataagtaggagctaagctatgagaatgcaaaggcataagaatgatataatggactttggggacttgggagagggaagggtgtgagatgggtgagggataaaagactacccattgggtacagtgtacactgctcaggtgatgagtgcaccaaaatctcagaaatcaccactaaagaacttcacctgtttcccaaaactattgaaataaaaataaaaattagaaaagatcagagggaaagaatatgggggaaataagacccccatcaaaaaataagtgatgaaagatactggggaaaaacacaggagagcaggttactggggaaataaagactatttgagaaatgggcaaaaatgataaataatgcaaatccacaatgtaagtttcatattttaaaagtctagacctcttgcagctttgaaacttcatgatgctatttaaatgtcatgtttagtattgtaaataatggtaattttaatcattaatgctaattgctattctctgtggctatattactattcatttattcagtcaatgcatgtttgtttagcactagaaggaacataagcacacatccagtagtctgtattttatttggtttaatttcacacacccaaaaatgcctacgtaggtattaaatgtcagctcttatttttaatgctttctagattgcatcagccaaatgggaagaattataaaaaaaatgtaaataactacttaaatacattcataaggtcaataataacaaaattttataatacttcttcataaaccttggatttgttttattgcttctaggttctcatagtgattttgatagcctatcttatcatttgttactatatctttgttaggtataaatgttcaggcttcacctattaccaggcatattaaatttcacaagagaaatgtgtagttacagctccaaggcaggtgttatgatcctgtcaaattgctcaggctaattttaaatcatatcaggtctgttgctgggagatgtttgaggaacacaggaaattatatggagcctgttgataacagcctgtccttatcctgtgacctaaaataataccaaacttgccacattaccaaccctcttgtttaaatgtaaaacccatattggaggtttacaccaatgtcattaaaaaaagaaagttaggattcaaaaatatgattgtaatttttgaaatcctggtagcgaaaatttagctgaaattggcaattatatttgacaaaatatttaatataaatcaatgtgatgtttagttcaattacctcaggaatatatagagttatcactgatggcctaaggccatgcattccaagcttgggtgatcataagcattacctgtggtgtgtttctgcaatacagtttcctaagccccttttccgaagtgcattccgtagatgtgcaggttaaccagtgtcctcggtgaatctcctgctcagatatactggcagcacactggcctaaagtaaggaattcttatgctttttaagaaactggatgcagagagctcttctgcatcaactgaagtatgttcagtcttagcttgtaggttttatttccttacagttcattaaggtcagaaagaagggttaatcttcctaactcaaatgatgctccgaagacaggaattgttaactaggtttgtgttcagtgtgaaactggcacagggggcctgactgcaaacagccatgcagggaggttgaggctgaggaggtggtgatggtaagaatgctgggcttcggaggaggagatcaaatgggcctccctcatgatgagaagggagagaagggatggaggatggcagggattgggacttacagtaaacagatactggtttttcttgaaggatgtttggatttcacagcccatgcttttctaaccaaggagccagccttagcattgacatttgagggagtatacaattccaaatgaggttgaagataaaggagcaattgctttttacattaaaggcacagccttttcagagcaatctgttcatcctctgttatcactttaaagggagtctagtttttagcttgatgtatacatttaactgactctctataatggcagagaagactgcatggcacttccaagttcatttctttacctttaagtggattaaggcatatgcctgcttagctttcccacgttcactgctttgaggggagtaaaactggagtgatttcaggaattgacactggaagagtttcctggtcacaggctttgaacccggaaagacctaagctgactgtcaactttaacttgagagagctgttaaccacctcagtttccttgtctaagcggaagaacagaacatgttaatagaaagtgcagtttactgagcatgtactgtgtgctcaggcattgtactaagtaccctatgtcttattcgtgaaccccccactacaacctttggagatatgtgttatgttctgacaacagcaataattttgcgtcttcctcatggaattttttgtttatgtgtgagtgataatgagattagactcattaaagattaaagaagattaaagccatgccaatattaggttcccagttctcaaaaaaaagggagttatattccttttctttcatttgtgactgttccttttcatcttttggtgttttcaggaagccattttgcctgcagccgctgaagtggcccagctgcagatgttaatggctgtttaccagtaggagccaaaacaccacactaaagaagctaggaggtgtggttattttgccttttctgtaagataaatttcttaatgctaatgcctccaaatgaagacatttgatttatctctaaagtatatttttaagtatagaaactgtaatgagtggctagattactactctgttttaaaatgtgttacaagacagctttcatcatgtcaatctacggatccaacaattaaaagaaaggttaccgaaattgtacacagatagaagtttacttcatatagccctggcattccagtctcttctaagaatgtgaaataaaggattgatagatggataaacacatggtagatggaggtctgattcaggtggtgttaaaaatcaaacaaaaatctttccaaagtagggatcaaattctacttcttttgagatataaactgtttatagctttgaaatgacagttttcacctcagcacacccattaaatttttatggaacccttcctcgtctattaatacatggcatataggaggggctcaatataatttagttccccttaaatgctttggtatgtgatttggagagagcagctgacatagttgaatatatatcagatatatggttagaaaaatatcgcatagcatctgtagcagaaaaattagttttctgaaaagagtgaatgtaaataatgccagggaagtatgcttttgaataacatttggtaagatccattctgaaagaagagagttagggaacttttattttattttatttttcacagtacaggaaaaaagcaaaacaaagcaaccaaatgtcctgcttgggatgaggtcattgatatcagaggatgctgcgatactgatcaaactgataaaatagcattcagtttgtctgactcattggtgaaaaatagaaaccagtgagaggtggactaaaggttagtgtgacggttgctagcttttagaacaagcagaaaacaaaatatttttactttaaactttgtctcatgaacttagttgcagtgatgggagcatttaataaaggtaagtagtatttttcattaaattttattagcattttgttatggactgaatatttgtttacccccaaaattctgtgttgaaattctaacccccagtgtgatggtatttggaggtggggccttttggagataattaggtttagttgagtacatgagggtggggccccataatgggatcagtacctttataagagaaggaaggaacaccaagagctttctttctccaccatgtgagggtacagcaagaaggctgccatctgcaagccaggaagagagccctcaccaagaactgaatcttcccgcactttgttcttgggcttcccagtttccagatctgtgagaaataaatgtcaattgtttaagccacctttttatggtatttttgttgtagtagtgctagctgactaagacacacttgataagtagctactatgcacagagtcctcttaaggaataaagaacagtctaaccctgaagccagtgaagacaagactaattaaaataatactactaacagggctgtgagtaatgtgttgttcacacacagtaagtagccattaattctgcctgggattatcttgtgggtggtgctgtttgagctgagtcttgaagagtaagagggatttgtagccttgagatggtacagcttctgaagacaggaaattggaaatgggcacagagaagaggctaaactacaaataagtgttttgacaaaatatgccaaacctaacacatgtaggcaaagccacatgcagtagttctggctctgtttatcttcctgctcagattttagtctgacagatttatagagagaaggggcagagtttctggttcatttgagaaatcatggctgaataacaggtttttcccttgattagctgggaatccctagggttgcccaagggccacagatacttactgacatttagtaaagaacctctaaaacatcttcagactggtctcattgttaataagtggtgtgacacacattgtgtgtgtaatgtctgtcttggtttttggtggaccacttaaaagtttataaaaatagttttttaaggttctgatgacttttctgcaatataatttgtaagtgcttatatatctccaacctgtaactatgtaaattactgtgaataattttgtccttaatgaaactctgtctgcttctctgtctgtgattaaagattatgaataaaatgcatcggtcttttttgtcctacattctcctctgcaaggtcaggagatagggtttgtcagggcccagttctagcactgtcttaagactccatcctcagaccctccttctccccgttaccatcactgcaaaacttaccctataaagcagatagcttccaaattaacctactttgaacattttttatcattatgagcaacttcatctagcagatataagtagtgaagttttattcagattgttacatttgaagggattttataatttgtcacattacggtagagagccctgtggcctcccaaattgtaacaacttttcctccatcacacattgtcattttcttatgccacacattcttctgatgatttttaagtggatttgtaagatgaaaaattctgaatcacctggatgagcattgctttctttttctttatttttttttaaattatactttaagtgctgggatacatgagcagaatgtgcaggtttgttacataggtatacacatgccatggtggtttgctgcacccattaactcgtcatctgcgttaggtatttctcctaatgctatcctccccttagccctccaccccctgacagggccccggtgtgtgatgttcccctccctgggttcatatgttctcattgttcaactcccacttatgagtgagaacatgcagtgttggtgtttggatttctgttcctgggttagtttgctgagaatggtggtttccaccttcatccatgtccctgcaaaggacatgaactcatccttttttatggctgcatagtattccatagtgtatatgtgccatattttctatatccagtctatcattgatgggcatttgggttcgttccaagtctttgctattgtgaatagtgctgcaataaacatatgtgtgcatgtgtctttaaagtagaatgatttataatcctttgggtatattcccagtaatgagattgctgggtcaaatggtatttctggttcttagttcaaccattgtggaagacagcgtggtgattcctcaaggatatagtgcatcgctttcttacagaggtgtctgaaataaatgcagttccttcttttgaaagttcaaaggcgttaagtcaatatatgactgtatttgtggtcctgctcagcagttattcatttaggaggtgatttgctattttctgagaacagggatatgaaatgaatgtggttgcttttagagtccagaaatccatttggctcaatggagctgacacagtttattgcagtttttaggacctttttgtaatttacagtggatactaatttcctgctcaagttttctttggcagcttctgtacagctggaacagaagctggagctatgccctaagagggtggtctggattcacttctgtgggtctactcctctgcctcttcttctctgttccctctttcctttgcctttcttttcccaaattcctcaaagcttgaaagggtgagattttccttttctttcccttgctgccctccttggaattccattatgcaattcaccagcctcagctgttggtggaataaatggtagctaccagaggaatttagacaatcctttctcttggctctcaagtatattgtctcactgtacaatcctcttttgaattcccaaagccgaatattaactctttctttcttcgcattgcttctgtaataatcctaaacttcctcactccctttccttttccaagttcaaatgcagaagcttcaggctgcctaaggataaaatgcgtttatgaagaattcctttacacagaacttttctgggagtaaatctctgttaagcatgtagtagatgttgtacaaagtttattgtgtagataaatccatgggttaatgggtggaaggggaggtagaaattacagactttgtggaatgagtagatttcaaatcatccttggaattttcaagattttactcaaggagctgatatttagagcttagatacacctctactattttataaataaagggccagctgaaccgtatgagtttcttacttagcagaattggagctcttgcttttttgtctttcatcctctatcccaaagatttgttgaaggatgatgaactgaatgaaggctgggtatctttaagaagataccaacaatgtcacttattgaaaaaaaaaaagctatttcgattacatagttttaataatcctcatgtcatgtactcttattacgattctcaatattgcagtaaattgtgttttgtggggctttgattaaaattacattttgcactcacttttatggtctggagtgattctgatctatggggggagtgataacatcagcatcaagattttctttgtccgggacgtgcttcagctgcatgacaactctcctcctgagtgatatgtgacttgtgccttcatcacctgttcatcctgccaatatattttccacatctgtcctcccattcacctaaagatttattccacatgcctgatgacaaaatgtccttgcacctgggggacctaagcctgtagaacatctatctcattttctttcttttgacacaagtccattagcttcatctgtcttgaggacaatcccggctaagagcctatctgatgtttcttctttggggacctttcagaatttcaaggttataggaaacttggctttgtgcaaagtatgttgccatctgttgctagtttctaatttcagatccatttaagagatttgccaggttagatttatatagacattttaactaattctatttctttgtacttaacccaagatcacatacttaggtttgtcctttcaatatcatttatcagaatactccactattcagccactttgaggagacacattgtttacctgccacttgctgtgataagacattacatgcagcatgtgtttatttggtagttatcaaataataatgcctggtaacagacagccaaaaagcaaacaggggatttagaggttcctgtttatttttgtttgtttgttttgttttaaataagtaaattgaaactcagagcaattatgcggcttacttaaagtctcaaaattagctcatatttcagatgaaatttgccttcaagttctagatcacctgcagcactgaagttttggtgaccatttattcttcagattgtatttatgattccttgattaacaaatctttaaaaagttgtgaaaattattttctggcaaacattggaaaagggctaaaatatgataatactgtagtcagaaaaaaactattcaaagacacacttgtatacaaataaatatatttttattacatatgcttcatacgcactttctcacatacagagctctaacttcagtgacaataagctctttccagagatttatcttaagacaataatccagaagaaggaaaatgctatacatatgatggctataatagccaagtgttataggcaaattgtgtatccaataatataaaataaatgatagcatattaactaatgtggtaatttacagtcattaaaatgatgagtatgaagacaatatatggaaatatgatgaacaatcgagtttaaaaagccagaaccactgtattcgctttcctttcaactatatgaaaagtatacatgcataagacaaaaatgtaaaagtctatgaaatacttagtgttaggttgatgatattataagcgcttttctacttttatatttttctgtaagttaatgttggttctacaacacaccatgattacagtggtatgatatccactgccaaagaataggaatgcgttagaccaagagtgatggggattatttcacacaagtgctatatttctctacttcccatgattgacattcttaattgatgttggaagggttttgaatccttctaagttagttcttcaggttcatgaactgatcagcaagagcatggaagttgccaaccctttttaacttttatgtagtttactctatattccaaattaattgtccagaaagagtattgactttaaatgggctccaaaatatataagtagcaggaatggtggctgagacaaaactcctggtgttcattgcttagaaatgtctgatgtggaagtgatggaaatggtgggatctgagctggccgttgtcgtagctgtgaacgaattcacatttgtttcccaggccccacacaggtaatgctctgtctgtattccacagacagacacacggtcaaccccacaagggtgcttttctgttcccttcctagagtcctctcatgaaaatgtgcttgttctcatctcatcccctcaaggtttggctttctacttcactgactccccggatttaatccatgtatgggtgcagctcctcaacagtgggattgctatttgtgtaggaatcttctgggtccccacactttttttttttgtacaaagaggtaactagcaaaagggattttttttaagtaaatgatttttggtacacttccaatcagtctatatgaagggcctacctcctataaggatgggcatgagtaggggaattagaagaagattaagggggggtctttagttggagctaccagggaggtgtatgagatttcatggtgtctgtctgggacctggtaaggagtaacctttcccatttgtgtaggtgtatttacagttgacataactggtatagctttcctttatctcaagacaggacaaataatactgtaattctaggtaaaagcaattcattgagagagaaactgatatatcttacattgtatatttcataatatagtgaaacattttgaaagcttacttgtcttatattggttttcttaatattctttaattttcccaccagcttcaaattccacaatttatctacatgcagatacccaccatttctcacagatacatatattccagcctatatttctccagagttgctatttcttacagaatatttctacttgaatgatttactaatatgtaacctatttttgttgcaaaacaacagatagtgctcagtgtagaatttcacactccaatccaatgtaatctagaggtagacgctcccgggcaggctagtgttcagcagggacacagccctgggcatatagttgggagacttgggctggggttttctctgccagagcacagatctctgatcctgtaagtcatttaaattcttgtgtttcaaattccctcactgtaaaaggagtggcttgacctagatgatctcaaaagtctctccaagcttgaaaattctggttctatgattttaatatttaacaatacacataattgtgcttgtgcttgcatgataattaggcatgcatgataatggggcacagtgaatgactgtaattagctttactcctacagagaaaaaatctatttttaagtctttccacttctcatcttattggttttttaaaatattgataatcagtatcaatggcctttgactttcccttggaaccttttacccttaccatcctcaacttccttcttgccactgctctctgtcattatagcggtaatcacaaatccacacatatattagagaccattatgttgaatattaattcctgcagagctgaattcttcctgttctgactttcaggtaggacaatcctctcccatgtccttaattttcatccaataaaggtacttttgtggaagcttcctgccatatcctgaataaaggtgtccttaaaaatccagagatgaacatggaggaattaggtaaacaggatctgtttcacaggggcctgtggaaagcctgggatgttgtagtatcaggcatgtagatcatagtaaaggggatgtcaaggagccaggggagcctgggacaagcatggcagagggcaaagcccacagtgtgagaggcctgggggcctgctgacccacctgggagttctgaggccagagggaaaagagagggagagttgtccttacaggatgagagaagctagaattgtggccctttactttagaagtagccttctggctctgtaagtaaatttacctgacaatcatattaattattataactaacattaattctacaaatgtgcaaggaactgtgataagtactgtaaaagaatgatttaactcctcacattattccttttaagtaaatccttttgaatccctcaattgtaggttgatgatctaagtactagagagttctgaaaacttgatcccagtgatatgagtagcaggcgatggagccagctttagacacaaggcgatgacattttcttttcccttctactcaccccacagtccgtatgccatcctcaaaatatgtaattgcaatgtcaatttttcctgtttcgttggaccaggacatgtaaaccatggaggcagagtctgaaaagttctacgtaattgagcaaagtagtgaaaaagtgaagctggaaacgaaagacaagttttgattccacttggtgtgttttaatttaagttggccaccaggagttcctgagcaaaggtgctcactgtctctagtggtacttgtcttcctgagatggaagctctcggtccttactccccaagtgaccatgtcacgctccttaagggcagtctctccagatgatgaccaaatggtttgtagggaagattttaactctgatgtggaggggctcttcaagcaaatattttgtctcttctcagtacagtaattaagctgataattttttttttttttaccttttcgggccactacaacattctctgctcttggattcaaagatgaatgttccttccacacagtttaatacgtctacagttccagccgaggttgggggagattttgtctgatcaggatgtttttccaatagtagtgtctggttctgtgttgggatttcactcagtaaggttttccattcagttttatgatttggtactcctggtatgcacatcttaatatatctgacccttcactttaaatttttgttgcactttttcttttttttaaattttgtaccaaaaaaaaatgttctgtatccgagacctcatatagcttctattgggagttgtctccacttcaaacttacatttcctttgaaatcccagtgagtagccttactttccatatggcctgatgagaatgtatttcccttgcagatgtgaacaagctttttatttttaacttctcaaataagatgtacatccaagactgttaaaataatcttccataatgatttgtcttagagtagaaatatgtggcatatttttaatcataaatacatatacacattataattgttcttctgtatttaagttagtacctgtgatttgtttatccaagacagatggtaaggggtgatacttttgtcagcttacatctagagatctatagtagggttaatttagaattcaagtaatttttgttcaaggctttatgattttatgaagaaaaaataggaagaggttaaatgtcatcaagcattcagtttaaaaaatatacagatgacctaaataatttgttcagttgtatacttatatataggtgtatgatgtattactcagcttaaacctccagtcctttctcctagagcctaatagcatgaacggccgcagatggggattttacctaggtttctgtgttagcctgtttttaggctgctgataaagacgtacctgagtctgggtaatttatacagagaaacagatttcatggactcacagttccatgtggctggggaggcctcgcagtcatggtggaagagaaaaggcacgtcttacatggcagtgggcaaggaaagaaatgagaaccaagccccttataaaaccatcagatctcatgagacttattcactaccactagaacagtatgggggaacctgcccccatgattcaattatctccctctcacaactcatgggaattaggggagctacaactgaatgtgacatttgggtggggacacagccaaaccatatcagtttctgaatgtcctcttcaggcacaattttgccttgtgttatctgtgctctaagttcatgctgcttgtttcctggctatctgcaaaaataataaaataaaatgcagcttcagactcctgcatttgccacatatacttttcttatgctttacaaactttatcctagttatcaaagaccaggtgttgctggatatttctgctttggcttctacttttctttaattctgtcaacccctccctcatgtctttacactgcaattacatagaggtactcagtacaaaatatattgtatcagcagcatagatggctgcagagattgccttacagtagaaggcagtagaagtttttatggttttatatggagaaagaaaattgtttgctagcactcagatattcttctccttaagttcgtttctcccgactttgactttcactataaaatgccctgactcacttttggaactggagcaaagagaacaagagaagtgatctagagttgctacttcttgcttgggcaaataaatgcctcatgcttcccctgtccctttagtgtgagtcacatagaagactttggcaattgatttttctatttataatcagatatccccataggaatctttactggattactctgactttaaaaaaggagagagatttctgtatttaaaatgtttcataaaaataattggggaaaagagaaacaagaaataagagatggctcagggcttagatgcctgtgtcccctaatttgcccctgagatggaggacattcctgccttctgctgcgtcagcctccttccactggctcttcaacctcctggacctcagtgtggctttccaggtgtggccactggctggccttgggcctgtcaccactcctttcatctgatgccttcccccactgaaggccataggtttatcttccaccatcagtttgtcttattaaaactggccactcgacccttgcattttctgtggtctcacaaaataacacctaaggataaagacagtaaatccagaatacactttgtttaattcctcatgttgaggatcatttttgatcattgcctgctccaacaagccagaaaaaaaaagtccaataaaatatattatgcagtatctctttataaattgttttcttgaatagttatgagtggagtccattggattcccatttataacagagtttaatgtagtgaaattcctgctgactgatattggaaatgaaagtttcatttataaggatgcaattaaagcattgccaagttaaaaatgtcatgttgctctttgtcaatgaggttcattatgctatattattatatctgtgtgaatcctttcttctcaggagcgaaatgttctttctgaatattaaccaactgctacaaaattcttcagagattattattctttcaaattacatgaatttaaaaatcatttactaatgaatcctcctgaatttctcagaaaaagaaagaactcgagcagatttacccattggtaaaggaaactgccccttctctgatattgggttggttagtaaccattcagttgcatttttcctgcactttcatgtaagtcagtcatagatgcagaagggcatcctggtgggaagtagcattttacagcctttaagcagactgtttttctaaatataataacaatgaaaactatttggatacacatgtaagtcctttgtgaggcttgagtctagatgaaatatcagagtctactgcaacatccagtctgagggtgcctttgaaccatttcaggacaaaagcaaattaaacttggaatcctatcccaacttcattacctagctgaatgtactcacagttcatctaacctaattgctcttcctgcttcctcctgacagtaaatgaaataataatgacaattattttaaaacagtaaagggatatataacttagtggttgttattctgattactactgtgtgtctcctctgcttcacaatgggtagagtttagtttgatgggtggttcaccttttggctcctgctatttggcttaattgatgattggcaggcaatctggcttaaatctgatgacctttcttcaggaaaggaagggtgaaatgaagagatggtaagaattcctcccatatttcctgatctatctttggtggcccaggcttccagaattccctgaatcacactcctctgcagaatccttgcagtaatggttgaccatagtatggagagtgactgtcctgttatctactgttggtgtggctagacttattctgccagcttatctgctggctcccaggaacccagtggaatgggagtcctggcatgcagtgccctgtgaattcaatttccaggcaaaaccaaggaagagctttcctttcgagaatgcagctgacactgacatcctcaacaacactttaaatacaatgattacagtaaacaaaaatacaatgtcgtaaaaaagaaaaatgactcttagatattacccagcaaggaaaccacagtgttccagagaattgtaatgccccatgatagcccttaaactccctcaccactcctactttttgatagaaagatctgtaagggctacatgaccttaggctctactccccagcaaggtcagttttgttctatggaatatactataatgttgattgttgtgttcccataaggtcagcacatctccaaggtctgtcctaacagataaacttttggatcagtggtgagcagactaggacaggtataacatgtgctccctaaccagcttcctgaagtggctcatggttgaatttttgggaatcctttatcacaaagatggagaaattggggaccagaaggttgaatgtaagccagttccttttccccagaggcttccctctcacctgaaagggcatttttgggtgagcctcatcgttgaaagaaagtgggatacaaacaaaacaaaaaataagaatgtgtattggcccccaagcagacaccctaatttagggattaatggatatcatagatataagtacacacttaaaaaaaacaactaatgctctttgatagcttaaaccttaagtctttaattttatgcacattattattttttattttccaatttaaaacatttgcttcgttaaataaaacacacattaaggaaaccacataggaccatgtgtgatataataagttatcagaaggttgaattcttacatttactactcaggctaagaaattagtctgtggccatgctggagccctgtgtcccatcctaagtttgttctcactctctttcttcaaaagagatcattatcttggtgcctagtccttcatttatttattcacttattcaacaagcattatggtgtgcctggcatatgtcaaatcttttccatctgaaagattcagaatggtctcttaggtatatgagataacattctaaattaattttattctcctggcctgcaaatttattctcaaaaactgctagttatatggttgctctgtttacttggggacaggtaggctggttcatacatttactaattaaattacttttattgctaactctgaatatttaatgccttgtttggcaattatgagagatatgagtaaaccacagtctttgcttctacaatgattatacattatccaaacataatgcaaaggaaatgttaccagtaagaatgccagaggcccttttcccctaaattctcatgtgcctcgttccaggaagaaaaaaagaaagatttaggatgtttctttctacatcagtcattcccttggagacaagagagaatgaggcaagatgtattggattgttccttagtgtttttccattatgcctctccatctacagattgtgccctccaacaatttcctccctctaattcaaacgcagtgctcttgggaacttattttatgtgtacccaataaaatggcattaatctgatagtggtttgttcaaactcacacaaaatttgaagcaagtgctgtgttccaccagccagatgtcatatttggtaaaagaaatatggggtaatcaattttaaagtcctccaagttttcctatactgtgaaatttagggaggtaaaattaagattgaggcaaaaggatctggatctcctgaaaaaatatggttgtgcacttagtgttgtacacatctttcctaaccctctattccttggactgtttgtactcagggtcagggagtggtgaggctctcattggcatgaccatttaaggggttcaggaggtgtgtactccacagaaggcattgctgaacctgtggaagaaatgctaacaagaatttgaagaatcagactccaggaatgggaaacactattctgaaataatggaggaaaagagaccacattcctttcttgggggctgggatcaagaaagggcccccaggtgggccaggaactcacctgggctggatccatgcagagtttgttcatggttattagagattatgcctttagaagtgacactagtgggcacccctgaaatgacctccaacacaccccctaggggagtacaccctgagtttcccgaaaaatgaggaaccactgacaacagaaagaactggttttctttgtgtggaggggttagtccctgggagggaataatcttccttcagtctcaatagctaaaactgtggggaagtgatgaatggtagacttgagactttcctttgctgttaaggatgatggactagatgatggatgctgttaaagatgatgatgttttgggacatcagagcaaccaataactaaacagcagcctgtgataggctggagcaggttgtcactaggaagacagggagtattcaagtctggctttctctaaatcgtgaaatcattattctcactttgatggttttaggctaatttgacttggtaaagcaaagattacataaaaagttcagattgtggctgaaacacaggcatgtccttcaatctgtaaaagataaaggcaattaaaaaatgaactgtaaatgaagacatatttttgctaaatgttggaataattgttaaaaataattattttgctttataaacatatatttccaggagggctgtcaaaggcactgtggttaggatacatacacttattttttaaaaagttaaagatctgtttttcttataaaactgttcatcccttttgtgcttgacacatgctaccagagatacaaagtagatggaaaggaatcatgccctctcagagtcacgatccagcaaagaacctgaaaatgacaatctgacacccaagtccaagctcttaactactattttacactgattctcagaattgcttggaagattaaataagatgataataagagtgcatcataaccttatggccaaatagaataccattcactaataaagcaaatgttctgtacatttccttccatatctatatcaaattattcatcaagaacatcaaaatgctattatccatccacaactaatatttacaaccaacattttagtaagttaattttaggtaaattaattgaaacacggcctgtatatatattttatgtgaaagtattaatagtgaagtcagaaacgttgcatgagtgtctctccttagctttttatacctattctgtggaaagataatttaaagaaggtgaaatagcccttgcaaatgatagctggctggctgactcactgctatgacttgctttggtagctgctgcttctgtcttgcctgtgttttagggggaaaatatacctggcaaattcctctaatgtgcattgcaccatacttggagaaaatgaaatcttcacataatgtcaaagaaaaaaccagcatcacacagcctttttgtacaattagggataattctacctaagtggaagaagggaagggcaaaatagaacattcagcaggtcatctctccaggaagtgtttaatactgaggcgttttgggtgttcgtgttgtgctttaagctgttaccatctctcaagcctccctacttatttattataaacatttaaagctgagacctttacaaaaggccaacattaacagtgagtgcattcacacaatgaaaatgtatttgaatgagatttctctgctgttagatggatcgtcagtggcattgtctcaaaggatatttgtgcttctctccttgtcatttggctttgacaatcagaatgatgaagattcctgtagtagaagtgtgcatgtaaatggaatttttttaacctattttatgaacacttcctgagtccctactgtggactggatgtgcatgttcttgaagaactcataatctagcagaagatgtaaataaatcaatctatagagtagaatgtgatgaaatgttggagagaagggtgtttatttgccctggggaccctaaacaggttgtggctaactccgcctggaggatttaggggagtaataatgaataaaacattcattatcttattcaatctgtattgaaatggataaaacatttattgtcttattcaatctttattgattgcttcagtgtatgccatgcactgtatttggtgctaggaacacatgggtgacaagacagcattgtgaagaactgcaaaagatctgaggtttctaccctccttgccagccaatgagcttaaggctttctctccgtctgagaaaccatcaatagtcgatgttcccttcctcttcctgcttgctaatactccccagagcaattctaccactgtttgaactagccactgaataggaggacactgacaactttgggtggcagctttccagttcttcagaaactattaaactggcaacagagaagaagcggagcttgctgggactaggcctgcaggtttgaaagttgcttcagcagcagagcaccagcatctgagctcccttttttggctgcatgtcggccctgggatgacagtacagtagtgacatgagaaagagatctattagcaagagactcagctgcttctgaagaggtgggctttcctaccaagtgaatattcttttgatggcaagcctactacaatgcgctcactgtggaactaacctaaggacattcaagaatacttcagatgtcctaaaatgtgagaatgtactgctgagccaaataagacattcctgatgtgttggattttggaacttagtttgatttaggacaaaagaccaggaggcatatctctctacatttttctagcatctgtgacattgaagacagaagaaatgttaaatttgtttgattgttaaagacaaaactaacatgtgtcaaagacaatgtcataatttattttgtttattctgggataactttctagagtaatgtgtatcagattagtaatggggtcttgatgggaggcattgttgttcatagcgactctgaaagaccacatgcagcaaggtattgggatgcttagaagatttgccaagtattcagggtgaagtagcaggtgcacaaatgggcaatcagggcacagccaggtcggcagagccagaattgtccctgccctgcttccatacctctaccaaccgtcacctgcaggctgcacacatttccatatgaagagtgattcctgactcttgaggaaacataaaaggtgttgtaactgagataaaatttgcttcagcttaaagaattccttctattatttcctgtgacttgcattttattttttatttcctttgacttgtgtgacatgtaggatccttctctcctgagatctctcttgactgtaaactaattacccattgtgacatgaaaacaaaatatgcttcaaatttccaagaactgtggatcttaaagagagtcattgtttgttcagtggagatgaggggtttgaagatgtaattggaagaggtaagcttttgtgtatgaggaaaggaaatataaagacattggggaagatctgggagaaggagaactgctggggtggaggaagaagaaataagaaaaacctggttgctgaggtgaagaagacatttgggagaaaaaggaatacatgtagagaagattccttctccacgccccagtaaagtcttcccacataatatgtaaagtcaacccttttccttgcaacttcatgaaatcttcaggaagatagtggttcctcattcatctattgagaagtcagagctatttattccctgcttttcctaccagaagttccatgagggcaggaggacagcctgctttgttctctgctttaccccggcaccaaggacagtgcttggtagagtggatatccagaaaatacttcaacaaatagatgacttacttatttacaaataaatgcttttgtttacaaataaatgcttttatttttgtgattgtgttgaacaaaaagatttttcttcacatatcatcctgcttcaaataatacctatttctagaatgattttttacctttcctaatgataaaaaatatataaattatttgatattttaaaaatacacaataatgtgaggcaagaaagcacccacaatatcatcgatgttaggaaacttaattcttttatgtagtctttcttgtcttctttgcatacaccatttttatacagcgtcatttctggctggtgttttaaggcaaaatggatatattgaggtcacagagccattggaacaactgaaggaagagattttaagactggccttttggaaataactttaaggcaaaatagatataatgaggtcacagagccattggaacaactgaaggaagagatttcaagatagcttttggaaataacttcacatttatcctgttctctttccaagttgcattcataaaacttagattgtacatagggcattgctcgcaagggagtatgggaatgtagtttttaaggcaccaaaccttttcttgtgtatttttgtagttttcttttgtctggacctctctttctgcagctggctctacaactaacctattgacatatttcaaatctgagttcaaaagtcaactctgatgagacgagagactttatctgctcactgactcacagcttacctctcccacttactctaccttattacccagtttattttctttgtagcattagtggcaatctgtaattatttatttatgtctcttggctgtctccactactagaatgtaagctccataaaagcaagaactttgtctttcaatactgtatcctcagtacctaacattttgccagggctttatgtattttatacacatttgtaatacgatcaattcaccaaaagttgtacatttagtttctttccagtttactataaacactgcatgatgagcatctttacataaaaatatttgtctacgtttctgatcatttccataagatagactggtaggagttattgaattggtaggtatggaacatcttatctcttatatttgccaaactgctttataagaatatggttctatttactttcctgccagcaaagtgtgagcttccattttatcacatcatcactggaattgaatattttcatatttaaatatttgctaatttttctcactaaagcttagagggtgtgttttctgataaatattaagttttattatattatggatatttatgcttggtcatatttttgaaataaaatttacattgttttattctatgttagaagtcttacatttatatgtagtcaaatcaattgattttttatttgtgatttctgtcattattaagaaagtttttgtccagagctcagatgaatattccatattttgttctttgatgttttcaatatttcaactctttgagaaactttttaaatcaaatttattgtaataaactgtattttaaggttttttaaaaaattctctcctttcccaaacttgaaactggctcccgttagtaaagaacattggctcatattaatagaaaacattgactaaggaaccaaacataaatcacaaacaaaaaagaaaagaaaagtaaagctttcatatctgtcatattagtccattttcatgctgctgataaagacatacccaagaccgggcaatttacaaaagaaagaggtttaatggacttatagttccgcatggctggggaggcctcacaatcatggtggaaggcaaggaggagcaagtcacatcttacgtggatggtggcaggcaaagagagttgttcatggaaactcccattttttaaaccatcagatctcatgagactcattcacgatcatcagaatagcacaggaaagacctgcccccataattcaatcacctctcactaggttcctgccatgacacctgggaattgtgggaattacaattcaagatgagatttgggtggggacacagccaaaccatatagtcttttatatctgtttattcttataccagcattaagcaactctgaaaatcacattcaaacattcatccctcattttaattttatttacaaacataaattaatattctacccaggttctaaattgaataataccattggacccggtttacttagcacatgttgtgattgtttcaatattaaccgatattcaatatcattattattattggatgataaggtttgtacatggacctaatttcagatttgaaactgatcatagtgacttcccaaagcaaaaatgaatggggaaattttggttttagtgatgcacaaagccagtcatcctccgtgtctgattccagagtgaacagaaatgacttcccatagtccctttaaagttttaacctatcaaataaagtcctttagtctaatctccttgaaaaacaccatttttcaagtttcctgttattaacttcatgtcagaattcaaatccccaatgttttaaagaatgtcattggttactataacaattaacttacttaattcaacagagtgccttcctagacatgaattatgcagtgatcttgaaagaacaaaagatagtacaaaaaagaaatccaatttctcttttttttctttaggagtactagctttaattaatttatcttttactttcagcttttattttagatataggtggtacatgtgtaggattgttacatgggtatattggacccaggttgtgaacctagtacctaataggtagtttgtaaaccagtgctcccttcctccatcccctcctctagtagtcctcagcatctattgtatctatgtttatgttcatgtgtattccatgtttagcttccacttgtaagtgagaacatgtggtatttggcttactcttcctgtattaattcacttaggattatggcctccagtttcatccatgttgctgcaaagaacatgatttcattcttttttatggttgtgtagtattctatgctatatatgtaccatattttcttgatccaatccaccattgatgggtatgtaggttgattccgtgtttttgctattgtgaatagaacagcagtgaacatctgaatgcaatataatgatctatattcctttggatatatacctagtaatgggattgctaggtcaaatggtagctctgttttaagttctttgagaaatctccaaactgatttctaaagtagttgaactaatttacattcccacgaacagtgtacgagttctctttttcctgccagccttgccagcatctgttgttttttgactttttaataatagctattttgactggtgtgagatggtatctcattgtggttttgatttgcattttgatgatgattagtgatgagcattttttcatatgtttgttgatcacatatatatcttcttttgagaagtgtctgttcatgtcttttgcccactttttaatggggttatttgttttatgcttgttaatttgtttaagtttcctatagattctcgatatgagacctttgttggacacataatttgtgaatattttctcccattctgtatgttgtctgtttagtctgttgatgatttcttttgctgtgcagaagaagctctttagtttaattagatctcacttgtcaatttttgtttttgttgcaattgcttttagggagttggccataaatcctttaccaagcttgatgtcgatgaggatatttcctagattttcttctaggaactttatagtttgaggtcttacattcaattttcctaatttattgttttctttcttagaataatcattctcttctactccaatttgaaaaaaaagaaaacttcaggagtagaaagagagatgactttaatttgcagaaagtatgggttcacctatttaggccttatcaatgagaactcttaaagaaacagcctttgagtatacagtactgtggcacacacccctaaggaaccttctatgagtcatgaccttgtataattcctttttcttgagtggaacctgagacttgcctttagccactacaatatgacaaaagtgatagaatgtcactccagtgattttgttaacttatacacaaaggtgaaaggatttttgcagaagcattaagtccctagccttttgttttgagctaatcaaaagagaaattttactgggtggggttgacctaatcaggtaagccctttaaaggaaaagccaggccttccctggagttagagcttcaaagcagcagagactctcgccctcctttcctggctttgaagaagcaagtttccatacatcctatagccacaaggaaatgaattccacaaacaacctgtggttgctgggaggtaaagtctaccccgttcaagtctccagatgagaatgcagccagacatgcaccttcatgtcagcctcctgagtggaatacccacctaagttgtgcccagactcctgatctgcagagctgtgagatcatgagtagatgttactttaaacatcttgtttgtggtcatttgttatgctgcactggaaaatgaaaaccagaagtctccttgatggcatcagctaagggaggaagaattccttctctcagacataccaaaatgtgcaatttccttttcagtctgcagattaatttgaatgttgtcattctaatttgaaataatacccctctgacaaatagtagcagttactcctgtggattttgtgtttctttgtaattcgactactcgtcctattttttctatcctcatttaagtcattttacttccaagctcagatggatatccctcttccacttgcctttgtgtttgatgatctgatctcttcttctgcatgttatttctactttgcctttgctgggttatttctgtatttcttcctcacttctcgcttatttctatttttattcccattctgggtccactcgtgcttctcctcaggccactcaccatccaggaaatttctgtctccacgtctcttctaagatttacctgtacttaagaatttccattttctgaatgatgtttcaaatttagaaatgtggatttaggtctatttgctttgtaagatttatgtttcacaaatttatttattttccttgagaattagtgaacaaatggttaggtaaccttgagtggacatgaagcttttcatcggaattggatacagattgtatttaaacacctcatcaaagatttaggactgtgggattgtcattcataggttgtgagtgagcacaaggacccttcccatggggtggttgaccttttgttttgagagccagagtgctgcaaggaaatgtagttattctttgactggaagatgtcttttctgttctgaatgttctgaggtatgtggattcttatctataattaccttcccttaagtcaatctgcatgctaaagcctcccccaggtcctgcatctgtgcctcattctttgaagctgggattcagaatatattataacagaataaattataaagattgcttgggtgtttcctgtaccaggacatagcagtggtttggtgtcctgcccatttgtgtggcaggaaattcttttgtttgtgctggtgaatcgttttgtctggggcttctttctttgctaaaaatcttgcattctttcatttggcaagcattttgtcaacaactttaacttgcaagaactatgggtccacctatttaggcattatcgatgagaacttctaaaggaacagcctttgagtgtacagtactatggcacacacccctaaggaaccctctatgagtaatgggtttgtataattcctttttcttcagtggaacctaggacttgcctgatattccagagagtgtgaagagggatatttaaaaataaaaatgaaaaagtgttgcccccatagtatgtaacaaatgcctctcaggtgtgacagatgtgagttatactgtgaaggtgatattgatgagtctgggtaggtgtgcaactgcttatggcataaggcaggtacacagtaagaccagtaagactaaatgagaattactgggtatggagcttggggatccaataagcctcccaagtgattcctgtgtacactgaaatttaagaaaattattacatggtgccaaaattttgttgttgatcatgatgatcattggaagacaaaataccaaaaattttatccaacgtattatgtctttaagagaatgttataattttaaaagagaaattatatactccttaaaatcattttcattaatcaaaattacttatggctagaattcctctgcctttataatgctcttgcacttctaagtctaaagcctttaaaatggtcagtaattattatacttcaaattaatgaagaaccattgaccccatgaaatcaagttctgaaattgaccaacaagtaatgaattgttaacgaggatgtattattcacatctgcagtaattattttgcaccaatattctagatttaagtgatcttggaaaatatcatacatgtgatactcctgatctcaaagaacaacttagtaatgtataattatttttatttttctgcaataactgagaatgaagtgcatatttaaataaatatttatatagtgtttgtttattcaatgtgaatttcatcatataaagttaatgccctaaatttaatatcttttgcattattgtggcaattgtgatagttaacacatctgtaaacacaaacacatgttctgtgtttccatttgatgacctataaatgaagacacattctaaagtgagacaaaataactatatcctaaatattctatcctaaacgtccccatattcttgcattgtatgaagaagtgtgttggctggtgtatgctaatttaatagttagatataatttggttgcttgatggaagataaagggaaacttgcagtttgaaagcagtcagaatgttaacatctgttaaaaatttgctaagtttcatcactgaaattgccatgacttagtactttagagggaataattatctcccttggaaaaaactaatcactttagaagtgcataaacacttctaagtcacaaaggtgctgtttcatgaatgacatcaaattattattattttttttggttaggaatcagttttaggagctaatttatttcctaaagtctctcatttcttctttaatgtcatttgtgtagtgagagatattaacaagctactctacaaatgatgagaaatataaaaacaaattaattgtatctattaataaccgtatctgttaatattatgaaatttccatatttctccccctagctgttgtcaacatcacatctatttattgtctgaatttcaatttctttgttatccctcatatatgaaagtttaaccttgaacctgaaatgaccactaaatatactgccttaaaaactggaatacacatgggtgtggtatgtgtgtaccctcacttattccaacttagatgccttccattccttctatccacctttgctcctgaggtcccaggctaggggaatttgggttgtactaataagcactttaatattggccaccagagggctcccatattccttccatctaagtatgaaaatacaaagtgcaactaacataaagttcaccatcaaatagaaaatattataggaatttatgatatagttctctctagagtgaaagtgttccaaacccattgtgttcttatataaaatacttacaatgaaccaatttgggatactcaacactttcattaaaataaagttatgaaattatgtttggttttgtctttgttttgggaggttatgataagacttataatacttaattggtgattccacattttaaatattaatgttagtaaatctggatgtaaatccattatttacatatgaatgatgtaaaatacaactgattctagtcataggagtacaattttttatcacaagctagctatataaataatcctctattaaaaccccgggtatttttttttttagcccagcattttgatggtacacaaaactttagacaacaagatggtagggtttctttaagtgtgtgttggtagtaagaaatagttccattggagaaaaacaaagaattgcttcgttggtgagtctttccactagttcttgttgggttgtgttagccgagaaccatttgcagttactgagacatgctgggatacctctcagggttttagaagcagcaaaggtatctgccatttttttttctttttctttcattgatggtaatttgtttggttttgtactgaccaggtgctgaccaaagtatttatgtatgcagacatatttctgctgtgcagtagagggtagggttagccaatagtgaaactgttgtaattgacagcggaacagactttgaagtttctttaggaactctttgaatctaggtgaaacatttcatatgagtcatcagattgatcttctctgcgatgtactttaaaaattacaattcatttatcatcagtaaccgaaaatggcatttaaccattctacctttttcaattgcttttcttctagaacacattacttatatttctgcacttaaatgtgcatcaaagaggatagcaacatggaaggcctgattaactaactcaattatacacccacacctagatgctgtctttttgactgtgagactgcaatgttgtgttgcagaagaaaataaaacaatctgttcccctttttttatccattatgttattctggtctgagaattattgattgtactttttctttagaaaaagagaataaaaatgagctaattttggtgcaccttgtatttattgaaatagttttaaagcagtgttttgaattatgttttgatatgtgtttttaaaacggtttttctgaaagcaggctttctttgtttaaatcctcctctgtcccatcctttgctttcttttcatgagacaattgtgattaaaaagcactctaatctctagggttagattatcatgtctaaatgaaatgcggttataaaactatctttgtatacaatctattttggaaatttgaatagttttattcagaatcacatagtaacaaatccagtccagtttgtcctgatgattcagtgggattttgatctgataatgttcaccaggcatttgcattcaatttctgctcaaggaaatccacaatatcgcaactagtaattgactgcattttaaaaatatgcacaagcaaaagaaaaggtagaaaaaatgcaacaaccaattttgatagtgactggatattatcatagcccaaaagctaactgtattatgttcctcttagaagtctttgaattaacaagcaaggcaaattttcagggttagatagattttattcaggaacatctttgttaattatcatattatttctaagtttatactgtctaggaataaaaaatacctggaaatgttttaattagtatgttcacacacttccatgtaaactgatttgggttcctaagtttcctgaataattgctctaattttgaaattcagcattcttagataccactccaattgtatgtatttaccacttagagagaaagtttattcctatctagcttgtgtgaaatcaaattggcagagaatgaactttggcttaaaagcttctcctgacatttatttgcaaaggtttctatggctaatattcttgcactcaaggtgacattaagcttccttggtcactagggagaaatgtggcttttctcttcactgattctgggtatgagaagaaaagaatgacttgaggatatgccaacctcaccttgcttctgtctgcccctagctatattttatatttgcatttcaggcaagagaccaaaaaactgaattcccaacacagagagacagtggcgagcgagaggacctgcatcacccagctcttaaatcctacatcagtacctatgcctaaagccaccaatgatatccagagaccttcctatctgaagctattgatgtttatttttttcaagactttaagacctctcaaaaaataaaatataaaatttaacttagaatactggtgcttaattgtgactgcacgttacgctcatctaggggtgctctttaattcctaatactcaggttgcatcactgaccaattaatcagaatgactgggattcaaccagacctcagtagttttgtaagctctctctcatgactgtgactacactatgggttgagaagcactcaaagtttgagaaccactgtcttgtaaaccaggaccactaaatgatatcataatcctacatcctgacatatgtaaaggataaggatcttagactgcaaatccagatgttcaagaaatacaggttgattatgagttgtgtggtccaaattctgtaattcagccagtgtggtggagggttaatcttggccaattcagggttcttcctttccatgagaatgcaagtgaattacaatgggttcagagagtgctacattatttgggggtagggctggagaggactctgtcctgggtggctacttacctgtgccagccttgctgaaatgtgcaccaaggcatctgtccacagtggatcagtggtggctcaagtccccacagcactgccccttcaccccaccaataggccattttctttcccccatgccatgttatggcatgacgtgagctggtgtgtacctgccgtgaagtgtccctcaaaattttttcctcttcggtcttctccacacttgagaaaatgactacatgtttgttgtttctcagagatttgacctcagatgaaaatgttaagaaaggaaccaatcattaaactgagactcctggtcagtacaaccgatgtttcctcttctttttaaagcaaaagcttgtaaattccttttttcaattataaggaaccataaaatcatgcatttttgtcctgaaggaacttttttagtatgcaataatttgattaaaaataatcactaaaaagtatattaccatcaatcgttatgttaagatacataatacatgaagtgttcatatacatacattgttatgttgctggataaatctaattcatctctgttttcccaaggtacttttgtcatctgtccaaacagttaagagtcacgtttaaaatggtatcaactgatacctactccagagtatttatcttaatctaatcagtgttattgctcctgtcattcagaatcttcttaattattgatttggattaattacctggtgaacatttaaagccaattcaaggggagaaaaagaacagtatattgattagcaccattactgaggatatcatttcagtttgtcttagacagggatcccccaggtatgtataatattggccttgagaaaatgtaattctgccatacaaagtctaattcaaatataatggcatttatgtttttatcaatgtaacaataatttacattaattacattcttactatgtgttggagaccatattagtacattgtaaacactgtcttgcttaatccaataatctcatggggatatttactattttatctccactttacagttgaggaaactgctcaaatcacttttccaattactcagctagttaccacagttaggacttgcactatgtttttagctattatacttagacatacaagttgaaggcagttcttgatgttttaaagtaattgttgtaaagacagatacatgcacacccacatgcagaaaatactcctttttctaatagatactaaactttaaaaataaagtcagtggtacgcattaaaaatacgtatgttcaaatccgtaatggaatatcaaggggagcctggaaatattttgaaaataaacctttttgggggtgatgtgagagacagtacccgggcctctgcaaaaatgtttttgatatgagaatactgcactaagggcaccatagtctaccccagggctgcctgatacagctatatgcagtgatgaaaatgttcttcatttgcaatgcccagtatggttgtctattgagcacttgaaataagcgtagtgcaaattaaaaactgaatttttaatttttaaaatcttaattaggttaaatctaagtagtcatatgtggctattggctacggtactgccaagtgcaggctaatctgcacttactctgcttctttctctctctccctttactcccaccactccttccttcctgcctgtctgcctgcctgcctgcctgtcttcccttcttcctgctttccaataaagagaataaatataaagtttggatcagacaaataaaattcgctttttaataatctgagtaaatgcatgcgtttttccttcttaaatgcaaacagtaaataacaacacctacttatatcattatttttaggactaatgagacaataacagatcctgattatggtaatttttttgagctaattagataatatatgtaaagcatcaagtagacttcctgctataaatgatgatccattggtgatgataatgattatgatgatggtgatactgacactaatgctgtattcatttagcaaatgggatagaaggaggtccccatttctacatcagtgtctcatgtggtaaaaagattcagatatttactcattgatgtagtaatatatttcctgtcaataaagccatgtgtgtatatagtgatttattagtatggggtaactgctcatgtttgagcatgtcgacatgctttttgagtttagggttgaaatattagccttgtgttactagtaataaaacgaaaatccagtgagagggatttgctgcagatcacatagaatttgtactcaagttcctgtcttcttttccatctacttctctttctgtgttatcatagttcccataaaaaaataatatgaaagactctaagattcaatgaaaaacataaattttgtgggatttcttcataactttttgacacaaaataaataagatgttagaatcagtggttgagtacgatcaaaactccagatgaaattattttttgcatctctttttttaaccaattattagcagtgctttttagagagcagcatttattttgtttaaccttgcaatgagagagtttcaggcccagttttttaaatgagtgtgatagtagccaatgatagagaaaaatccagtattcctagggaataaaaattgaagaagtaatcatctggccttggaagtatgtatcagcatggccaagtcatgtatcagcttccatctttcactgttgccatagttccatggaggtgatggaatccaatcatgttcttttaaaggataaccactgctctgttcagggcaccctgctcactccgtggggaatgctggaaggatgtgggaccctgcaaggctgcctcgctggaaccaagggatttagcaaatgctaggaaagaaaagcaagtttaagctgggaatgcaagtcatttgctgagacggcaaaacaagaagagagaagccagaggattgctggccatcacaaagccaaggggcctaaaggaggtggaaatgcagcatactagaggccagatgtgcttccactcaaacccattggtggcaagggcctgagaaggaagtggtaatgagtcacaagcaggatgatacagtattaacccacatcctttagaaggcttgaacatcgtccttttgtagctgattcctgtcttagatcagaatgccgactgagagacaggattttgacagaaataaaataataaagggttaccaagtgaaagagtgataaaaagtgctggaatggaaaaatatgtagtacatttacaaactctgggtcgattcgaaagaacagaactttgctaatgtaagagctgtgtttggggcatagattctgagataatattggaaagttattcctcatccttttattcactcattatttcacttcttcattcatttccaagcatttttctagaagcaagggacatagcaacagatacaactgacgaaaatctctgcttacatgcatctttcattgtaatatgggaaacagacaataagtgagaaaataagtaaaaaataaagtaggttagatggtgataaatactacagaaaaattacatgggagggaggatcagggatttttgggccgatgagaagcaattttaaattgggttgccagggaaggcctgcaaatccaaaggacctcacttttgtatccagggaacaagacagagaccagtgtgcctggatctggacccaagggaatgagaagggagggtgggaggagatgacgtcagaggagtgatgggtggggacagaagatgccatggagtctcatcgaaccagctcgaagacctggacagaagaggattgcttctccatcctggcagcatggagaaggccttgttccctgtgtgattcccacaggagtgccgaagagcatcctgcccctttcctgatgtatccatttacaatccgcacaagtaaaattgcaacagctgtccctctggactagttcttttcctttctttctttttccttacctttccttttcttgcttttttttttctttttgtcttcagcaacagaaattcattttctcatagtcctggaggctcaggttcaagatcaagatgctgttaggattggctctaggtgaggcatctctccttggctaacagacaccaccttctgctgtgacggcaacatggtctttatgctcacagtgggagagaaagagagagggaggaagagggagagagagaagagagcaaagagaagagaaagagattgagtgctctggtgtcttcctattcttataaaaacaccagctctatgagatcagggccccatccttatgatgtcatttaactttaattatctcctaaaaggccttgtctctacttacagtcacatgggaagtgaagacttcaacatacgaatgttggggggacacaatttggctcataatagtatatgaactaaagatgtagcattaaaaaatgtctatattatactaataaagaccttacagactagttactttgcatccacaaagctacactacaagaaggagaagaagaaagatactcttactattccctccctccattgggccagccctggaggttatgatttctgttattcttaacacatgtcatagagaaatttgagttcagctgtgaagagccatttaagccttttgagaagaaatataccttgatcagaaccgtgatttaggaagataaacatgaactgctttgtgggaggtaggaagattaggagaagggagacttatcaagtagattttagagtactctaagaaaaattcgatgtggctattatgtgggacattgacagaagtttcctcagtcagtacatatttactgagtgtctacaatgtgcctgtatctactgtaacacatttatacagttctaggtgccaggaacaagtcagggctctttgttatttgcctttgataaaaatgatgacaagtcagatttgaggagctttaaacccagacacaagaagacattgttttgatccaggcagacaagtgacaaagagcaagcgcagagagtaggaatggaataaagtcttggagttaggacaatgaagcaatatctacaaaggacaagccgttggttacatcgctgcaggcaaaataatgccaaatggacagacatctcaaaatgcattcctctctcgtccaaagatttcacctcagatcgctcagagatgttttttcttttatgcaagttaaaaatgcagacaaatggaaataatgctgctttatgaaaattcaatctttagctacctttattagcacatatctgttctatgaaacaaatgttatttgtccatcctagctccatttgtccttgaaataaatatttggccctagctcctggatttcttaggaaattcaatttattgctggacatgtttcagtaatctgtgaatgaccccaaattacctgttcataagagaaggccaggcctggatgacaaacacagaaggcttttcatttttcccatgacttccttttttggcaaaccatcctctttgtgagagtccgcctccaagttggattagaagatgtcctggagcgtgcagttcaccacccactatattgtaagctgaaagtgtttttgctaactgaatgtcaaattaatgcggttttgctatctacatggcatgttttgacaaaaatactgtgtacctttattgacagtgaaccttctgctccggagtaatgctaatccaggactgctggtttttcatgttaaaacccataaacttgttattagagcagatgacttccaaaacgtcaaaactaaagatgttgcttattcactagaggagtttatgttgttcacatttaagatgatttatttttattcacttgacaacacttcgaacttcaaatggatgcacacaagccaattcttggaggggttgtgactgcagaaaaaaaattaaatcttgtgctcatgtgttgctccatcatagtaatcctcagttttgtcccagaagtagcatgtgtcacttccagtgattcaggaccagctggtagaaaggacggacatttcatgctgccatgagcaactgctgtgtggtccaggatgacttttccaaaagcttcactcactgctcctcagaccacgtctgtttttgtagaggcaaaatgagatggctgagagaattgtggactctggccaaatgagtagtcattccctggctgtaagtgggtgaaagagaggtgacagaaccatttttactgcagtgcagtgtgattaatctgtgtcttcttaatgagattaaggggaaaaacaaactttttttttaatttttttttttttttaactagctctcctctatactgcaagttaaacaacttattctggcagaaggttgaaagaagggaacaattgctcctttgctagaaattctcttcattaggagcatagcctttcaaaaaacaatgccactcatgatatgcttcagattctatataatcatctcatgttgcacttctcctaatttattttataaaagaagttcttttttggtgagagatagattgtaaaactcaatgtattcttattcttttttttttttgcaattattcctgaatacaaaacttaaaaaatgacaccagggctttatgtctagagtagactgtgaaaaaaatgaatacacatttatttgggaaagatattggtggtcattatgccaattgacatatagttgtcatcactgatgtaattttgcatttgtttgtgtaattatttaattaacatctgtttctcctactgtagtatcaggttcttttttagtgagagatagattgtaaaactcaatgtattcttattctttttttttttttgcaaatattcctgaataccaaaattaaaaaatgacactagggctttatatctagggtagactatgaaaaaaatgaatacacatttatttgggaaagatattggtggtcattacgccaactgacgtatagctgtcatcactgatgtaattttgcatttgtttgtgtaattatttaattaacatctgtttctcctactgtagtatcaggtatatgtagaggtaatcacagatgcatcggctcaacactgcttttggagggctgcacacaaccttggcacatggttggcactccatttgtatgtttgttggtgaaaggatgaatgaatacctataattgaaattttatgcaatttattttttatttttgtagtgcttgtccaagcttttttgagcacctctagctatagagaaaaagttttcttcataagggtgctcaatgtgttttcagaagttttggatattacaaagttttttcttttattgaactgatatatgttcatatatagactttaccatttaaaaataaaataattgtatagaaaaatgactgatattaagggacaaccttctttatgtaatttatgtcctgattaatggacttttcttgtttgggattcattccttttcattcaagcattgttcacaaaactggattagttgttaattacaaatggcctaaactattttaagaaagaattttattatggaaaaataagagtactataaaaaaagttagttggggtcaccttgtctattgcaactaaaatagaattgactcagagctacattttcatcacctccttttcttggcccccttattctggccttagattactctgcagaaacacaggcaccttgtttttttttttatgtggaaaaaattaggtttctttttcttattcttccactattccagatgaattccgtgtctattttctaataaatgctaactattttgaagagaaatgcattactcccatagaaagaacaaatacttgcaatcagtgatgttttacacttactatttctattttaatttgtatttattataaaaataggggatatgtgcacacttgaaaacattctcgttgtgtaacattagagtattacagttaaaactgaagccctctttaagcagtaatacctctattattaagcatttaaatatatatgcatatatacatatatcattgtttttatgggttttgatatgtggtacctcaagactctcttctctctatttttccaaatcaatatcagtgaatcataaattttgcattttcatatatgttcatatatatttctgatatatgttgtttgtttttacttttgaaaaataacaaccctattttgattacttcacatcaagaagtctgtttcactcttacctttagattgttctgccttcaaatacaaacattttacttgaaactgtggcagtaagaactctggagccaaaggctagtttcttcttcttcttcttcttcttttttttttttttaaatactttaagttctgggatacatatgcagaacgtgcaagtttgttacataggtatacacatgtcgtggtggtttgctgcacccatcaacccgtcatctacattaggtatttcttctaatgctatcccttccctagccccccaccccctgacaggccccggtgtgtgatgttctcctccccatgtccatgtattctcattgttcaactcccacttatgtttattgcagcactattcacaatagcaaagacttggagtcaacccaaatgcccatcaatgatagactggataaagaaaatgtggcacagatacaccatagaatagtatgcagccataaaaaaggatgagttcatgtccttttcagggacatggatgaagctggaaaccattattctcagcaaactaacacaggaatagaaagccaaaggctagtttctaggcgctcttttggtttgattttgaaatctgaaaaatcagcattgaagttatatgtgtgtgtgtgtgtgtgtgtgtgtgtatgtaagaaaagttcagtaaacacctttagcacccaaattaaacactagttagcatttttctataatatatttttatgtttattcatctataatgccatcatagatttatgtattatctgcttataattttttctgaattatttgataagttgcaggtatcatggcattctacccccaaatactccagcttgcatttactaaaaataagaacattttcttgtatcaacataatgccataatcacacccaagaaaaataataatttcttatataatatctaatttaaagtaacattttcctattatttccagaatatttttaaagctagataccttctttgattctatgccaacaaaaattcagacaccctagttatgtctctttagtctcttttttaaaaaatcacatctattaagataaaatttgacttcaatgaatcgcacccatttaaagtatacactttagtgcatattgcccatacatgcatgtttgattctaacttcatgatcaagatacaaaacaatatcatcatctccaaaatatttcctcatgtcccttgactattcatctctccttccatcagcccataggcaaccactgagctactttctgttgttaaaagttagtttgcatttcctataatgtaatataaaaggaatgttgtacattgtactcttctgtgtccaacatcttttgctctgcatgcttttgagattcatccatgctgttgcatatagtagtacatgtatggatatatcactatttccttcaccattcaactatggatggtcatttgagttgtttccatttgaggctatcatgaataaaactatgatgtatattcattcctaagttttcatgtaggcatgtgttttgtttctcttgagtaaatgcaataatacatttaattttagaagaaactgcgaaacagttttaataatcctcaacaatgtctgggagttctggttactctgtatctgtcaagacttgtttttttcagagttttaatttagccattctaataatgtgctcaactttcactgatatcaaatttcagttaaattttactagtatcaaatttcactgataagtatgttttgaatattttcatatggttattggccatttatatacattcatttggaaagtgaatgttcaaattttatcgtatttatttaggaatttgtcttctcattactcagaagaacatttatatattcttgataggaatcctttggcaggtatacatattgcaagtaatttttcccattccatagcttgccttttacttttcttattgtatgctttgaaggtaaaatgtttatggttttgctaaaatccaatttgtagattattttttctttaatggctcatatgttttgtttgctatataagcaacctggtgttttcttcttggaaaatgttttattacaaagttattgtttttatataaaaatatatataggtttattaatatttaatggtttattaatatttttcttttttgtcagtttttatatttctgtctttcagtgaatttatccatttaatctaagttttcaatttattggcatagagctatttataatattgtcttattgcctttataatattcaaggaatctctagttgtgctcactctaatttagaatattgtaatttgtttattacttgtgtttttaacataaatgtttgtgtacattgttgtttataaatttcagtgatctttccaagaagtcagcttttggcctcattgatttttctctatagtttgtttttttatttcctttattttagcccttatatttattaatttatttgtgccatgttgtgttcttcttttcctagattcataaggagaactcttagatcattgatttttagcattttattttgttattattttgcttaaaatattttttaaatttatttgtgatttcttattttacctatggtttagaaacaagttgtttgttctccacatactgaatgtatataatgaatgttctgtcaaagtcgttaagtagttcttaaaatgaaattaacagaagagggagctttgtaaaggtaaacaaggatttctgaacttcaaaattatggatcaagtaattttctataaaaataagcatagcaaaatatttaggcccaatcccatagtaagatattgtaagacaaaagagaatgagacaaataacatccctagaggtaataaaaactagtcaaataaaataaataaaaatatcaacttgtatttcaaaactagctaaatgacattaagaatataatgcaaaacatggaataacattataaaacagaattagaaaaactcaaaaattaggcactataccatagggaaaaatagaaatgaaagaaaataataatttcagaaatgaagactaaactagaaatatcaaaagaacaaataaacacatggataatgctttaagaaaaaccgaagttgaaagtagaaaaaaattgagaaagagaaatgcagaaagaaatacatataatttgagagagaaattgaaacgtggaatatgaataaagaacttcttaaatatggttaataggcatctctaaagaaaaaaaaagcaagggaaagaactgatactaaaatctataattcagaaaaagtttctgcagtgagaaaaagatgaaaaagatttcaaactacgtgttgaaacagcataccaaatgccacattgaccagaattaaccaagaccaaaatatgttctaataaaactaccagattctaaagaaaaagaaagaaaaaataacaactgggcatccagaaagaacagtaagtgacactggaaaaagaaaactatgttagcatccctatttttggcaagtatagtttactccagaagaaaatgaggctacatagttcatgtggtttggctctgtgtcaccaccttgaattgtaatccccacgtgttgagggagaaacccagtgggaggtgattggatcacgggggtggtttccctcatgctgttctcatgatagtgagtgagctctcatgatatctgatggtttaaaagtggcacttctgcctttgctcgttttctcctgccgccataaaagacttgctttgcttccccttctgccatgatttaagtttcctgaagtccctgcagccaagtagaactgtgagtcaattaaacctccttcctttgtgaattacctagtctcaggtagttctttttggcagtgtgaaaacgaactaattcagcagttaagataatcaagaaaaaaataacttgtgagcccacaattttctatctaaaaaaatcaccttccagtataaaaggcgtagacaaactgttatctataaggaagaactcagggaatattgagtaatctaataaagaaacagcctaaaacaaccaaaatgcctagagagaagagacaggtggtacacattaaacactggtgggaagcattaaaaacatagttacttttgttgacaagtcttactttagtacgaagactagaacaagtcttagtgtagaactatgactaaatgcaggttaatgggggaaaagtatgaaatgtaattatatatagagagagagagagcgcgaggggagagagagagtagtgatggacaatcaaattacattttcactttaaagaaaataatatactatagtgatgtctactagtatcttataagtaagagtaattataataatattagcaattgccttgctgcttctgtgccaggcataattgggtgccatgtatcagggtgatccttttccccacccagggttttgcttagatggttctcccttaaaaatgcttttgccactgtcttctagtttcccagcccttcccttttggtggaaggcttccaaaaccaagactgaaagtcaagtttgtttatgctgatgtgtactctctggacatttttcttgtaatagaaatcagtgttattttattttacatcctgatattttatatattttatctaaatttgtttgaatatgtttggtaatttacatatgtagcctttagcttacaaaaaaattaacacacacattaaatcttcaattttatctaatctaatacactgatgagattttgattctttaggttggctattgacctaaaaacacatttttgggatatgtcgcatgtaagcagcaacagtttctaatgaaatcttcttggactgactatcaacttcaaattcttgaagggcaaaccacatttacttagtgtctggttgggtctagattcatcttaaaaaatcactaagaaaagtaaaatcatgttcgaaagtccatggaggtttcttgtctttctttctttgaactactagaggagctgtaatataggaagaaatattagaggattttttttattttaaaaactttggaggcatacaggataaactttcaataatggctaagtttatgaaatttaactgaaatgtgtgtactatatatttagttgtaactgttgattttaaaaaaacgtatactagttggttctaatcagaaattgtcaatatttatgtaatgtaagtgactaaaagttatggaatacaaaaaagtaaacaattgtttacatgatatgttttcggggctctgatatttctgctgctgctccactgaattgcagtttaacttagctgtaacttaaagtttcagtttcagtttttgctaatcattaatattcattcacttattcagttcttaaatatttatccaggtcctgctacttttgtgggtgtgatattgtgctgttttaaagcaatactctggaaaggattaaaaagccattaacaatatagagtgaagtcaaggtcagtgagtaggattttgcagaattggaagtaagacatttgcactcgaaaacaggggtagttggtttctggaacacgctacacccgattacttcatagcgtattttttggggggaggggatttactttatttcttaagtagtttaggtattttattagtgattttgatttttcttgaaggttttattttttttattttgttatttatttatttatttatttatttatttatttatttatttatgttttttagacggagtctcgctctgtggctcaggctggggtgcagtggtgcgatcttgactcactgcaagctccgcctcccaaggttcatgccattctcctgcctcagcctcccaagtagctgggacaacaggcgcctgccacaggcctggctaattttttttatttttttggtagagacggggtttcaccgtgttagccaggatggtctcgatttcctgacctcgtgatctgcccacctcggcctcccaaagtgctgggattacaggtgtgagccaccgcgcccggccagttttatactttttaatttactctccaatattcaagacatacaacatgcacatcttaaaataagttgtgtatctgtatttaaagaacgaatttttttcaagttatttcttagaagttatttatttgaagagattatttttaatcatatggttgctgttgaataaatttttaaaacaaaatatgtaaagaagtacacaaaatcattttcagtaattctctccttatccaagaaggcaagttctatcttaagaacctgcacagagtaaatattcagtacattatctatcaagtagtgtgttattcactgcaaattgaaaatcatcaaattcctagttgttctgcttaatagatgcttaactatattttagcagattccaaatatatgttaatatatatttttggaattcagcatgagtatctttagatgctaattgcaagttaatctttcttcctagaatgtaagttccatggattataaacgttattcctattgcagattttctaaatagtgtttctgctggtgaagtcttcttcactctctggtgcttaagattagaaagaaaaaaggaaagtaactgaacaaaagaaattctttgaacatgaaattatcaaatgaaactgtacatatgcaaaggaattttaaaccattgccttgcaaagtctttttttgcataacaacgttttgataaaatgaagagactgaccaaagtaacaactctaaataatagcatttcactgccataaggatgattgtaattatcagtggaagcctagagcattaggtcccaactcctaatattagtttcaacttttatagcctggttgttcaaagacatgcaattaaactaacctagtattattggaatagaaaataaagaactactgttggaaacacaattaacaatacataatagaggggccatatttccaatggctgcatattaaaatcaacattgagctaaactaagcataggccaaagctgaatatcatcatcataggacatacttctaggattacaagagtgtatctgaaagtgactaccactttaatgatattaattttatcattaaaaggttttatggtcaaatttcaaaatcatggcattgtaatgtagggtgaaagttcctcagcactgccatgtgattatttctgcaatgaacctgctgcacatttgccattctaaaaggacactgactttcaacttgtgtctctggaagagccagacccacctctgctagtatagcttactgctaatagtcatgctgcagtaacaacattatcaagcttttctccttctctcaaagaaaatgattcaggtaatgctttgcttcctttgcaacccagggattggacctactgtcttcaaacaaagctctgtgcagtgttggtagaaatggtttctgaatatttttagaagcagacttaaaactgtagcatgatttcttgtattttccacaaatgcacttgatgctttactcattcattgagatacgtaatccttcaagtctggatccttccctatatttgatgttaaataaatgttaaatgtattggttaaaactttttgattagaagttaagtgtaaatccaaacactaagttttgttcatattattcacattctgaaactcatttggtatgatattaaactttataacagagaagactttgcagcaggtaattgagtattatgatttccaatgctgaagtacaataaaagagtttggctaagcatctcttggctaaggcctaacattagtgttttcctaatatgattcataaaacattcttttctaataaaaacaatctatttggctgctactttggacaccttgaaatcaaagaagattaaatattccattaataatgttaaattagtaaagtaggaaatggtccaattgttcaaatctttgcctattttccaagttaaaaaataagccactaaggaaacaaagaagaaataatcagagatagaaaggcattcagaaaatagtgtgtcagggaagacaaagatagtttttcaaagaaaaaataactggccaacagcatcataatcagcacagtctaattaaacaaatatagactaccgttcttgtatccacagcacaaatgtcattgtcaacgttgaaaagaataggttcagggagtaatgacagcaaaagtttggaaggggagaaccattaatgggtggggaggaaggagaaacagcaggcataggctactctttccagaagcttgggttgggaaggaaaggataaaacaagaaataggtacgtaagtcttagaattgagaaaggttgctttcatgtttgcttttgttttttagaagaagaaataggtaggaatggttttaggttgagggcaacacactaaaagataagacaatttaaaagtgtaagagaaagatggatccaaatccaggaggaaatagaagaaggactccaagattcacatacaccagtaaggaatcaacaggcagtttcctgtttcctctaaaaatggaaagaccctggaaagggtcagtgcagaggttggacagtcacaactgacaggaccagtgagaagaaatcttagttcatgatggcctccatcttcctgatgaagcagaaaaaaaggcagcctgttagcactgaaaaggctgaagcttaggaagagggtgttaaatgttcataaaggtcaaaaagttgaaagaaggtgttggagggttttttaaggccgtaaagggcttattaagctgtgttgagtgctcagagaaatctggagaccatgattttcattccataaatctgcacataagtacaatttttttccagcagtaattattaatccaggtggagaggagagattgtgaaattaacccagggtaaaataaaacagtgtaacataagatgttctggtggtgctacagcaaggagagatggagcatttgtcaaagatgattgtgaccaccatgcttatggccttcattctgtagctttgtttgtcatattcctcttgtcttcacagtatcttcgtcagaagcatcattgcttttactccacttgggattggctttccataattgaccccagaaagaggcttttctttctctgctgtcattggcccttagctgcattatgctcaatatatctacgtggtgataatgccctattaaaggtgaatcttcacagatgatattttaggaatcttaagtatgtttttattaactcaaaaaaaagagcaaactttcacctactccagcagaagactaggaaaagtgtactctgatgttacccagacattaccttttgatgaggcttcacccactctttcagagctccaggaggctgtgttcttctgggagtgcttggagttaatgctagaccttatagttagagaatatgatgttagctggcagagacatcctggtcaaattattttagtttaaactttcaacctctctcaaaacatctttgaatccctattaaattcatgaccagacagttttctaaaattcctctgacttgagaatctaggctgactcagagcttgtccttgtgaaaactttatctaaacttaatctaggttcagactctttccttaaggataagttgagagttcatatatcagaactgaaaacatgttgaagctaattgacataatcttcacaaacaacaacaatgacaataacaataacaacttgttcggagatgttcttaagctcttcaaagatgatttgattccaaaaacttttgcgaagagtctgaaaaaaatttttccttgcaaaattttgcaattcgaatctcttcttcataatcattcttaaaagtccaagtgaaaagttctcatatggctgttaggaactataagttgaatattgataattggcttaatttgtgttgaaatagagtttttaaagtatatttctcatggttagttctgtactttagcttttgaaatagattttgtgtttgatcctcaatttattctctttaccttaaatatgaatatctggggaaggttggtggcccttttctatcttttttttttaaattatactttaagttttagggtacatgtgcacattgtgcaggttagttacatatgtatacatgagataccatctcacaccagttagaatggcccttttcttttaaaaggactctgcgtggcaaataatcaaaagactaggctatacttgtttcttctaaaaacagtatttgtaccctatccctccctgaagtcaggcttactaatagaacaaattgtatttttatttttaacttctagacgctttcagtttccagaagaggaaatataaaaaacaacaactattttcaccagagtgactaatacaggaaagattatttagcataatttctaaacatatataattgtaaaataaataaccatgagggcacgcattttcttgaaagcattattgagaagaggcaaaattgagagcaattgttgaagctgagtagtattgtagaaaagagaagaccatggatattaagattgagtataactttatgatttgaggcaagtcagttggtctccctgttctaaatgttggctttctcattctcaactcataagttgtggtcaataattcattgtgctaataaatttgaggacctaggtacaatatgtattcctttcttaccctcaggatttttaatctgcctcataaagacttctgagtaaattgatgcaagacttctattatttccctatggttgtctcactagtaaataatacctttcaatacagaagatgatttctggtcaaattaatttactataatctcatattaataattatttccagaaaatatctggagcagatgtcactggagcatatttaagaaatgaatggcatttaaaggtttaatttaaactgatcacatttaataaacttttaatacatagatattctttgcttatctctactttgagaaggatgcttttgtctgtgatgaaaacttatctacattttaaaataaaccatttcctaaacctgttctagcacccagtgtttctattccccattggataaaacgtatgtaagcatatagaggtgacaaggttaaagtcgtaccttctctaacattcaataatcagtctcctgagacatgtgaaattcatcatattctaatcaacttgtatattatcagccctgaaacacaaatattatatcagctctgactgcctcaaaccacatcttagcagtcagagactggctctccaggctattccatctcatttgagaagaaaaccaagaaccaaaacaaattttggtcaagtaacttaggaaatatttaaaatggaatacatatttccagtaacaaatggatgatattaaaataattttatatgaaacttaatctttagaaaaatataacatttcaaaggaaggctttgaactcagtcatgaagtctgatgatatgtggcaattttgggatgctgttgctcactgtggccttggaaaaggtcaaattaaaatgaaagtgtacattttaaatgacagtttgtttcacttagcatagagcagtatggtaccttcactaaacttcctagattcaaggttgattcaatcatcttaacaaaactaaattattaatttaaaaacacacatttttcatgtaaagcagagggttccctcttatttcccagagaattaaaattgtcatgtggatcacaatgtattaaattgctttgatcaactcccagtcatttttaccttagaatgaactttacaggtagtctatatctttagctttgtttaatggattctaagattgtttgcatgaagatccactgagttttagtcattatgattgacaggtggtcagttgcagcttaatcaacttaaagaattatacaataatttcatgaagaactgttaatcctatgtcaaactttggttacatagattaaaaactatgtttggatcatgctttaaagtctcacactaattaaagcttattaataatgtctatgcacacatacatcataattttatcagtattaggataaataagttatttgtaagagtcatttgaaggataattataatttcatgtatgtaaaacaggtttttgaccgagactcaagttttaaaatttatattggtgtaactaaggaaatgtatagtaggaaaataggatttgtagagacaagaactagatccatattctacttttgctatttatcagtggtgtgcccataagcaaatagttctaaagaagatgaattcttagttctaaagaaggaaacagtttactggggttggggggccgtgtaaagagatgataacagactagaagtaatgaatatgaggaggcatactggggggtctagaaaagtttcctctcccatttgagggttaagaaggctttcaaatagtaaacaaaaaggaagaaacactggcttacagttgttggtagaaatgaaaattgcttataaccattttaaagaactataaggccatatctatgaaacttatgaagattggattttttaaatttacctttagaaattcatttttgaaaaacataacacgaacataataaacaaaactccagaaaaaaaatcagcacctgaaagatctcactatagaactataaattatgaacaatttttattttacaaaattaaaaagaaagtgtttcattctaataagctaatggatatgttaacttcctggaaataagagctcaaaggagaaatgtcaggcatgtaagggaaaattacatgagagcagagataagttcttttttaaaaggatttaagaaatacttacatagtgtttattatgtgacaaacactcttaagcagtttatagtcattattttacatagaaattctgtaatgcaaatactaccattttctcattttacagatgaatattctgtgatatataaagaggttaaataacttgctcaagttcacacagcaaatccatgtagtggagctttaccatcagtggtacggttgcggagtgtgtgactttgagatttatgctgtgctgcttcttttttttttttttttttttttttaagttttagggtacatgtgcacaacgtgcaagttagttacatatgtatacatctgctgtgttggtgtgctgcacccattaactcgtcatttagcattaggtatatctcctgatgctatccctcccccctccccccactccacaacaggccccagtgtgtgatgttccccttcctgtgtccatgtgttctcattgttcaattcccacctgtgagtgagaacatgtggtgtttggttttttatccttgtgatagcttgctgagaatgatggtttccagcttcatccatgtccctacaaaggacatgaactcatcatttttatggctgcatagtattccatggtgtatatgtgccacatttttttaattcagtctataattgttggacatttgggttggttccaagtctttgctattgtcagtagtgccgcagaaaacataggtgtgcatgtgtctttatagcaggatgatttatagtactttgggtatatacccagtaatgggattgctgggtcaaatggtatttctagttttagatccctgaggaatcgccacactgacttccacaatggttgaattagtttacagtcccaccaacagtgtaaaagtgttcctatttctccacatcctctccagcacctgttgtttcctgactttttaatgattgccattctaactggtgtgagatggtatctcattgtggttttgatttgcatttctctgatggccagtgatgatgagcattttttcatgtgtcttttggctgcataaatgtcttcttttgagaagtgtctgttcatatacttcacccactttttgatggggttgtttgtttttttcttgtaaatttgtttgagttctttgtagtttctggatattagccctttgtcagatgagtagattgcaaaaattttctcccattctgtaggttgcctattcactctgatggtggcttattttgctgtgcagaagctctttactttaattagatcccatttgtcaattttggcttttgttgccattgcttttggtgttttagacatgaagtccttgcccatgcctatgtcctgaatggtattgcctaggttttcttctagggtttttatggttttaggtctaacatttaagtctttaatacatcttgaattaatttttgtataaggtgtaaggaagggatccagtttcagctttctacatatggctagccagttttcccagcaccatttattaaatagggaatcttttccccatttcttctttttgtcaggtatgtcaaagatcagatggttgtagatatgcggcattatttctgagggctctgttctgttccattggtctatatctctgttttggtaccagtaccatgctgttttggttactatagccttgtagtatagtttgaagtcaggtagtgtgatgcctccagttttgctcttttgacttaggattgacttggcaatgtgggctcttttttggttccatatgaactttaaagtagttttttccaattctgtgaagaaaatcattggtagcttgatggggatggcaattgaacctataaattactttgggcagtatggccattttcacgatatcgattcttcctgtccatgagcatggaatgttcttccattcgtttgtatgctcttttatttcattgagcagtggtttgtagttctccttgaagaggtccttcacatcccttgtaagttggattgctaggtattttattctctttgaagcaattgtgaatgggagttcactcatgatttggctctctgtttgtctgttattggtgtataagaatgcttgtgatttttgcacattgattttgtatcctgagactttgctgaagttgcctatcagcttaaggagattttgggttgagacaatggggttttctagatatacaatcacgtcatctgcaaacagggacaatttgacttcctcttttcctaattgaataccctttatttccttctcctgcctgattgccctggccagaacttccaacactatgttgtataggagtggtgagagaggacatccctgtcttgtgccagttttcaaagggaatgcttccatttttgcccattcagtatgatattggctgtgggtttgtcatagatagctcttattattttgagatacgtcccatcaatacctaatttattgagagtttttagcatgaagggttgttgaattttgtcaaaggccttttctgcatctattgagataatagatggtttttgtggttggttctgtttatatgctggattacatttattgatttttgtgtgttgaaccagccttgcatcccagggatgaagcccacttgatcacggtggataagctttttggtgtgctgctggatttggtttgccagtattttattgaggatttctgcgtcaatgttcatcagggatattagtcgaaaattctctttttgttgttgtgtctctgccaggctttggtatcaggatgatgctggcctcataaaataagttagggaggattccctctttttctgttgattggaatagtttcagaaggaatggtaccagctcctccttgtaccactggtagaattcggctgtgaatccatctggtcctggacttttttttggttggtaagctgttaattattgcctcaatttcagagcctattattggtctcttcagagattcaacttcttcctggtttagtcttgggaggatgtatgtgtcgaggaatttatccatttcttctagattttctagtatatttgtgtagaggtgtttatagtattctctgatggtagtttgtgtttctgtgggtttggtggtgatatcccctttatcattttttattgcttctatttgattcttctctcttttcttctttattagtcttgttagcagtctatcaattttgttgatcttttcaagaaaccagctcctggattcattgattttttgaagggttatttgtgtctctgtttccttcagttctgctctgatcttagttatttcttgccttctgctagcttttgaatgtgtttgctcttgcttttctagttcttttaattgtgatgttagggtgtcaatgttagatctttcctgctttctcttgtgggcatttagtgctataaatttccctgtacacactactttgaatgtgtctcagagattctggtaagttgtgtctttgttctcattggtttcaaagaacatctttatttctgccttcatttcgtgatgtacccagtattcattcaggagcaggttgttcagtttccatgtagttgagcggttttgagtgagtttcttaatcctgagttctagtttaattgcactgtggtctgagagacagtttgttgtaatttccgttcttttacatttgctgaggagtgctttacttccaactatatggtcaattttggaataagtgtggtgtggtgctgagaataatgtatattctgttgatttggggtggagagttctgtagatgtctattaggtctgtttgatgcagagctgatttcaattcctggatatccttgttaactttctgtctcgttgatctgtctaatgttgacagtggggtattaaaatctcccattattattgtgtgggagtctaagtttctttgtaggtctctaaggacttgctttatgaatctgggtgctcctgtattgggtgcatatatatttaggatagttagctcttcttgttgaactgatccctttactattgtgtaatggccttctttgtctcttttgatctttgttggtttaaagtctgttttatcagagactaggattgcaacccctgccttttttttgttttccgtttgcttggtagatcttcttccatccttttattttgagcctgtgtgtgtctctacacgtgagatgggtttcctgaatacagcacactgatgggtcttgactctttatccaatttgccagtctgtgtcttttaattggagcatttagcctatttacatttaaggttaatattgttatgtgtgaatttgatcctgtcattatgattttagctggttattttgttcgttagttgatgcagtttcttcctagccttgatggtctttacaatttggcatttttttgtggtggctggtactggtttttcctttccatgtttagtgcttccttcaggagctcttttagggcaggcctggtggtgacaaaatctctcagcatttgcttgtctgtaaaggattttatttctccttcacttataaagcttagtttggctggatatgaaattctgggttgaaaattcttttctttacgaatgttgaatattggcccccaccctcttctggcttgtagagtttctgccgagagatcagctgttagtctgatgggcttccctttgtgggtaaccctacctttctctctggctgcccttaacattttttccctcatttcaactttggtgaatctgacaattatgtgtcttggggttgctcttcttgaggagtatctttgtggcgttctctgtatttcctgagtttgaatgttggcctgcctggctagattggggaagttctgctggataatatcctgcagagtgttttccaacttggttccattctccctgtcactttcaggtacaccaatcagacgcagatttgggcttttcacatagtcccatatttcttggaggatttgttcatttcttttaattcttttttctctaaactgctcttcttgcttcattcatttgatcatccatcactgataccctttcttccagttgatcaaatcggctactgaggcttgtgcatttgtcacgtagttctcgtgccttggttttcagctccatcgggtcctttaaggacttctctgcattggttattctagttagccattcgtctaattttttttcgaggtttttaacttctttgccatgggttcgaacttcctcctttagctcggagtagtttgattgtctgacgccttcttctctcaactcatcaaagtcattctccatctagctttgttctgttgctggtgaggagctgcgttcctttggaggaggagaggtgctctgctttttagagtttccagtttttctgctctgttttttccccatctttgtggttttatctacctttggtctttgatgatggtgacgtacagatggggttttggtgtggatgtcctttctgtttgttagttttccttctaacagtcaggaccctcagctgcaggtctgttggagtttgctggaggtccactccagaccctgtttgcctgggtatcagcagcggcagctgcagaaccgcggatattggtgaacagcaaatgttgctgcctgatcgttcctctggaagttttgtctcagaggagtacctggccgtgtgaggtgtcagtctgcccctactaggggggtgcctcccagctaggctcctcgggggtcagggacccacttgaggaggcagtctgtctgttctcagttgtccagctgcatgctgggagaaccactactcttttcaaagctatcagacagggacatttaagtctgcagaggattctgctgccttttgtttggctatgccccgcccccagaggtggagtctacagagacaggcaggcctccttgagctgcggtgggctccacccagttcaagcttcctggccgctttgtttaccttctcaagcctcggcaatggcgggcacccctccccgagccttgctgctgccttgcagtttgatctcagactgctgtgctagcaatgagcaaggctccatggtcataggaccctccaagtcaggcgcgagatataatctcctggtgtgccgtttgctaagaccattggaaaagcgcagtattaggaaaagtgacccgattttccaggtgctgtcttttatccctttctttgactaggaaagggaattccctgaccccttgtgcttcccgggtgaggcgattcctcaccctgcttcagctcacactcggtgcgctgcacccactgtcctgcacccactttccaacacccctcagtgagatgaacccggtacctcagttggaaatgcaaaaatcgcccatcttctgcgtcgctcacactgggagctgtagactggagctgttcctatttggccatcttggccccacccctatgctgtgctgcttctaaaacagtaagatgagctggcggtgttttggagaaaaatatagaaaaaagtaaaaatactctaagaattaacagtgttagaatgaatgttgtcacaagaagaatagatgcacacaggcccattgggaacaagaaacacaggcttaaaggtattagaattgaatgaaaagtaatcaagtgttacaccaatgagtagagagaaaataatatagaaggaaaaaagggaaatccaacataaacaaaattggtgcacttgctgaagagaacagaaaacatagaataattttcaaagatgtaattcaagattacttgttgaaaatatgtacacttttatctgtagacagggaaaaatatgtcctgggggaaaacaaatattttaaaaaaacgacatataattcagcagtaaaatcttccatggtaaagttagtgcattcaaaagataaggaaaaaatctaatgggagaaccaagctaaatataaacaataaaaaaagtcatcttcttcagggaatttatagtaacagccatcactggggccctctgctgggactcatggaccagcctatgattcaacaactaaagggagaaggcagagcaaagcagcaagcctctgactgttgtatgttcagattggttactcctagttaaacattttgaatattatacctgtttataattacattcctagtatgacaactactgaaggcaatccccaaagtcccacagcagaataaagaataattttttaaaataatcatacaatgaactatatcaaggtgaaaaagaatgaaatacagctacaagtagccaaatagatgaatcttacaatattatagatattacaaacataatattgggtaaaatgttatgataaaaaataatagctttgagtgacagagttcatgtagtatgattcctttatgaacgttagaacatgtgaaattaaactggtcacatgcatatttaattcaataaaactgtaaagaaaagcaaataaatcataaacataaaattcagggtggttggtgcaattgcagtgggctacaagggatactcatgattttggttttcattgtcgaggtggtggttacatggctttaatttcattattgggtgttaaacgataggtagggtttatatgtacactttagtgtgcatgatattgtggaacaaaacaattcacatggcagaaatgaaacaaatgaaaatgaacattttaagggtccaaaatcgaagtaagaaaataacagaataaacctaaaaaagtaaagaaagataatgaaaacaaacaaaaatgatagaaataatttaaaaagtcaaatgttaagtctttgtatagtcttcctgcaaacttaattttaaaaactaacaaactcataacagaacaaacaaaggtgaaaagcaacagacaaacctaacagaaaagcaacaaagaaaaaattggtaaatatattaagaatgaaactgtatacattaactatagaattagcatagaattaagaatatagcaagcaacttttatctagcaagcttataaatttagatgaatctcaatttcccagaaatattttttaatctgactcaaaaagagatagaacatgttaaactatcaggaattaaataaggtggctaataatcacaactgttttcatatcttactgaagatgctaccaagtgaagtcaaagtagcatagcaatgtgaaggaaaaacaattctcaaatattttagtatcagtagatctctataattttagaaagaaaagaataataaaaccagagaaaataaaacacaaaataaaatcctattgattactaaaaatatctcttggaaatcttacaacaaaagtcaaacccagactgcagaccaccaagattacaaaaataatgaaaatcctgaatatcagaaatgtgtttgtgtctatataacctatttatattgtttattgacttagcactttattttccttttagaatttattgctaattttttcttgtttgttttgtgtatgcctatattcctcctttttgaatttattatgaaagctaatgactttgccattttactagctattgaacatattaagctcacttactcatgtgattattttctaatttattaacttctgctatcatctttaattagtccttctccttttctaagaattgatatttaatgactttatttttaattaaaagattaattttattctttcttgtttagtaagaaaaatattttaaaatacagcttttttccttaacacctctttggaagtatacaaaaagagtgttgcaaataaaaaaatctttatgcatgtaaatattaaagcctagatgaaatggatgtctgggaagggtagtggggagggaactgagatggttaatgggtacaaaaatataattacatagaacaaataagatctagtatttgacagctcaacaggatggctacagtcaaaaataatttattgtacatttttaaataactaaaatattggattgttttttaatacggagaaaggataaatgtttgacgtgatagatctgcatttacccggatatgactattatgcgttgtatgcctgtatcaaaatatctcaggcaccctataaatacatacacctattatgcacccacaacaatgaaaaagaaaaattgctttcttacattaaatatgtgtatatatctctgtgtgtgtgtatatatatatatgtgtatatatatacacacatgtatatacacatacacacacacacaaaaagagataaagcaaactctaaaaaggtttattaaccatagttaccattttagatgtttaaaagtcttgttaccaccaagtgcttaaaacaagacaaagtgtttcacagataaacataaaacttttaagaataagtttagttccttcttaaattctgttagaatgtagaaaagaaggtcaatttccaaagtttattcttcaaggctgcaaaacattgactatatccccagataaatatgacaatacaaaacactataccaaactcactggattgctaagcctttgagtaatgtattagcagatagaaataacagcatgtttaaggatactatgctattactaatggtgtcagtacaaaagagggaaggctggcttaatcttagtatcttttaatatcattttccatattgagagatcgatctactttaaaaatcctgtgatcatttctacagagattgaaaagctatttaacaaaatttatcttaatctatgccttaaatgtatgaccacaatttaaaatgggtgaatattttctatatatgaaaagaatgcatatcatagtcttccccaaaaagcagcattaagtttagtgcatttaagtgaagaataagaaacatatatccatgtctgttatcattttaaacattgttttatacatagaagggaaaataacaaaataagtaaaaaattgtcttcactatttaactatcattaacttgataaagatcttattatatagctaaagcaaaagaaaacaaaatatctgaaacaaaaggattattagaattaataagagaatatagtagacaatttattgaaattgacaaactgtttctatattataaattattgtatatctgtgaatttaccttacattaatctttatgtttaatgtgattaactactctctccaagaaattccaagatttatttttggaattaaataagctgagttgaaaaataaaggcttaaaatgaagaatacaaaagggacatcagacctaccaattattttttaaaaatacattattacacttgaacatttaaaagtctggcagtcacacatgaattcacgcataaattgagatcagcagatatcaacataagattatacagagttgagaaaaagataaatattcaggaatgtagtatttaacaaaggtgactttaaataaatgagaaagaaataagttgttaattaatggtccttcaaaaacctgtctagccatatggaaaaaataaatatggacagtaaccatattttatggacatacgataaccatattttatgtccatatttatggacagtaaccatattatcttacagtataaaatttccagatttatgcataaaatcaaactttcaagaagaaagcataagagaatttgatcatatgatttaggagtgtgagaaactttatatatgtcacaaaacttagaattcataaattaaataattttcaagcaataaatattaaaattttatggaaaaatgccatttattaaaagtcaaaagatcaaaaataaactgaaaaatggctgcaacatgatggaagtaaaaggctgaaaacaacatacagaattgaatgcccagaaaaataatgaaaatgttcaagactcagtagaaaataagccaaatatatgaggagaacttctaagaaaattttttaaaagattttttatataacaaaaacgatttataaaccaatgagaagattttgaatcttattcacagttgacacatgtcagtgaaaatatccagtataattttcagtgccaagattgacacaagttatttggtaattttttttttgttatgtgttggtaagtgtattcttacacattgtcggtgaaaataaatttaatataactttgaaaacaaatctggctatatctattaacaatgtattgatatacatagctttcatccgtaaattcaacatataataattgatctcagaggtctagtcacacttctgcacaaagatgctcctgtaaggaagaatatttatgatgatataatttgtagtggtaaatggtcaaaaactagttagttaataaaggactgctagatgattatggctatatactatagtcacaaattatgcatctattcaaaagaataagtctttttctatgagctgggatatagatatgtttagatattgggagaaaattctccatgggcctcttgtgtttgcatatttttgtcaacataggccctgactaattttgttccagactatcttttcatggctgtttgttcagagaacagcctgggaagacagacatggtgcctgcctctggagaaaaagagtatatttatagcataatataataaactactgtctccttctggggcaaaggtcaggaatacttactgcccactgtgaaagagcagggaccccgtatcctgagggttcctctcctggaacacaaccaactgcatgttcaaacaccacttggttctcattgtgttgccttttgggaagtaaaacttgataactatctcaaattgatattccagttactgatcttgccattataaagccccttgacgctgattcaagagtctcatgtcttctgccagaatccgtgaaactgtggcaggctaatttgttagtttgaaagtaaggtgaaatctaatcccagtcccctttcacagttctcaacaaaagttctccaagatatattgtaggtggaaaaataaaccaaggctcagagcagtatgtatggtagagtaataaatttaagaaaactgataagtgtgtgcttgtggaagattaaacttcacattctttatcttgaatgtgcaaaggaaatatttcttttaattcctttctattttctctgatgtttctcatgagctttcttcctatttttcaactgctcactgaatgccaggaaaaaaaatagaacaaagcttaataaaacataacttagttcaagcctacttaaaacttagtgtgattcagtcatgtgaagaatatctttaggtttaattaacattcttcagaatacatgttccagtcttgttcttttatttgcttcatcgcttcttggatgcactggggtgtatggattttgctgaccctctgtcatcatgtaggcatgatggagaggggtgaggatacagaggaggatggggagggtaggagaaagaagagaagttgtcaaaagacaaagaagcaacaaatgaggtaaggatttaacaggcaattgaactaagcagtgaaaagcatattagtttatcttagagaaatgtcagtaggatggtgggaataaaatctgattgtaaataaaaggtgagtcttggaatgaaacctaccttcgcctaatgtagtactgattatattttgtaaagaacaggagacacttgctcagttgtatggtttaaggggaggtatcgaaaatgaagccaaggttgaaatagagaagagagaggaattcgggacccaaagaaccagaaggcaaagaagtcaaggctccttgaaaggaatggacctagacatggccttgggggctggagaaaagggagcaagatggatcaggaaggaagttcaggaagggaggggatttctgtcttgctcctcagctccagggtacctgagctgggtaagtgacttgagaaattggctaaaaatttggaggaatcatgaaaagacattcaccaagaatttccttttctagaagtgaggatgattatgttttctgtttttcatgccattttgcaagtcaaagtgatttttaactcagaagattaacatatgcttatgttattttatgcattataaacttggtaaagctattttccaaagtaaatattggtatgccaatgcaaaaggaagacaagatgtattatctagaatgattaaaaatgagatagtttgtaaatgtaaaactaagtgaagattatctatcatgacagattttcagaatgtggggtgatatagcccatgggtcaagagcagggagggcagccttgatgggggtggtgagttttgaactgatcatattttcatgggaagatattcctttttgtcgaagtgatttccaccactgttttcatgctctttcctcaatctccaagctccttggttttaaatggcttcaaaacagctgtgcatactggccactctagcaacctttccttaactgcatacctgagtacagtttgcagtccctttaccaaaatacatgatttctatgagagttctacttgctgaatgaactgtgtccagtgtttagtcctcaagaaaggagatggggcatcagaacagagagagagtatcatatcctgcaaaatattgcttggcttatggatttattctcaatttaatttttctgtctactgatctaggtgtttttttttaaatagaatcaaaagtgacaattcatttgaaatatttctcccttgtccatgaattgctttgtaaatcttgtgagctacttcacgagttatgaagtttttaagaataaatagcaatgaactcactttagtctccatgccaaatgcagatgtttttgtgatagctgatcttgttttgtaggaaaactcttgccttcaagtccttctattggctttcaagagaataatttccttgttttaagtcagatcaagcaaactgtcaataatgtttattaactacccactttacaacagcttacagtggaggttccctagggagttagagttaatagaaaagtcattgcaattagaggatttacaataaagttaactcaaaatataaatgtttgttaattttgaactgagtgagaaggaaagaaaaataaattattgcaatcttctccttttcagttgggtgaggagaagataacattccaaagaattgagtgatcataacatttgtagatcataaggtgattattggtaatctttgtgttagccatttcacaaatttatttgaaggagcagtaaaaatgttctctctgtctatgaaacatcttctcctcaggcataatttgtcagctttgtgtgggggattctttacacagcccactggaattcagtgatgcaatgttgttagtaggagaggactgacatttttttcagacaaagaaagtggtcttgttttttagacaacaaactttggggaatggaggaatcccaagtagaattagaaagagaagtcatggagagacatttggcctgttacttagtgattgcctcagctgtgtgtttcattatatgggagatttctattgcttttctttcctactgcctttagacacatgttagcaaggagaaatatatacttttgttaagaactttttgccttctgatgtaattttcaggatggccctgggtatgtcaggtacaatattcagatttaattatttctcccaagattcatgtaaatttcaaccctcatttatgaggtcacctcttaagcatatatattaaaatgcattaatatgtcaatgtgtggcagttactttttgaaactgcaaactcagaaacgcaaaatgatataccttcattttcctacaatttttgaagactgtaccttgagtttctgccttggtttgcaagggttactataacagagtgccacaaacgggatggttttgaattacagaaattttttgtcacaatgttttggagaccagaaggctgagatcaaggtgttggcagacttggttcctcctgagggttatgcgagtggctctgttctatactcccttgggagcttctggcggctgatgacccttggcttgtagacacattgccccgatccctgccttcatcttcacaaggcattctcggtgtgcctgccgctgtgtccatatttcccccctttttttgagacagagtttctctcattgcccaggcagaagtccaatggcacgatctcggctcaccgcaacatctgccttccaggttcaagcaattcaactgtctcaacctcccaagtagctgggattacaggcatgcaccaccacactcagctaattttgtatttttagtagagacgggttttctccatgttggtcaggctggtctcgaactcccaacctcaggtgatcctcctgtctcggcctcccaaagttctgggattacaggcatgagcccccgctgtgcccggccgaggtttcccctttttataaggataacagtcatatcagattaagggcccacctaatccagtgtgatctcaactaattctatctacaaccaccctatttccaaataaggttacattctgtggtactggggtctaagttttcaatatatgaattgtaggaggacacaacttagcccataacagctctcagtccactgatgacagaatgttattaaattccatttaggttgctctcaatcaatgtggattttccctggagtcaagacaataatccttgggagtaaactgttcacagttcacagggctttgccactgtcacctggtccctgcttatgtctcatttctctagctgctgtcttacacgatgacatctgtatttgccatgtggtcaatggtgggcagtccttgtgggcccatctacttgttctcaccataggtcctcttcagacagcaaccttcctttgaagcaattatggttgttctcatgagccatgctgcgtctgtggaacatttggtggcctatgtcaggcatgtgtggccttaacagccacaagtgccttattctgttgaaattgttctgagatgattcagagaaaatttgcaactctccagggatatgcagtttggacctgaggctctgtctttccctgtctgtactccacccctcctggggtggggcaggggacagggcccttttgtggagtgccacacaattcatagcttttctatgcatttctcatactggcatcacatttttctgaataatagtgtccttttcatttaaatagtcattaattacattctcttggctcttcacagcccctcaggttgcaaagattagtattactctgtcttcccccaggcagtgacttatgaatgtgtcaggatactatgagttgtaacatctcttgatttcactgaaatcccaaaacaacatcatagttaaacaacatctttaatattactgcttatagaaagactgtttctgacatatgtttttccttttttaaatttttgagtgaaatattatcataaagtataaaaagtgacaatattaatattgtgtgttcatcacccagcttaaaaaatagaatttttcttatagctttgcaaatctaagcttacatcaattcaaaacttttttgattacacatcaaaagtgaaacttacacatacatgcatattcatttataatttatataggcatattttacgtcaatatgttgtgcacataaaatgtacaaaataaccatttttaaagataaaacaaaaataaggatatgtattaattctagtgttttcttcttgtatcccaaatatttttttttgtactccctcaacgagggccctatattttggaaaccaccagtgtgtatcaggacctttgctctgaagatgaaaaacacagaaaaattaatttttgctgttggttatgtttctattgcttttccaaaggcagctgatgtcaaggtataatatggatatgggaaggggtggcgtttaggaatcttaaaataatacacagacaacgcacacaagaaaatatatatgcatgtatttaagtatctacatatatgtatgtgtatatatatgcatgtatttaagtgttttgtgtgtgtgtgtatgttttatatagataaaacattggttagcactttaaagtctttaaattcttatctggctccaattggttttgaattcatctgttagtaggtttgtctgttagttttgtggacattctccaggaaaatttcttatctctgtaacccagatgcactattagtatttgatcagggatttttgtgtgctatatgagagaaggactcagactcagaattttcacttaatgtcctttatttcattctgcaaaagtacttcttcatttaagcttagggttgtgatggtcaagacagttgtgttagggcaacctgctctccaaacactttcagtgtggatagtaatagctatgatttgactgataagcagtgttctaagtgctttgtgcatactgacttattccatacatttaacagctctatgggagaggggctatcattagctcctttttcacaaaggaagacgcagagataatgagaggtgttatgagttgaactggatctccccaaaagatgtgttgaagttctaacacccagtacctcaggatgtgatcttatttggaaattgggccttgcagagataatttattaagttgagatcatactggagtagagtgggtccttaatctgatatggctggtatccttataagaagaagaaaagaagctgggcacggtggctcatgcctgtaatcccagcactttgggaggccgaggcaggcggatcccctgaggtcgggagttcgagaccagcctgaccaacatggagaaaccctgtcactactaaaaatacaaaatagccaggggtggtggcacatgcctgtaatcccagctactcgggaggctgaggcagaattgcttgaactccagaggcggaggttgtggtgagccgagattgtgccattgcactccagcctgggcaacaagagggaaattccgtctcaaaaaaaaaagtagaagaagaaaagagacacagagacatgactggagaaggccatgtaattggagtgattggagaggcaaagatctgagtgatgcaactgtgagctgagaaactccaagaaatgtaggtcactgccagaagccaaaataaggcaatgaaggattctactcagagtctcaagagaccctggtcctgttcgcaccttggttttggacttcgagtctccagaaatatgagacaaaacatttttgttgtctggagttactcaatttgtgggactttgttatggcagttcttaggaaactaatatgatggattaaatagttgcctaaagttacatagtgagcaagtcatacaagcagaatttgagtcaagcagtctgtcattggagcctgcactccacagccctgccttatccctcctcaggggacagacagagcggtgccatgctgatgcacagctcctgctggggcatgaggaataaggctgtgggcagagatttttccttaggcaaccagtggaacttaggatgaagaacgcagcactgtcagatgaagaatattattaatgtttatcaaagatgcacattcaagatttctgaaaaacattttcaacactggaaggcatgttaaatatcatctcattacacagtgcttttactttgagtcgccatttaaaagataaagtttatagccttgctgatctccttggcatatgcttacatacatatgtgaatacatagacacacatatatgcacatataaatgtgcatgtcgttcttcatttaaccagattccttgtgcccctgtattaaaaatggtcaagtttctatttcaaaccatgcaataattataatatcagataaagaattctttcacaatcttttcttagaattctagatgtgacttagtttccttcctctacagtgagggaggaaataagagtgatttgtgaagatgcatattttttttcagtaaaacaggggaggtttcacctatctcgggtctcctattctggatacaacatttcaagagtcttggattcctgtttgattatcaagttcacttccactgaccaataaatattggtagacgttaagttctcaggcttgagaggcttctgtcatttggtgtgtccgatgctaacagacactcttaaataaaatgcctcatgaggggccgggcacggtggctcatgcctgtaatcccagcactttgggaggccgaggtgggcggatcatgaggtcaggagattgagaccatcctggctaaaatggtgaaacgatgtttctactaaaaatacaaaaattagccaggcatggtgatgcactcctgtaatcccagctacttgtgagactaaggcaggagaattgcttgaattcgggaggcggaggttgcagtgagccgagatcgcgccactccagcctgggagacagagcaaaactccgtctcaaaaaaaaaaaaaaaaaaaaaaaaaaaaaaaaagcctaacgagaaggtaaaagagcaaggaggaaactaaagcaaggattacttttattgcaaaagaggtggaggaatctttaaagatttctgatacagcagaaaatcagatattgcatgttctcacttacaagagaatgagctaaacaatgagtacacagggacataaagatagacataagatactgaggactccagaaacggggagggagggagaaggtggaggttggaaggttaccttttggatataatgttcattatttggatgatgggtacactagaagctcagtccccaccattaggcaatatacccatgtaacaaacatgcactgctaccccctgaatctaaattttttaaaaaagatttctgacaaatagagtcttagaactgaaagctagaaggtgacaaagagaacggagaatgtctgtcatcaaatctagtggtcttccctttctctcgttcccttctcaggacacctgagatatgccatactctcttttattatcatggattctctggtagggaaagggtcaccaagtttttgggatttacgtggatgaaacggcagaggaagataattccgataccctcttaaagggacatgccttgcctccctcaagaaattctgatctcatatacatttttaatttaccagacaaaaatattgggaccagaaaaattaaaagattaaccatctggctgaaggccacagagctagcagtgacataatctatactaacacctagaggtttcctgaatcccaaactagtgcttgtgtatttgtatttgtgtgtgtatgtgtgtgtgtgtgtgtttatataactttcatgaatttgatacatgaatatatgtttgactttataaaattttctaagttcagccaaaatactgtgttttgctttactataatttcaatttcatcctttagtcacaggttattagaaaaccccctaattttagtagcattaatgcaaacacaccttaacaataaacatatcatgattatctgcaatactttaatggatactctgaatgacacatagaattttaactggtcatggttgcttttagtagcaaacaagatctgatcacaattaattgatgtctgtcacccccttgttttaatagattgagtgcccaatttgaaaatactactttgttgtgagaaaaagaaaataattgaggatatagtatgggattttgcagatgaagggaatcttggggctattcaatccaatctcttaattttgcatgtgaatacagtgaagtaggtcaagaaaaatttcatgactagatttctgaattatttcatgtagttttagcattattcaattttaaatcgtgaagttcaataatttactgttatagttctttcaccaaggattgtgaataatccaattctaagcatgtgtgtttcaaaggaagcagtaaaaataaaaccagtgctatccaacaaccaatccatagcttttactaacaccactcttcctacagcaaaagagtcctttcaagtccattgctaaattccagaactaaacagataatgttggctgtcatgggaaaaacatagcttttgagcttaccagctatatgaccttgagccaaaccaaactacttaaactctgctcagtcttttcacttgtagaatggaaaaacaaagcccatctcactggctcattatgaaaatcagactaacttgcataaagtacttatcatagtactggaagccaataattattagattccctttcttctcttcttttttattttccttcaagattacatggctagttagtgtccaggcaggacaagagtggagaccttttaatttcgaggcagtggaaccctctatattcttccgttgtccacatgaaaatgctctcaggaatgaaaagcagaaatacctaaggaacattttttttctcagcttgagaagcaagccagggactggtgccctgtcttaaaaatggtgaagtttctatctcaaatcatgaaataattgtactgtcagataaagaattctttcacaatcttttcttagaattctagatgttacattgtttttttgtttcttattactagagaaggcttaggaatctatggtggctcaaaaatgactagagaaaaattgagtttatctgttataaactgagcatatttgaatacactggaaaataggacacaaaacaggtttttggaatttacatatttgaacaaagcaaatgaattttagctggcagagtcaactaagtgttcaaattaaaatacccctatttcaaggttatcatgaggctgtagcagtggtacacctagcttatcagatgcacagagagaataaatttttaatacctatccttctctatgtgataaaattgttgccagtaataatcatgaagagataattaacaatcagatttttaaatttgttttttagtcttaaaacaagtaacagtgtatgtagaataatacatttacttttaaaagatattgcaaaattaagttaaataatttatatatgaacaaaaatttgcacttacctcaaaagttatgcattacatccctctgtatgctgttttaaaatgtaaaacaagtaaacattccaagtggttaagaagacaaatacaagtaactcaaattatcctttttttgtatttacaatctctgagctataattgtttatttccaatatacatgtaaatgcagggctgtgtagcatcacaggttttggggatgggagctatagttattctttacccttgatgaacttatttgcaaagtgtctgtaagattttggtttccacttagggatgtagaaagttacaaagtgtgattcccattcttacactgaagaaaagtgggacgaattaaaaatccccatgtgtttctgaattcatccaagatctgaagtcacaggaaaagcaactggccccaaatctggagatagataggcagatgaagggagagaaatgagctcgggcttagctgggtagacataattaggtgctgagaagggtggtgggaaagttggtagcggccaagtatgccctcgtgaatgagcatgaagccccgggtgctgcagaatttgagagagcccaaaccctcttcagatttgtatctataaatcctactgagctctcacagaaaggactggaagatgcttttgaaaacagatccaggaagtggggaactcaaggaagagaggagcagctcctccaggatggtcatgaaactatccagacatttagtacctgtttcccctataaaacaaaatctttcactgtcggggaaagggtaatacatctccttgctcttagggcacttgtaagtatccatggcagctatgggaaggaaacaggaacataaataaatgaaagctcaacatagataaataacgaagaaaacatatcacacaaaaacaaagaggtggacttatcattttcaaattaccaaacacaaaaacaaacagaaactcttacaggcagttacagaaaaagaaacatatgcagaggaacaaagatactaatgacaggggacttcttgtcagaaaccatgcaagcgtggggaaaatggagagacgtctttgaaagcctgaaagaaataaatgttagcattgaattctatatccagcaaaaagtatattccagaaatgaaaacaattaaggatttttatgaggctattcattacagcagacctaccctaaataaatgtaaaggaagttctttagacaaaaggaatgtgatacttgacaaacttgaatctacacaaagaaatgaagagcaatgaaaatggaataaattaaagtgtaatagcattatagttttatttttagttgctctaaaaataactgactgtctaaaacaaaattaatggcagtagattgtgtgtctataggaaatgtgtgtgtgtttatgcaaaaataaaatggcacaaagaatgggaggaaagagctgggaatttaatgttttaactcttacagttttaactctttcctagaattacatataaagtggtacaatattatttgaatgtaaactctggttggttaaagatatataatgtatacactaggacaaccactaaaaatcaaagtatacaaatagcagaggaaatagaataaaaaataatgctcaataaacaaaacagaaagcagaaaaaagaggcaaaaacaagaactgataaagctaataaaaattgcttagaaagttggtagatttatatccagcaatgtaaaaaatcatgttaaatgtgatctctttaaactcaccagttaaaagatagagattgtcagattgtataaaaactgagacacgactaatctataagaaatgactttaagacattgacaggttaaatataaatgaatgggaaaggtattctatgcaaacacccgtcaaatgaatactggatcaactatactgatgatagacaaagtaggctttaggacaagaaataatatcaaggataaagagagatattacacaatgaaaaagtaattatatcctaagttttaaaatgctaagtatatatacacataaagcatttcaaaatacataaatttaaagaatgacagactgaaaggggaaaaaatccacaattgtagtcaatgtcaatactcctttctcatagtcgacagaacaagtagatagaaaattagtgaggatatagcaaacctgaacaaaactatattaccagcttgaccaaattgacatttatagaacagcagaagatacattattttaaaatgcacaaggaaaattgaacaagatagatcatcttctgggtcataatagaagccttcagaaatttaaaagaaactgtattatcatataataatgtgattaaactagaaattacagaaatagatctgaaaaaaatttgaacaacacacttctacataacccataggttaataggaaatctcaaaggatattaaaaatattttaatgaatgaaaataaaataatttataaataaaaatatttaactgaatgaaaataaaatataacatatcaaaaatttgtggattgcagctaacatagtacttagagaaaaatttacagaattaaatgtttatattagaacagaagaagtgtttaaaattaatttatacttctaccctagaaaatagaaaaaaaagacctaattaaatccaaaaacaggagaaggaagaaaataataaagattagagaaaaaaatagtgaaattgaaaagagaaaaacaataaagaaaatcaataaaaccaaaagctgattatttgaaaataacaataaaattgatttatttttaagcagactgatcaagaaacatacaggacatacaaatattaccagcatcagcatgaaataacatacataatatccaacactatgcatgttaaaaagatagtaagcttatgatataagcaagtctatgcctgttaagttcaggaatttaaatgaaatgggccaagtccttgaaagacacaatctgccaaaaatcaattaaaaagaaatagatgacttgaatagccaatattggtcaagcaaagtgaatcatagttaaacatttgtaaaaatgaatattctaggctccaatgattttactagcaaattctaccaaacccttaaggataaaataatgctgattctatactacctcttccaaaaactaggagattagagaatacatttcaaatcatttcactagggcaaaattttccttatcctaaaagtagacaaagaccttacaacaaacaaaactgcatgccagtatgatttataaacatagaacaccaaatctttaatagaatattagcaaatggaatccaatatataaagaaatatataaaaatataatacttattaccaaccaaatgaggtatatctcaagatgcaaggctggtacaacattaaaaaatcaaccaatgtatttcactgtagtcacagactaaatattgttaagatggcaattctctctacttttatctatagattcaatgcaatccctatcaaaatctgtgcaagcttttttgctgatgtcaacatactgattctagactttatatagaaaatcaaaggaactacaagagctgaaataattttttaaaaagaacaaagttggagttctcagaatacttgatttccatacttactataaattagggtaatcaagactgtggttgtagcagaagaataagcctagagttaggcaaaggtttttcaagtagataccacaaaaaccactattaaagaaaaaacttgataaattggatttaattaagatcaaaaccttttactcttcaaaagatactgttaatagaacaaaaggcaagtcacaaattgggagagaatatttgcaaattacatttgtgacaatgaacttctatccaggagatacgtacatatatatgtatatacaacaatttatatacatatatatccgtacatatatgtatatataacaatatataacaatttatgtacatatatatgtatcctggatatgcatgtatatatgtgtatatgttgatatatatatatgtttttatatatacatatatatgacaatgaacttgtatccaggataaacatacatatacatgtatgtataaattttaaaacatatatatagaaacacaggtatatatgtatgtgtatatgtacatatatgtatatgtaattatatatgttatatagtcatatataaaaaatgactctgcaatttcaatacaaaaatgggcaaaagaagatagatgtccctaaaacttaaagtataataataataaaatttaaaaaaagaagatagatgtattgcaaataagcatatgaaaggatatgcagtatcatcagagcagagttacactgccacaagccaagaaatgcccaagattacctgcaaccaccagcaactgagagagaggcatggaacagtttctccctcaggtcctccagaactaaccaacccgatttcaggttccagtcttcatcactgtgagagaataaatttctgtttttttaagccaccaagtttgtggtgctttgttatggaagattcaggaaactaacacataacaaataaattattttgaaaaatgaggtgttttttgaagccatgttattgacactgtaatggagattaccttgccacaataatatagcaacctaatcccccgaggtctgctaaagctcttactaaccttagaaaaaattgtaaacaatagtctgaatactattttgtaaatatatatttatctttaaacaaggttacacaggctatttgataattcttgacagtcagaaatcaattcctattcaatgagttttcctaaatggaagaaaatgaatcatggaacccttactgggcataaagcttagaaagaatgtaaaggcagatggccctgtctgacattagctgtcatctttgcctccaaacagatgctaaggaagaagctgaaaacacattacagtgtctgacacagtgttagtctaagcatgtgcctaagatgctaatacaggttatgagaaaaggggcctcgtagccaaagttttgcaaattctaagctaaaaaaattaaaaatatttttcatgataggatatatgaggctcattagtgtgctgatatatatcgtgacacattagaacagaagacagcagactcttttccatgtttattttaccctagaatcttctgtgaagagagtttcatgaaactgagcctccatgaacccacttcaggggataagcaacttagaatattgcttctattgatgcgtcattgggtcaatttggaagggatggatctctccctatcctgtatacattttgtttattttccccctttctttctatttttaaccatctcacctttaaaaagatgttcctttgacccacaaattatttcccatctctactgtgtatactttaggatctaagatgtcctatttaatataaaatttaaaaaatcacattgagtagtcttttattcctgattcaccaaattactgctaccataatgctttatcttctaaatcatttctattttctttactgtttattggtgtggaaccataagaaacagctgatattcaacttatgaaagtggcaattccatatggttcaaccaaatacattaatgttattaaagagtcaacacagtttccaagatagttgatttatcaaagagccttaaccactgcaagaatttggcttaatgcttttataaataggctaggtggttgacaggtgagatcacttatgcttaaaaatgataccaagttgggcaagactgacaatattttgtagggccaggcaggaatgcaaaatgatgcagtcaatttgagggagtaatgtgtgctgaatagaatgaattcctaataaaatacttgcaaggttttggttataaaatagaataattaattttataaatgcaacagaaataggaacatttacatggactggtccacataaagagcagttttaaagtcacagccaatcacagattcaggctctgccaaacatgcccaaatgggcagcctccaagccattcatactgaccaaccatctggaccttatcccttggatttcagctaccatgttgaatcagatcaatgacttcatgtggcctatgaattttaggcatttagacatagtagtattgtcttgagtaatatatgtacactcttcctgtaacccattcaaaatctgctcaactttcaagggccagttaacagtcaaggaagtccagaaagtctctgctgttacgtctataggtcatagactttatcgctcagcttaactcaaggtgacaatcacttctggctgacaatcacatcagcttctttgtatattagccttgactttgaagtttgtacattctttgaggacaaggaccaagtactgcacatgttttgcacttctgtcagactaatgtgcaatcaataaaaacattagtaggcttcatcaagcaggacttaataacattactgatcacaacaatgaaaacaacatgcattaaagcaaaatgactattgagaacattaaagattgagaaatttatgtggaggcagatgaatatgaaacaaaatatatacgtattttatgtccatattactgaagttggtatttaatatatccataaatttcattacatgcttaattcgagttaacagtaaggccagtgtttagtttagtagagtttcatgtaagagtctttattcatggtttgtggtttaatgtgttatgtaaaatacagtaaactagaagtattttttcgttggacttttgtctcttaaatactgagatgctggatagaatggtttttcagtgctgaattttctgaccctgtgatttattaggctttttaatgtattatcctaatgtctttataaattaatgtttttataatttatcggttgactattgaaataaaattttcatattccattgcattttatataatagcattacccctcagccactgcgatatacatgagtttcaatttattatagctcagtcccaaatcaatgtcactgttaagagtatgtgttacagtagtggttatctttggaaaacaatttgagtctgactagatgttgttcaatccccaggccatggtaagtgtgactgtggcaagtgcaagtgtgaccagggatggtatggggatgcttgccagtacccaactaactgtgacttgacaaagaagaaaagtaaccaaatgtgcaagaattcacaagacatcatctgctctaatgcaggtaagaagtataccctgtgaaaattgttaagtggaataatcaaattttgtttttaatggaaatatgtgggcgtggagaaatgttgaatctcagagtgagtctgcttttgagtatgttttttagaagtgaaattcagataaatcaatagaaaaaaaatgccatcttgctgagactggcaagtttgatgctttccagctgttccaaatgcctccttctagcaggatattcactggaaacaacaccccaaccacattttatgtaaattgtgagccatgatattgaataccggattacatctgttaaaaaggatttatataaactgacttaattattttctgttacagatcacgggtgctttgaatttttaccttcgcaaaatagaaccaaatactttaaatttgatagaagtttcagatatactggttataaagctctttgaaggatacagtcacagaaagattttttgtttgatcaaaatattttttatttcatagaagttatttgaaaatattttttacaaaattgtagcaatgctgttaaaatttattagcaaaatcatataaaagagttgcagtttaggtttcaatggtatttagcgagtgttaccgtaattaaatattctttttacatttgggcaggtgaagcctcaaaatcagattttctcaaccgtggttgaacatcagcatcccaaggagaaaggaataaactgtcagttctcatgtagtacaccagaggttctgtttcaagtgctttggtgtgtggccttgacgttggtggtttttttaaagctctctgggtgattttaatatagatgagtgtgtgacccattgctctaaatgctaaaggtgaggatttgacttcacgaatgagtacctttcttcctgaagctcacattgttggtagggcccatctctaaccagagctgagaattccccacagtctgattgcaacagattgtgtgttttagactgagctcagttaaaggtgttttgctgataggaatcagaccatatccaaagcgaggtgtgagtggatccgtcaggggtcatgacaaatggtcttagcagttaggtccctttctgtgttcatgatgttctcatcatatttctctagcacttcagtctttctttcttcttagtaggatttctctacgtccaattcataacacccacccctccaaacacacacacacacacacacacacacacacacacacacacacacacttctctacttccaattcataacacccacccctccatacacacacacacacgcgcacgcgcgcgcatgccccatagcgtctttcatcttgaaaaaattattcttttcaaacttgtttcagtaacaagacttgaattctgttttgggtttgaaatctattttgggatttatttatttattgtttgcaaatcaaatttagggtttttttttagagaacattataatcaaatgtggtagtctaggattctaaagatgtttaatattaaggaatctaaacatgtaattcaccacattaacatatcttaaaggagaaaacatacagaagtgtttcagtagatgataaaacatatttgatacaatgtaaacgcatttctaggacatctgtactctctcattttttaagcatggatgcaatacctttgttcataacctgctttagtcaagggacccagtaatgtcctgtatagcgttttcctctccttacaggattcagactattgaaaatgttatgtttatatctctctttagtcttctttaatctgggtcatttccacagactttggctttagagcattgaaacttgtgaagaaagttgtccccattttattaaaagaaaagtgtacttatcttggatttgtctgatgtctcccccgccatgattagattcataatacatattcttaggtaaaacactagagaaatggttttgtgttctcaaaatgtttcatctggaagcacatgatgtccatctgctcatattggtgatgtcagttttgatgagctggtcaaggtgttggctggtgtcttaactgtgttatttctgacttaccctcttcacaaatgtgcattctatgaggaaatactttaaagccatacatgtatcacattcctcactaaaattaccccagatttaacatccgctgatgacaatcacctgacacagtattgacaatgatgactggaaaatgatgatttatgaactgtaacattctctctgaattgactagttggcactcagtattccaccacaaacaggaatcctcctctctcatttatcagttatttgttatttcatttacttagtgacttattatcagtctagaagcacaattcttattatttcattgatttgttattcattttgtacataattattctggtgcacagagttttccagattaggtattaaagcccatcaggctagcttttgtgtttttgtgacatgcctgccttttgtttttgttttttgttttgtttttgcaattctttacttgttggcataataacatattccagggtcatattggacctgcttcactgcacctttggaatcatccacttatccaaacagccctgattccttttagtgaaaatggtatttgaataaaaattgtgggcacagggatacttatttccactggagggtatttgcttcttggccctttctgcaaataggcttgtgtcaaaaaagtagattgaagcataatacaatttttattttatctgagcaaacaatgattcatgaatcaggcagctccaaatcagaagtgattcaggtgcttcattgagggaatgcaagtgggaggcttttatagggtgaacagaaaaagaaagcaaagaaaaatagttggttggctaatgttatatggttgccttatttagtctatcctgttggaaagtccctagttatataattataagtttgttggttgcttctgattggttaaacttaagttctgttcttctttaatgtagacatttataagaaataacttaagctaagtttcacttatttttgcctgtcaggcaaggttaggatcatttatgaggcctaactggcttagtctgctcaggggttctttaggccttgtctccattttaatttatcttgacactagtaaatatatgcctgtgcatatacacacaaatacatatacacatacttgcacacagatatgcatgtacacatacacatacatgcatattttagaaatcatgaatttacaccagtgcatctaattccagtccaacctcacaggattacttcttgttttctccattccatatttgcatgtcccattttcacagggagaaccctggctcccaataccaccaacatatttacttatttgctcaatcctatactacatctctagttacttctagaagtgctgcagacacaccactaaaccaagcaaatgtaccaaaagagattaggatttgcagtccacccctctccacttccccccactcactgtacctcaatcatgcccaagattggggtatgtagtcgaatgacgtgttcataagtcactcagacttattttattttcttctcttttagtgtggttatggtactcatttgaaatacaatttagcttatttatttcagatcactttcaattttaggttttataattccttcccatctgtattaatatattttataatgtatagtacactaacatgcttctaaaagtcataactatgcagaaaagtatactcagagaatcatccctctcttcctcaaaccttgcaccctgcttaccctcaccttatagataaccaactttattgctctcttccttctctgtgcatgtatttctttttgtgtaaagataaatagacatatttgtgtgttattatttctcatttttttcctgtgcaaatggttgtgctttcattccatgtgttcttttgcactctgcttttacgactcaacataatctcctggaattcactccaaatcagttcatagaaatccttctctttattttttcaaaagcacaggactggattctatgtatgcaatgtaatttattcaatcaagctcttatgcttgagcatttagacagtagtcagtattttggattgtaaataatagtgcacagaatgatctagtgcacatatatttttatatttttggaggtgtgtattcaaggcaaattaccagaaatgcaattggccaaaagatacatttatattcagtgttacatttaatcttttctgtctcatttactcttgtagaaatatctaagcctttcatgtttactttggcagtctcattctcacctgtctttcttttaatacccacttccaccctccgagttcaggaccatttcccccaaattgcattagcctatgaagtctctctattaatccttccctttcatatcacagtgtggttttctgaagtagtttggagcagaaggggaagaggagttaaatggattggggaatgagactgaagggcagaatgaggcagagctggggatcaaagtgttccagaggctaactttgtgggaaaagtagaagggaggtccagtgtgcagagcagggtgaggccccggcaccactgtacaggagtgtgggctggtgtacatgtctggtcagtcatcctagagagagtcagttctattgggcactatgaaaaatgagagctaaaaatcatcaagtgtaaggcagaagaccagtcctagaggctgagttaactggcaaccacgagagagaagctgtgtgtgtcatagcatgagcacaggagtctggagcttttgcctgggcgtccatatgccatgtcttggaggctccgttgtgaattctgctttatgggtgagacaggaagtctctgagctgttgtaaacttcccacatcagccgggaatgtttccgatgtgtggatgagagggagctgcctatgggggacttcagtgaggagtcatagaatttggaggcagaggctgttccttcccatctttcctgaaaaaacttcctcatacacagtcctaaccaagtgacttcctgctctcatattatatatgagaggcccatattatatatggttacatgtataatatttgtataggtttatatttgtagttataaaacaagaaaacatatgacacaaaggcttttgcaatagacttgtggcaaatgctatacaaaatgtattaatagggtatctcttcctggtctatgatttacttaattttaagcatctcattattttctatagcacttagttccttgcaaacaacataacagataacaagaaagcttaatggctggatatgtgggtggttgagagacaggatgaataaatgtgaaaatgaaaaagaagggtgataattagagaacaaaaactagatgaagcaatagcataaattatagcattagatttcaaattacttttatgaattgagttagcttttagggaaaaatgcaataaaatgaagtttaatgacaggaaaattcacatgagtatttgcaagatagaaaaataaattctgcaaaatcaccatttatatgtaactgtgagtgaaaaatttatagataatagtgacttgcaagtgatctgggtaacagaatcatgcagaggatatgaaaacaaggatattgtcagcatccataaatatattttctggagaaaatgtttgtaaatatgatgaatatactctatatcttaatgggagaagaggaagaacccaaattttctcaaatcctactatgtactaggtgcagcagtgcttctagaaacatgactgggtacatattcatcacttggtattggcagcagttctatgaagcagagattatttgcagatatggaatctgggaattagaaatgaaagcaatgcctttaaaaatgcatagctcatgaggattaaaactcggaattcagctacagctctaccttactcacaagttcattctctttctaatagatcacatatagatttgctaatatctagtaattcaaaccaaattagcaacagcttccttggttccttcccatccttcaccctttacactcagtcaccaaatgccctctactctttctcctaaaaatatccccagatgtatttgttccattctaaactcatcgcatcatgtgtctagccactgtcttctttcctgcagacaaatataacagccttttaactcatttctttgcatccacttttgcctcatttcagttcattcactcttatgctattgcttcatctagtttttgttacatgacaaccagagtaatctggtaaaaattcatacatgatcacaggactcccttgcttctatgtcttccaattatttttggattaaagctggaaatctttaacatgacctataagacttccatgaactgcacctcaggttgctttattcatttcatgccacttttcatgctgttctcatgtggtgtttttccttcacttccccttttattgcagagcctgtgctattgtctcatgctggaagtaagcctcttcaccatctcacttctcttagctatgctttttctcttggcttttagttctcagctacttcctcagggactctgactttgacctactggtctcagttaaatccccttgctatgtgcttctgcaacactttgcacttctgtatttattttatcacattggtttttgctcatataaaactctgagaggagggttatggctgacttgattcccgttggattttcagagtccagggtggtttcttgtgagagatcaagtctcagttgatacatggtgatggctgtgatgagcattaaaactcaaaatagataaattaacaaggaaatttctcaagtgggcattctacctctcaaaattgtttgagtgcaatattaatgttggtgaaattacatttgggggatgtggtagaatcttcagacttggatgagtatatggctcgtggtagaccagatgactaccatgcctctctaacgtggaggtcccctgagaatctggtgagttaccagcaatccatgcctaaggaaatccactcttgtcccattattgtaaggacatgtgtatcagtataagttaatgctgaggaggagaaattatcaggggcacatatgatttttatttatgcatttgataataaattatttccacaaatatttattatataaatagtatgttcaaacatagtgcaaaacattgaataaatactggtgaggaagataagcaaggttgcttccctcacaaagcttagaatttgctgctttatttcacttcagacccaggtgtaatcagaagacattcatgcattggttggatggctatatgtggagtagctctgcacttggagaggtcaaatttacattcattaaaccattagaggtcaataataatagttgtgtgatctaaaatataattgccatgctaaaataacctcaagaaagagtagcatgtgctttacctcaccatgcccacagaaatatctaattgaaatattaaattgatttggattatctactctcttgagagagatggtataaaaattcattaattataattttatgtgcatgtaacaaacagtcttttttgttttcatggtttaggtacatgtcactgtggcaggtgtaagtgtgataattcagatggaagtggacttgtgtatggtaaattttgtgagtgtgacgatagagaatgcatagacgatgaaacagaagaaatatgtggaggtatgtatattggctctgtagaaattaataaaagtacctgtttttttcacctatttcattgttcttttatctctacataagtttctgctctaggtgtgctaatgtagtttaaacctatgtttatctggaaaacatttcacataaggagagtgagactatggcattaagagtagactagtactttttagatgcaaagccaaattgtccccagaggagagctgtgtcattatggcaacaggccaactgcatagctctgaagtagtcctagtagaataccatctcctctgctcaccttagtcacttttattttcctttctcctactctcttaagtgtacattttcatttctttgtttttccctttctaaaacatgagtctcatgtcctatcagggacaatgaaggtcaatagggttattagcctagagtttacctccccctctctgtccctaaacacttaaataacattttcaatgaccttttctgtgtaccaccattactcaattcatttttctgttgtagcagttcttgcatgtttgctagtgacaaattctgcaataagtgctttacattcattatgttttgtctcacaacatcactctaggctaagaattatgtttatctacatagatagatgtggaacctgggacgtggataaattaggtaacgaacccagggtcagtccaccaataatagtagaatttgggctcgtgtctgtgtgatgccaaagtctatgttcctgatgcctcaccactcacgactgcatcagtgccttagagctcagagctccacaagaggagtctctcctcaccacttgcagttttcatctcttctgctcaacctgcaagcctgtgcccagagttcccatttgcaaccttgactggtgtaggaaaagaaaagtagaaagcagagagaatcatttggtttaggtaaatttttctctgctctgaacttatatttcactcctatctcatgggattccagttgaaggaagactgccctgcgtgcagaaatggtagttttagaagtattgtttttctggaaggactagggcccaatggggccacgtggaaccagagaaccctgagaaactgtggctagcataggacaagcttgttcttttgtttacatttcggtagcttcaattcctgtgagtcatccaaatacacttattttaggcctgattggccctccctccttgatctcctggctgtacaaactacctggataaaacaaacaaacacaaaaaccttattttcatttttccgagccaatgacctaagcaagatgctgctcagacaattctttcttaaagggctcagtccaaaataattagatcaattagacaaatccatccacaaatatatgtgtttgtcctcttgatgtttagtttccaattattatagatggaaaaaaaaaaaaagaagaagacgggaacatgctttggggccagtgtgtgttgataaacaccacaaaagcagagtctatttgcatgtatcaatagaaaaatgtaacttgaaacaacacaacagaaaatgtttaactttcaaactttctagttgttatttccatttgtttgaggcttaagcaatttcatggtgcaaagtctctgaacaaggacaccagcactgcagtaaacaccctctgggggtgacattgcctgggattgtaaatctttccatgtgtcattcacatgaaaccaatctgctgagagatgattccacagttcatcagtgaagtagtacaaatagacattttcttgctctatcagtttgcacaaagcaaagaattatgtttattgtctggaatatgtattgtcctaaagcacacattttaatctcaattattcagatgtgtcttgttcaatatttttatttgagttatgtggatatttgtttaattttccatacctgcatagacgtgtattgttacataatttttgcttccttatttacctctaactcaaaggtttcttagtaaaaccctaattcagtactgaattgtataaatattcaaagaatttggatgtgagaaatatagattttctatcatttattaatatagtaatccttacttatgttgcaccttctgtataaattttctgaaattacagagaaaataaattccgtagtctaaaaaggtgattgggtcgtacaaacctgactcctaagaaaagcaattaatatacactattgcttttttttcagtgtaatccttgagttcttgaggcctgtgatatatcactaggatgtgatttgtgtgtgcaagtagacaccattttaagttcataaataagatatatagatgatatattctgtactgattaaatcacttgacagcctttgcatttgcttaagtaaacaaatttaaaattcaaattcattgtggaaatggtcattgatttttaggttaacaagtgattttctttgaatatcccaattataacttatttagacagagaacatggcattgggtccctgtctctttctctgtgtctcactatagcactctttctgttcatctctctggctctgtctctcagatgtgtatcttcttgatggaagtctcatctgctggacatgaatagcgtaggataccagaatattctgttgtacttcttgcttcttatgtgagttttacaggtcctattaatgttcttgccattggccagaaataccatagtgttagaatgataaatatgcttataagacaatgaaaagtagtctcataatcagttttgcattgtcttttggggagtttggctgtaagagaagagagatggaaagaacaaagactttagccatagactgataaaacacaaactcctataatacagaaagaatagactaaaaacaaaacaagaacaaggacatacatttatacttaggtgatataactacaaagatgagagtataagaagtaaaatttgggataaatgccatctttggggaatttgcagaaggattgctaggtgtggatgaggaaagcaatggtgcgataattcactacagatggcttggaggcaagtgcagatgagcaggtaacaggttacagagaggtgggagctgaaagagggcatctggacacaaaatggtgagtgcccttacctgtcatttgtatccccttgacaagtagaaagggaatttgattgcgtggccaagggcccatggtattttgtttgtctaaatgaggattaaacatggactaggctgaaaacctctctttcacatggtggaacacaacagcttgtggggcacagttgagtgaaaagatgaaatatttattctgctttaaagagttgtttggtcattcataatgtctatctaggtaaatatgcaccattggtttctcaatagttgatttcaaatgaaatattttaataactaattcaagaaacgtccttagagtgaatgctcatatatatttgggtttgatgtgtgcatttgagatggaaaagtaatagactgtcatggtcattcatgtcatttctttaaaaatacttttaatcagttccctgtctaggccaagttaaaggacactttgctctttttgtatgattaagcaggtataggcacaaccatgatgtgtttggagaaagctgtataatttgattattttaggcaaggaatgtggagctgtgacagtatttcagaaggcaaaaatgatcacaaagagatagaaagttaattctgcttatgaaagttgcttttttcctcactgtataaaattcattttgggtaaaggccatgggaagtgttactgtggaaactgctactgcaaggctggttggcatggagataaatgtgaattccagtgcgatatcaccccctgggaaagcaagcgaagatgcacgtctccagatggcaaaatctgcagtaacagaggtgtgtcattcatacatgttactacataatggggaggcaaacaaagcttttaattgttaacacttcttttctttgtatttcctctagtgtgggaggaagttatcttctaaccatttactttgatgtaaatcaacatttactatcccaacaatcttttctgtcttgttttttattgagtagaaaagagaaagataagaaagttgctgtcattctttaagcttcactgaataaacagttaacttagggactgtaatttctttggcagccctccagacatagcacagtgcagctaaaaggcaattcctttagatacttctgttaaatgtctcttgactaacagaaccatctacagcatgagcatctaattatccgtagagaattcagaaaaccctcttgtcttaattatgagtatatggaaggcttggttgaaatgcagatttgatatggactaatttaacttccgtgtgcaataataaaaatttgatattgaatacaatagatatacaaagtatgtatccaatagccataggaaatgtacactgactttacaaaggaagttaacaaatatattaatattgctaaactataatttaaaggtagttaactaacttttgatgtaaaatcaaacagtttaaacatagttttaaaattccttgaaaatacttaattttccctttgctgtagtgataaagagagccatactaaagttttcattgcctatccaatggcattaaaaagtgattatacttctttaaaactaaaaaaatctagatagctggaaaactttttttcatttctatacatgaataatgcattgcaataggtaatgctaatacagaaatcgtagcataccacctgtcagaaattgacatagaggagtaaaatgtgccacatttctttacatagagaaaataaataaaaaggcaggaacttggaacaaaatcatgaagtcttcctttgtggggactaaatcttactatatatcatactaatttaccttatggtttctttttattatttattattattatactttaagttctagggtgcattgcacaacgtgcatgtttgttacatatgtatacatgtgccatgttggtgtgctgcacccattaacttatcatttacattaggtatatctcctaatgcttcccctccccactacccccacatcacaacaggccccagtgtgtgatgttctccttcctgtgtccaatgtgttttctgcataagtccttttatgcagtaggggtcacagtcacctttttaagtatatgaagcttgaactctggtactgtggaaaatgactatttggctgtcaaaaagagagaggtggaaaatggaattggttgggctgtggattaaggtcaggttctgcagcagagttacattggctgtgagagacgatgtccttcagaaacataagctaagccacctgcatcccacttcgctgtgcttggagcattctgacctggagctatggcagaggcagaatgggaagcagcttgcctgagcgaggctcacagcttctgagattcaggggtacttgaagacagggcagaagtgggcgctgagatgagtcatttttttttctcaaaagataatactcctgactaccctgaaagcatttctgcatcattgcatccataggtaatagaaacacactggtccctgcacatacctatcttgtcttcctttttccccatcttcaggggccaaaaaaccaatgttgcagacataagcattaatagaacaaatgtcctctattgcccatctgttttattgagtttcatagtggacccctttacacgtggctgagaagctgcttcttcgtcacatctgcatagctcctagtccctgttcctcctgaccaaactcatttatcctattatgagagcaatgcatattcattttttaaaatctagataataaagtagagtacacagaaaaataagaaagtgacccataaacctaacttccaggtgtaacctccttttacattttggtacatgagctttcagtccgtatttatttattaaaattcatttttatggctgccctatccctgtatttccttcttattaaagaaaaaaaatcaaatcatactgcacgtgctgatttgtaattttacagttttatttcatgatatatgttgtttatctttccatatttatggggcaaaaacctaatttattacttagtgattgctaggtagtccatatgtgtgtaccattactgcgctaattccccattgaacaatatttcggtcactagtaatttttcaaaaacataaatacaactatattttatatttctgaacatacacttgtgtgtactttttctttctgttgggtacattaattaaagtgagctataagtctgaataataacacagatataaaaagtacatattgcaaaatcgctacccagaaagttgtaccatttcgtactccccttcagggcaagaaagtacccattgtcccacacctttaccgagtctggatccaacaatattttccacctctgacgatctgacttctaaaataattgccaatcacgattattttgaagatctgccactgctacccacttagtagtggttgattgagtgataaacatttttcatctttatctgtcattatttctgtatgaaatttccttttgttctttccttttgtctatttcactttgggcatattaatcctttatatattcaattctatgatttatttatatgtttttgaaattgttctttgtcttttacagacatattaactacttgtttcagctttgtcagtcttttttttacagtgttttgtttccaaccaaaattttcaatttttatggaaattttcaatttccttttttagtaattgtgctttggggtcttgaataaaaagagtttagttcatattatacagttttattttgtacgtttaaatctttaatccaactggtacttattttgatgtaagaggtaagaaaaggatttaactttatgtctctatcaaatgattagctggttgccctaaagacagttactgataatccacacagagtaaacatgatgtacagctgggcatttccctctgcaaatctgcaaatgaccaagtttatgtctctcaatctgatctccaacattctctataatctgggctcatctgatctagcaaaccttacttcttagtcttttttattttttaacatgcacctcagggtccctatgcccatccctacccttctttgctcagtctttttttcttgactttctcttagttctacctccaatgtctcctagaacatttcctctaatccctatatatccaatccatccactgctaattactccaacactcattgatcctctttctccaaattcttagagcattcatgtcttagtttacaaaatatttgcacattgtttttagtgtttgttaatttttctttctaattagctttctatttgccaaatagattgcaagcttcttgggggaaaggattatatcttatataaattgttttagtgttatctttgaaggaaactaacataatactaatgacacattccaccaactcacataattatagaatagataataacttttgtttattaaggaatctctattatcaatattagatggtgtttttcctttttagaatatttttgtctgaatatatgtgtttttttcaaacacaaagtaaacagaaaataataagcgatatgtgaaatgctttctttcatggtttttcttgactggattcttataaaattcttcttcccacctagggacttgtgtatgtggtgaatgtacctgtcacgatgttgatccgactggggactggggagatattcatggggacacctgtgaatgtgatgagagggactgtagagctgtctatgaccgatattctgatgacttctgttcaggtaagggctcttccaattcctgtttttctggagggggaggtggggcttgttaatgggtaaaaaaaaaaaaaaagcaattagaaagaataaataagacatactgttggatagcacaatagggtgactatagtcaataacttaattgtacatttttaaataatgtaaagagtataattggattgtttgtaacacaaaggataaatgcttggaggggatggataccccattctccatgatgtacttatttcacattgcatgcccgtatcaaaacatcccatgtaccccataaacatatgcatctactatgtacccacaaaaatttaaaaagtaatgaataaaaaataaaaatgcatatttccctgttttcaagatttctgattctcacataccctgtaaaagaaactgaatgtgtattctaaagcatcttatatttgcagtgctcctactggtaacttggaaaacctccagagaattcccaaagttggcaaagactagagatgagagggcacccactcttttaaagttagtctaattcctcacccaggagaaccattagctctagatagctactcagttcaactctgagactacaaaactagcagagctgttgacaatgaacaggatagttatcattagggcacctatattaatgtattacaaaacaggataatacagtgctcagggttattttgtgcattaactctttgataggctttaatgttattctgcaatgtagtctgtaattaaatatcaattagtagattcaaaaatctttgactgtaaatactgtggggcagatactgtctgttagggactgagtgacatctgggctactggtgtagtaggagccagtaggggacaggagacagccatgaactttgacttcatggagtttgcaatctaaatgcaaataaataaaatatgtaagtccaggatgtctaatagtgcaaagaaaaagaaagcagtcagaagtctatctgaaaaggtatcatttagcaaaaatggagttatagattttcagtccagttctatttgataacccataaggtagacacatacacatatacatcttgctaagcttgactgcctcattggtgcatgcagatggatagaaactcctctggtctcctgaaagtttgccagcaaagggagataaaagaactgtcccatttaattatgagtgtgcaacttcaaaggcttctccagactgactggggaaagcctgctgctaaatcttcccattgcagaagggtttccctcttctgataatctcttgtgctccagaggatttcctaaacattttgtgaacactattctcttgagggtatttttttctattattaattatacatgctcatgttcttcattatcattgctgtcaacacagtggtaataaaagagctcatgactagtgagtggcttctgtgttccaaagagatgatgagaatagtggggaagaggcctgttggagattttaattaggatgatgtggctcttcacagtggtggtgatgtagggctcatgaattgcaggaggctattggatcacagtgcatgtgggttttatcctaaaaaaaataggcttgcaggtaaagaaagatgagaggggcattccaagcagaaggaacagagggatagaatctgtgtataggaccagactcagtttgaaattaccagaatgcagaattaaggaagcatgtggtaaaaggtaaagttggttgagaaacaagaactggggggctttttaccttcctgcagacccaggttttattctaaaggcaatgaggagctaatgatggttttaggcaatagagtgctgtcatcaccagatttctagtctgagtgtctgggaaaatgttggtgccatttactgaaatagggaatatggaaggaagctgtcaagtttgtttctagacatctccagcatagagggcaaagggtaagccaaagtttatattttttcccagcctgttgaatatgtgagtcagggtcagggttaaaccaagagaatttcaagttgtaagcatagagttggtggttaaaactatgctggcattcaggaaatgccatttgacaataccattttcttttttgagatggagtctccctctgttgcccaggctggagtgcagtggcatgatctcagctcactgcgagctccacctcccaggttcacaccattctcctgcctcagcctcccgagcagctggggctacaggtgcccaccaccacgcccggcttatttttttgtatttttagtagagaagggtttcactgtgttagccaggatggtctcaatctcctgaccttgtgatccgccagcctcggcctcccaaagtgctgggattacaggtgtgagccacctcccccggcggcaatgtcattttaagattgcttttgagataaacatgatttgacacaatttaaaataagaaaataagggaggcatataaaaggcagtattttaaaattgtaagtgtgtgacttgctgatatggagcccctttttcctatgggtattcactctcttgtgaaatccataattctgatgttgatcctgattttggactggggttgaaaaattcaaactaactacattatagcgataattcagggtcctgtgagccagtccatctcactgtgagggagtggggtcatggggtaaagatgggtgatcactcctgaactgacacttcaatcctcgtgtaagcttgtgtgcaattcccgcagcgtgtcatttagtcttggagtgcttactctaggctgagcaggtgaagtgtcattaaggaggctgcactggaatctaattttccacctcacctattcccctccaacccctcttccctgttttcctttttctcacattttcctttctttcataccctatgagattccacacagtgggtatggacaggtaggggtaggaagaggtgatggcacaattggctgtagtttgaacaagaaaacatcaatctattattgtgattttatgattcgctggttgaagtgaattgaacatggccagctttccacagcttggctcccacacttagaatgaggaattgaggaaagaggaagaaactcatatttacagagactctactctattggacccttgctgagttcttttataaacctcattccattttatgtacacactaactcagagagggaggcattattgtctatagtttagcagaagagaaaatacattcagagaaattaagtaacttgataaagttcacactgccataaaagtgtcatctgaaaacacatatagcctgactactcatgtaacttaatctccaggtgatgcaaatacaattctccagttttactttatttttctgaggaagaactgtcctctgggtactcagatttttttaaaataaaactaagcttctctgaacatcattacaatctggagcagacatcaacctctgcagtatttcatcattcttacagaatctgtagaattctatatactgtatggtattatgcttattagtctttaaatttttcctaattaacagtctaagttgcagtgtaagaagagtgccatatagttgattattgagtatattaatacctttgtgttatgagacagaagtaacccaatgacatcaatattctctagtctttcatgcaagactagaacataataaggctctgatgaaatgaacttttatttttagctcctattcttgccatcctgagagttttggtcttatttaagtccaagggaagtctctggacggattagtttaagttagctcttttaattgacattctcattttattcattcatttccattctctccatttatctgttcaataatgcatttaaatgtaaatattttatgcctaacacatcatgaatatagggaacacaaatatgttgaaacatggtccctgcacccaccaaataaatcaattttatttacttcttttaatcctgtctgttgttcatcatccacaaaatatgtgtgtttgtgtatgttcatttgcccatacaccaacatgactgttatactacacacatacacgcacccctcaaagacaatacggttgacacaatttgagtgtgactgaaatgatcagggcatgaatgggcatcctgacgtgtcccgactgtcctgtttgttacacccaatttactttctgattctaatataactgctttattcctaatggccgcttaccactcaggtctatttacccaaatcccataattggaaaaatacgctgcaatgtgaccttaaactttatcgttcagctttccctgcctaagaaaattatgaaaatatagggaaagttttggcttagagttacattagtttggaaaatggaatattttgatagaaccatattatgtggtgaaatttgtccctgtggattgtcaaagcattaagaaagaaactaaaggaaatgattaagtatatccagaccacattttcttgaaaggaaaaattaatatattgaatttaaaaaaaatagcaagtactacctagatctaagttattccccaaagcttttctctattgatggtcttcatgttactttgtaaacatgttaacagacgattcaaattcacaggcattttttgatcctttaaaaagaaagaagtatcctctaaagcagagaagtgtttgtctggaatagatgcaactgcacttgtgctgaaacacctgcacctgtttctggagtttggatagcataactccaaagaacacaatagttacaaataaacaagaaaaagtttagttaacaccctttcctataatggcctgagaaccttaataattcctgccttcccagcatggcctttggaccactcaatggctgctcttgctgcaaatcttccttttcgtatgggtattttgggctgcagtcatttttatggtaggtagattataccaacaccaagcactgtattcttccattgtgtgtgtgtgtgtgtgcatgtgtgtgtacatacagagagatctttagagagcatttctcttatttgaattcttctgatgttcgatatcaagacaaacagcaccatgccgaatctttcatctctatttcattgatcttctgcctacacagtttaaaggaatactggttagaagtaatgaaactaaaacctgcaggcttaacatacacataaatttgacaaaccagcatggaagcattgcatttcagatccatgtggcaaattgatctttttttagttctgtcatttgaaagataaagcaatttgagataaggcccagaaaagatagtggcacatcagatgaaggacacaagtctcctgatttcttcttttatgaccttttcactatttgtctattaaaaaaaaaaaaaaacctgatgtaatgttatggcagtctaaagggttttcatgctaaatagataccattatctctaaactcttctatatagcaaaacccaacattttcatcttcttgactttatctctaccaaatgattccttctttggcataacttttaaaattggaattgagaaactggtaaattcacaagaaaagttgcaattttgttttataattttctgtcttatctgaaaagcccaatacctgcctgagaatctggtaccaacacctgatatttctaagtgatttttaaactctaccagttaaatatcacaaaggattttgtaggacatgtacagtttcacttaaagtggtatctctaatattctaaaatatattttgacagcacatgactaacttcttgaaatatgtagtatataatttttattactgaaaaagcaaaagttatgtttctgtttcaactctgtcaattaatctgtaataaacatttaaattaggcaataccattgtcgatactatttttattatggtaggctagaattatagaaagtttatccatgcacttttatgcttgcttcttctatgatatacagtaagatatcttgtttagaaaattctactttccccaaacaataaaaccagttctactctccccagacaataaaaccatcaaacactttctgtgccactattttgtcacttaaactggtgaccatacattcgctgactttcaggaacttcattctttatggatggcttatgtatgtcactcatatttaaatacctcttctttccttagcttgaacttgttcaattaatatcaaatcctggtggtaaagcatagaagacatatcagtggatgatttgaggaggaacattggccatcttgaactaaacaatgttctcccactttgatactttcctgtttagggctaaggtcttttatccttcagccaatcacagcaatgatacaatctcttaaattcatcccaatgtgcaagcaattggctgcaggtgtgttattgagaagattattgaggagtcatcacacacatgccaaagtaaggacacatatatattcttcccagctttgcttatagttggcaatgcctggaggtgaagcacgcatttagaagcatgatcctggagaatgttcatgatgttgcattaagtacacaggaaaagaggtgtgggagcttataggctgtattttccccctcatgtttgtagaagagcatcagaaatagcaatgggatataaaaataaagctgcaataatagaattatgttaggggaaaaaggttgagagaattaaaaactgagaaaaataaaatgataagaaaacagaacgtgcctatgggagaataaaggtgaaagaccgccaaagatttcttcctgcaggtctagagcatctgaacttaaaaaacgaaaaattattaaggcttccacagctaatctggcttttgttactaattggataggattccaactttaaaaatctcttttgaataacttctgcctttaggatttgttttattctgccacatgtttttaaagatgtcaacatgtgaatggatttcagataggaaaaaatggttgcttttaaacatggattccgactatgcaacttaagaacgttctcccttcagtcgtgtgtctccctttgtacctgcctttatccccaaggtttctattttattttccctccccagggagggaatcctcctgtggggcacgtcactgcttgtgaattcaggtgggccttagtggcagatgacattctcttgggcagttagggacttcctgggtcccgcatcggctagatgtattgttctaaccttcacagccattaaactttcaagagtggagaaactttttctccctcttcaatctggttttcaatgttattgttaaagtgtcaacaagcaatgttattgttccagtgtcaacaagtctctcgcaaatgtcagcatgttctgtactttgcccagtttcctcacaacagatctgtcgctgaaataaaaccacttgtctccaagaatttcaaagccattggctcctgtgaaacaacagaattgactgtactttaaatgtgaaatatttatgtgttaaaatcattatttatataggcatttccaatgtagatctgtttgcaatgtttgtccttaaccttacatgagggctggaaataaagaaagataggaacttctttgttttgttttttttgagttggaatttccctgtgtcacacaggctggcgtgcagtggcacagtctcggctcactgcaacctccgcctcctgggttcaagcaattctcctgcctagcctcccaagtagctgaaactacaggcatttgccaccatgcccagctaatttttgtatttttagtagagatggggtttcaccatgttggccaggctggtcttgaactcctgaactcaggttatctacctgccttggccttccaaagtgctgggattatgggcgtgagtcaccacgtccgatgggaacttcttaaactgagatgaatgaatggcaaaagccatagaacccaacaacctatgaaatataattgttaataagcataaaccgttacaaaaattcccatactgtaaagtctaatcatattcatatgtcatgtatgtttattaataataacaattttcttttcctttcaactgaggtctagaacagataattatggcaacaatttgtcaaatagactctgttacatagcagatgatcaacaaatgagcatctgaattgaattgaatttgggattaaatgagagatttaaattcagtgatccctaatgtctcattccactttgatttatgattttgtgattttttttttactaaaaattagttaaatggtgaaaagcttctacatatgtgtattgtccagtttcttcaaattcagaagatggaaccgcaaacctcaaggaatattagtaaaatggtctagtctttactggaggccaattttcatattggatgatatacattaatatcagatgctaaagacagcatgcattttcatccattagcatttctatgtacttttaaaaagtgtaattccacttttaaaattcttcatgcatttttgcagcaattatagaaatctactttgttctatatctgcggtgatgagtagcttcatgtttattaggaattatggaaagctcagttgaaactgtgctttcctctacttgcttataatgtgggaactgatgaatacaaaaaccagtagctcctttttatgtagcttttaaactatttaatgtacttccgaagaaatgtggattgataatatattttcttcctttttaaaatgaagaaactgaaactcagatgtggtcatttgaccagccccactctgtaggaagcagaatcaggatttgaacccattattttattgataatgtaggtcgatttttgctaaaccacaccgtttctcacaattctttgcaaactgtatattcatgtgttgaaaaatttaatatcttttctgacttctttggaatacactaggctaatcttcaaggattgtaaactccatgtaggttactggttttactctaagggtctccaggctaaacatgtagtatttgcttaaaaagtgcatgaaaataaagtgtggagactccataagataacattctgcttcggtgaagtaaccaaaacagaaattaagaaaacaattttatctgcggtcgtgtcaaaaataatatacttaggaataaaattaaccaaggatgtgaaagattattgcaccaaaaactgtaaaacattgatgagagaaattgaagacacaaataaatggaaagatatctcatgatcatggatcagaaaaatgaatattgtcaaaatattcacactacctaaggtgatctacagattcgttgcaattcctatcaaaagtcccatgactgacacccaactgattttcaacaaaagtgctaagaacacacattggaaaaaagataatattttcaataaatggtgctggagaaattggatatccatatgcagaagaatgagattaaatcactacttctcatgatatacaaaaatcaactgaaaatgcattaaagtcttaaatgtaaaacccaaagctacaaaattactagaagaaaacataggatagtactttactgtgggcaagaatttttaaaataagacctcaaaagcaaagcaacaaaaacaaatagataaatggaaggacatcaaactgacaagcttttgatcaacaaaggaagcaactaaaagaatgacaaatagacctacataatgggagaaaatagttgcaaactatatatctgacaaaggattaatattaagaatacatagggaacttaacagcaagaaaacaacccaagtaaaaataggcaaaatacattaataaatattgctcaaaagaagacattcagatgtccaacaggtatatgaagatatgatcaagatcactaattgtcagggaaatgcaaatcaactccacagtgagatacctcttcactccagttagaatcggttttattatagaattataataaaaaaagacaaaagaaaacaaatgttggcaagggaggtagagaagagaacactgacacactgtgggtgaaaatgtaaattagtatagtcactatggaaaactgtatggaggttcctccaaaaattaaaaatagagctgtgatatgcatataattcagtaatttcactactagatatatatccaaaagaagtgaaatcaatatgtcaaagatatatctgtacccctttattgcagcactatttacagtagtcaagatatggaatcaacccaagtggccattaacagatgaatggataaaaaattgtggtatatatacacaatggataattctgccataaaaagaaagaaatcctgtcatttgcaacaatatgaatggaactggaggtcatcatgttaggttaaataaggcacagaaagaccttatttcaaaacctaaaaaattggaatctaaaaataaaattgaaatcatagaagcagagagtttaaaatgtggttaccagagacgggaggaggaagatgggaggatagggaaaggttggtctgtggtccaagttacaatcagatagcaggaataagttcaacttctattatacagtaggttgaggacagttaacagtaagatatggcatattataattagaaaataattagataagcttttgaatgcccttaccacaaatgataaatgcataaggtgatcatcatgtgaaataccctaatttgatcataatgcaacctatatatgtatcaaaacatctgattctaccccataaatatgtacatataataatttttaacctctcctagcatttttaatagtaataacaaaaaaatcttaaaattcacatggaaccacaatataccccaaataactaaagcaatcttcagcaagaacaaagctgaaggcaccatagctcttgatttcaaattatattacaaaactatagtaattaaaacagtatggtactaacacaaaaacagacacatagaccagtggaacagaatagacagcatagaaataaacccatacatttatagccaattgactttaaacaaagatgacaagaacacacaatagggaaaagacagtttattcgataaatggtgttgggacaactggatgtccacatgcagaagaaagaaattagagtcttatctcatactgtatataaaaatcaactcaaaatgaattaaagacttatatgtaaaacctgaaattttaaaactactcgaagaaacgtaggagaaaagctccatgccattggtcttagcaatgatttttttttggatataacaccagaacacagacaacaaaaacaaaaataaatgagtgggactgcattgaactaaaacgtttctacagcagcaaaggaaacaacagaaatgaaaaggcaacttctggaatgagagaaaatatttgcaaaccatatatccaataaggggttaatattcaaaatatatgagttctagtccatttttgcattgctacaaagaaatacctgaggctgggtaatttataaagaaaataaatttattttgggccaggcacatggtggctcatgcctgtaatcccagcactttgggaggccgaggtgggcaaatcagttgaggaaaggagttgtagacaagtttgaccaacatggtaaaaccccgtctctactaaaaatacaaaaattagccgggcgtgttgacgcacacctgtagtcccaactactggggagggtaagacatgagaatcacttgaacctgggagttggagattgcagtgaaccgagattgtgccactgcactccagcctgggcaatagagtgagactgtgtctcaaaaaagtaaataaataactaaaaccaaaaaaccaaaaacaggtctattttgactcacatttctgcagtctgtacaggaagcatgccaccagcttctgttcctggtgaggtctcaggaagcttctgatcatggctgaaagtggaggcagagctagtgcatcacatggcgagagagaggaagacagagggaacaaaagaggttgggaggaggcgccacactcttttaaacaatcagatcttacgtgaactaccagagcaggaactccctcatcagcaaaaggacagcattaagccattcattagggatctgcccccatagtcaaaacacctcccaccaggccccatctctagttttggggattgcatttccacgtgagatttggagaggacaaacgttgaaactatatctaactcatacaactcaatagcaaaaaaaatcaaacaaccagattaaaaaaatgggcaaatgacctgaatagacatttttccaaagaagatatgcaaatggccagtgggtatatgaaaaaagtgcttaacatcactaatagggaaatgcaaatcaaaaccacaatgaaatatgacctcacaactgttaggatggctgttatcaaaaagtcaaaagatagatgttggcagggttgtggagaaaaggaaaacttccatgttgttggtgaggatgtaaattgatacagccattatggacgatactatggagtttccttaaaaaatcaaaaagagaattatatgatctaggaatttctggatttatgtataaaggaaattaaatcactatcttgaagagctgtctgcactcccatggtcactgcagcattactcctaataaccaagatatgaaaacaacacaagtgtctgttgtaagatgaatgggtaaagaaaatgtgagatatatatctatatatgtaacatgatgttttgatatgcatatgcataatatgcatatatttacatatgtgtgtgtgtgtatatatatatatctatatatacacaaatacccagtggaatagtattcgtcctttaagaaggaaatcctttcatttgccacaacatggatgaacctggaggacattctgctaagtaaaataagccagacatagacaaaaaaacactgcacgatctcactcatatgtggaatctaaaaacgttgaactcttagaaatagagtagaagggtggttacccagggccaaggggtaggagaaatggggagactttgcatacaaactttcaaagttataagatgaatacgttctggagatctaatgtacagcatggttactatagtttgtaatactgtctacttgcattgtatgaggagagtacatcttagatattcccactgcacatagacacacacacaaagttaactgtgtgaggtgatggatatgtttattatcttggttgtggtaatcatttcacaatgcatatgcatatctaaacatcatgttacatactttaagaatctacaattttttggtcacttatacctcaataaatcttggggaagaaaagagcgacctcttctgaattctagatttcatgctttttgtcagttcatggcccccagtttgaccgtggttgtgagaccttaataaatagcgatccattaaatggttaatttaaaaaaatcctgctctgaataatattccattctttggatataccacagtttatttatccatagaggaatcttagatgcatattaccaactgaaaaaaaaactgaaaggactacatatactgtatgactccaactatataacattaaggaaaaggcaaaattatggaggacagtgaaaagatcaggttgtcagggattggggaaaggtgtgggagagggacggatgactaggcagatcacagagggttttcagggcagtgaaattactgtgtatgagtagtgaattcatgtcactatatgtttactcacactcatacaatgtacactaagagtggaccctaatgtcaactattcactttgggtaatagtgatgtgtcaatgtacgctcatcagttacagcaagtgtacttctctggtgggaattgttgataatggagaaggctatgcacgtgagggagaaggaggtatatggaatatctccgcatctctctcagttttgctgtgcacctaaaactgctctaaaaagaaaacagtcttaaaagaatatgtactctctctgatattgtttgttagcgtgctctataaatgttaattatgtctactgggctgttaatgtcaacttttctatatccatactgattttaatttcactaattgcattaattactgagaaaggagcgtttatatattaaaaagtagtctaaaaagcaaaaaaaaaaaaaaaaaaaaaatcctgcttcaaaaatacagttagtccttccctgtgactgccctccatgcaaattaattgccaaatccaccaaatactcctttccgttttttctttttttgttgttttttttgtttttttgttttttttgagacggagtctccctctgtcgctcaggctggagtgcagtggcatgaacttggcttgctgcaatgtctgcccccctgggttcaagtgactctcctgcctcagccccctaagtagctgggattacaggtgcacgccaccatgcctggctaattttcatatttttagtagagaccggggtttcaccatgttcgtcaggctggtctcaaactcctgacctcgtgatcttccctcctcgccctcccaaagtgctgggattatagacatgagccacagcgcccggcccaaatactcctttaaggccccagcaaaccaatacaatcacatgcacctggaatttgacagcttgaagtttatagccttactaaactgtttatcttatctgttgcttttctctacccctcaagatcaattcatataagtcagttatttaagaatttgagaaaaatgtgcgtttgccttaatatgttatattatgttcatcaagatcctgactcatttgtgacatttgctgttagaatgaaaactaattccaacttcattatctttatgtacatttttattttttgccactctcactgtgaaggtcatggacagtgtaattgcggaagatgtgactgcaaagcaggctggtatgggaagaagtgtgagcacccacagtcctgcacgctgtcagctgaggagagcatcaggaagtgccagggaagctcggatctgccttgctctgggaggggtaagtgaggtctctcagggcttcccacggcctctccatcacaattcaaatgaattcaatgcacacacatctttttgtttgtttgtttgttttttgttttctgctttttggtttttttgttttttatttttttattttattttttattattatattttaagttttagtgtacatgtgcgcaatgtgcaggtttgttacatatgtatacatgtgccatgatgatgtgctgcatgcattaactggtcatttagcattaggtatatctcctaatgctatccctccccgctgcccccaccacacaacagtccccagtgtgtgatgttccccttcctgtgaccatgtgttctcattgttcaattcccacctatgagtgagaatatgccgtgtttggttttttgtccttgcaatagtttgctgagaatgatggtttccagtttcatccatgtccctacaaaggacatgaactcatccttttttatggctgcacagtattccatgctgtatatgtgccatatttccttaatccagtctatcattgttggacatttgagttggttccaagtctttgctattgtgaatagtgccgcaataaacatacgtgtgcatgtgtctttatagcagcatgatttataatcccctgggtatatgcccagtaatgggatggctgagtcaaatggtatttctagttctagatccctgaggaattgtcacaccgacttccacaaaggttgaactagtttacagtcccaccaacagtgtaaaagtgttcctatttctccatatcatctccagcacctgttgtttcctgactttttaatgattgccattctaactggtgtgagatggtatctcattgtggttttgatttgcatttctctgatggccagtgatgatgagcattttttcatgtgtcttttggctgcataaatgtcttcttttgagaagtgtctgttcatatcctttgcccactttttgatggggttgtttgtttttttcttgtaaatttgtttgagttcattgtagattctggatattagccctttctcagatgagtaggttgcaaaaattttctcccattctgtaggttgcctgttcactctgatggtggtttcttttgctgtgcagaagctctttagtttaattagatcccatttgtcaattttgacttttgttgccattgcttttggtgttttagacatgaagtccttgcccatgcctatgtcctgaatggtattgcctaggttttcttctagggtttttatggttttaggtctgacatgtaagtctttaatccatcttgaattaatttttgtataaggtgtaaggaagggatccagtttcagctttctacatatggctagccagttttcccagcaccatttattaaatagggaatcctttccccatttcttctttttgtcaggtttgtcaaagatcaaatagttgtagatatgcggcattatttctgagggctctgttctgttccattgatctatatctctgttttggtaccagtaccatgctgttttggttactgtagccttgtagtatagtttgaagtcaggttgcgtgatgcctccagctttgttcttttggcttaggattgacttggcaatgtgggctcttttttggttccatatgaactttaaagtagttttttccaattctgtgaagaaagtcattggtagattgatggcgatggcattgaatctgtaaagtaccttgggcagtatggccattttcacgatattgattcttcctatccatgagcatggaatgttctttcatttgtttgtatgctcttttatttcattgagcagtggtttgtagttctccttgaagaggtccttcacatcccttgtaagttggattgctaggtattttattctctttgaagcaattgtgaatgggagttcactcatgatttggctctctgtttgtctgttgttggtgtataagaatgcttgtgatttttgcacattgattttgtatcctgagactttgctgaagttgcctatcagcttaaggagattttgggctgagacaatggggttttctagatatacaatcatgtcatctgcaaacagggacaatttgacttcctcttttcctaattgaatgccgtttattcccttctcctgcctgattgccctggccagaacttccaacactatgttgaataggagtggtgagagagggcatccctgtcttgtgccagttttcaaagggaatgcttccagtttttgtccattcagtatgatattggctgtgggtttgtcatagatagctcttattattttgagatacatcccatcaatacctaatttattgagagtttttagcatgaagggttgttgaattttgtcaaaggccttttctgcatgtattgagataatcatgtgatttttgtctttggttctgtttatatgctggattacagttattgatttgcatatgttgtaccagccttgcatcccagggatgaagcccacttgatcatagtggataagctttttgatgtgttgctggtttcggtttgccagtatttgattgaggatttttgcattgatgttcatcagggatattggtctaaaattctctttttttgttgtgtctctgccaggctttggtatcaggatgatgctgacctcataaaatgagttagggaggattccctctttttctattgattggaatagtttcagaaggaatggtaccagctcctccttgtacctctggtagaattcggctgtgaatccatctagtcgtggactgtgtttggttggtaagctattattgcctcaatttcagagcctgttattggtctattcagagattcaacttcttcctggtttagtcttgggagagtgtatgtgttgaggaaatttatccatttcttctagattttctagtttatttgcgtagaggtgtttatagtattctctgatggtagtttgtatttctgtgggattggtggtgatatcccctttgtcattttttattgagtctatttgattcttctctcttttcttctttattagtcttgctaccggtctatcaattttgttgaacttttcaaaaaaccagctcctggattcattgattttttgaagggttttttgtgtctctatttccttcagttctgctctgatcttagttatttcctgctttctgctagcttttgagtgtgtttgctcttgcttctctagttcttttaattgtgatgttaggttgtcaattttagatctttcctgctttctcttgtgggcatttagtgctataaatttccctctacacactgctttgaatgtgtcccagagattctggtatgttgtgtctttgttctcattggtttcaaagaacatctttatttcttccttcatttcgttatgtacccagtattcattcaggagcaggttgttctgtttccatgtagttgagtggttttgagtgagtttcttaatcctgagttctagtttgattgcactgtggtctgagagacagtttgatataatttctgttcttttacatttgctgaggagtgctttacttccaagtatgtggtcaattttggaataggtgtggtctggaatgcacacacatcttaatttaaaaaacagctgagatccctgaatgaggggctattagtctttttagaactaataataaatccaatttccatgaatgaaagtacatggagaaatatgattctctttctctctttatatatatcttttgcacacagacactctcactcactgtcagcctactttagccttaaggtatgttcaatttcagttcagttcagttcaatgttacattaaaaaacacagtttagacgtttgcttaaagttttctgaatgagaccatctaattgtccactgacatttatgaaacccagtaacattattttgaggacagtgttggcttttgaaaattcattgtataaacaaatagctatgaataagcttttgtcatttgagaaggaaggcatgtagcctcaggtgtgttcttggtatcagatcagtacaaattggagaaggacaaattcatctagaagaacacgtgttccattcctcttgatttatcaaaataagaaatgcaatttcacttcccacatgagaataacaaagttaatatgaaatatgcttttgaagaagtcgtaattgacattattaccaattttgttcaagaaaggaaacaaagactttcttcacttgaacattagatcagaaatttaattttatgttgcgtttttcttttttaaaaaatatatgttaatagagatataattcacataccacaaaattcacataccactcagtattttgatatattaacataattatgcagccatcaccactgtccaattccaaaaaaaaagtttatcatcataaaataccctgttaccctatagcagccactccccattctcttgtcccagaacccctggaaaccaccaatctactttgtctctatggacttgtctattctgagtattccatacaaatggaatcataaaatatgtgatcttctcgcatctggcttttttcacttagcataagtgtttgcaaggtttatcaaagttgtagcatatgtcagtccttcattgctttttatggctgaataatatcctgttgtatggatacaccaccgttatttaacccttcatcagttaatgggcatttggacataggatttctactttttggtcgttatgaataatgctgctacaaacattcctgtgcgactttttgggtggacatgtcttttaatttctttggggtctgtatctgtgagtggaattgctgggtcatagagtgactctgttttaccttttgaggtagcacaggaccgtcttcaaaatgacagtaccattttacattccaccagcagcgtgtggagtttccagtttgtccacatccttgccatttcttggtattgtctgtctttttgattctttagagtattctttataaagaaaactccagaaagtgtctcaggttgtttgcagcacagatattttctcatatccattattttcccctaagggttgtaagtagaagagtggaggagtaggatatgggtataataatctttttaatgtcaaaagtatttttgactagccctgtatttcaccagtaaccccagacaggaaccattgttctatctgcattggaatattgtcattatagtgctgcataagccatcatgcttttaaagtaacaaagattaaaattcatatccctcagactgcttagttaccaacacttgtaatctacagcaaaaaataattttacattattattttacatttacacaaagctttatctgttgggcccagacatgtaaaaaaaatgaccataggaaggctaaccactgtctcttttttaaaaaaaatgtgtgtgtattttcaaaaatgtattataatcctagggacaattccatttcaaattaaaaaccttgggaagtaaagaaaatgacttcatctcaaaaatagatttttgatcttgaggatactttttcagttacatttaagttagagaactttaggtacagtgatttttactgttatcttaaagtggtaaacaaagcaaagggtgatctgatatcttaaaacattatttaaagggtttacatttggtaaaattatttaaactccaaatggttatgttgctagtagaagtaaacagaacagaaaccaatagggatatgcacttatattttaaaacaaagaaatgaacaaaatgtatacttttaacaaatgcttttatattttgaagttaaaaatgtcaaaccatataatagaaagataagaaaagcatacaaaatagctctcaaacagagaaaatcactgtaagtatatacttatagcaatggtttttcatttgtctctaaattttttaatatgtagaacaagtaaaatgaaattattggggacttaatatattgatcttttataaactccactaggtttttcctcaaacatgcatgtttcctgtctttctggagattcactaacttatttagctaccattttttaagcaatagagtatgtttaaactttattttattaaaaaggtgttgagtaaatgtatagaattatgatttttaaaattgtttataattcatttcagcctcttgaagtactttaaaactaaataagcttcatcagtttccttacatgagcaaagtaattttgcagggaatcatgacagtatgtaagatttttgaaaacgaaaaccaagaatttatgacagccagttgagtgcctttggtcaaggtcacggaccctttctttctcatagtgctacatctgcaaacacattggtactggatgttttgaagcaaatgaccagtatgaaaacttgtaaagagttcgttttgcaatttatgaatgaaaactgcagctgtggttacatgagttaggaaagcaattataagacccatcagtttctcaatcctgacagccgccatcacctcaccagctggaaaaaaaaatcctagaagaatatactgaagtttgtcagggaccaggtgaaggcaatatatatatatatatatatatatatatatatatatatatatacacacacacacacatatatatgtgcatatatgtgtgtatatatacgcatgtatatatgtgtacatgtgtatatgtatatatacatatatgcgtacatgtgtatatgtatatatacatatatgcgtatatgtgtatatgtatatatacatatacgcatatatgtgtatatgtgtatatgtgtatatacatatatgcgtatatgtgtatatgtgtatatatgtatatgtgtaaatatacatgtgtatatgtgtatatatacatatgtgtgtgtatatgcgtatatatgcacatatagacataggcatgtgtgtatatgcgtatatatacacatatagacataggcatgtgtgtatatgcgtatatatacacatatagacataggcatgtgtgtatatgcgtatatatacacatatataggcatgtatatatgcatatgcgtatatatatatacacatatctagacatgtatgtgtgcatatgcgtatatatacacatatatgggcatgtatgtgtgtatatgcgtatatatacacatatatagacatgtatatgcgtatatatacacatatatagacatatgtatatgcgtatatatacacatatatagacatgtatatgcgtatacacatatagacatatgtatatgcgtatatatacacgtatttagacatatgtatatgcgtatatatacacgtatttagacacgtacgtgtgtatatgcgtatatatatacacgtatgtagacatgtatgtgtgtatgcgtatgcacgtatgtagacatgtatgtgtttatgcgtatacacgtatgtagacttatgtatgtgcgtatatgcgtgtacacgtatgtagacatatgtatgtgcgtatatgtgtgtacacgtgtgtaggcatatgtatgtgcgtatatgtactcgtgtgtagacatgtatgtgcatatgtgtatatatatgcatatacatatgtatgtgtgtatatgtgtatatatacacatatatagacatgtatgcgtgcatgtgtatatgtacacatatatagacatatgtatgcgtgtatgtgtatatatacacatatacacatatatatgcatatatgtgtatatatatgtgtatatatacacatatatatgtatatatgttatatagcatatatatgatataaggctatccttgtatatatatgtgatatatatatatgctatatatatatatatgctctctctctctctatatatatatatagccttcacgtggtccctgatatacttcagtatattctattaggatttttatatatatatatatatagccttatatcatatatatatgatatatgtatcagaaattaagttaaatttctaatttcttatttctgctggtggtgactaagtgtgatcattatgtcttgaaggtagaataacttagatgatgtcttacattctgtatcctgtgattccttgatttctataccatattggctgtagatatattttcatgtaactagatgtagctcatatagccattataggtataaagacattcgtcctaatttcggttcctgggagtaaaggtgggaaaacactttctctagtctcctagtgttgtgctcaaaaactataatggcttatggtaggctaaacgttagttttacattcttcctgattaaagaatacatcattattattatcgatgttctcctgagcatcagtttgactttggtttaaaaaaatgtgagtaaagttaatttgcatcacatctgagcagaagctataagaagcagtgaaaaatctgccattgtctcaggcaggaggatttgcagtgctggagatcgtctctgacccattagcttggctctctgaatgaggatgggcaggagaaacctctattaatccaccaaggttctatgatgtgaatgagaaagaaacacctgttgttttaaacaagtgagattttggagggaggtgttcttgcaggagaatccctgactgataatcggttccccatataaaatgtagggaatgtggttaagccaagataaacaaacacagcaaaaatcatgtttacataatttatattttgtattatatacataatttataaatgccataatttatattcttgtagcaggattcatgtacaaatctcttagtattgattcttggatatggaatacataggtctaaaaaaaccatgcatatattttataaatgatgtgtttatgctcttctgtcaacagcatttatgtgcactttgtcaacaggtaaaatgataagaacattgaatacatttttaaaaatttcctaaaaacacaatgaggtaggaagacgtataattattattctttttacagaagaagaaattagatatctgaacagtttgccattttacataattgcaatggtgcaagtttaaaaaaaattaatacatgttctctgactccaaggttgttgttttggataacttacaggttcttgttacatgccaatttattggacaatatatattaaacatatttcctgttacaaatataattctgcagaataattgaaatggctgcataatattccattatatagttgtagcaaaataattcaatcaatcctctttttattagatatctatatgttcttttattcaagttctaaatgccataatttatattcttgcagcaggattcatgtacaaatctcttagtattaattcttggatatggaatacataggtttaaatgaaaaaaaataagttaaatattttgaagaaaaaagtccaatttataatctctaaaataaattatacaggtgtgctctcctgccgggggcttaagaaaagtcttcttcccccaccactagtgacaatttaaattatcagttagctcttctcaatgtatattgctgttggtgttacaaacttttgccatttatcaaacttctttcattgacttctataatcatcaaaacgaatgatttatctgcaggcattattattcagaggcttgtgttttcagtatttgccttctttgatcatcgtttgtccttgtgtctaagtcatcctttcatttgatactgcaatcccatgtgcttttcttatctgtcctgtttgccctttggttttcttttatcagacttgttctatgcggtattgcatatgttttagttccttaaacacataaccatacacccccataagggaaggtgtgaaatgggggaagaatgatagatggaggctaattatttaatattgtaacttctagaaaatagaaaccatgtcctcatttttatcaattagcatgctttaattaatgaattaagaattgtttcaattcccttacctaggaacatactttcaaagaatagtagcatgccaaattctcaccatctggatatttttcaatgaagtcacaatttatctttcctttttattgggaaagcccatctttaatttcctgttttatttttcagagaagttttcatgatacatgctttctttcctttttttttttctttttgacctgtgtgttttttactctatgtaattttggacagctgaatcattacctttcttattcatgtttacagagagtttatttatttggaacaaagagaaagtttaaaaatttggaagttctccaaacattttcagttaagcagcataccatatacagtgattatgattatattttaaaatcctttgtggcttaactaaccatcttatcataagtttgctgctgcaggaaatgtgctgagtgtttaggtaacaagggaacccccaatgtgttcttccagtagtactttgagaaagcaagtgggattcagatttaccctattctgtgctttctgctagattgattcattatttctgccagtgctagaggaccctggaatagtcatgaactgagttatgccatttgaaacctagtttttataaactatagccaaagatgataaataaatgaccctgcaaaattaacttatttactatttcttatccaagaggaatggtcctgcttttagtgtgcatcaaatagggagaaatataaatgaattggtgagttttttcagaaggaaaggcctggactttgtcatgttatggacattaaatgacaagaataagcctgcataccaccagggagtcttccatgcacctttgatcatgctttgaactgacaatgcccactattatgggttgtatatgctctattaccatgcaatagcccataatagtaatattatatgtagaaatagaagagcctgtttatcatttgctttctttatactcattatgatatcttaaactgtatatgcatcatacatttcagaacatgtcgggaatgtaattgttatttattatgaggttattaaggatagtactgatatgagaagactgagatggagggagaattaaatagggtgcttctggtatcctttatctatctttatgatgcacttggatttctgtgttgggacattgtgtattctcatagagatagccaaaggtgcaggtgctcagaatagtcatctacttgaaggtcctagttaaatccagtattaaatctctcagtcatatgatgaagcagcatttactaagctaatgacataatctgcatatgtgaaaagaaattattaaagggaatggaaaagagccttgttaaatagaagagacgatctcattcaggttgatttttcagagattcccctttgcagtaggtatttatgttccttatttctcctcttgtgtttgatcttgcctttcatcttgctattgttatattcaacagaacagagagaaaagaagaatccagaagctgaatttaatacttttgtttatttttaagagatggtagaaaataattcagtggaaaataataaacataatatattttaattaactgaggtttttctaactaatagtccagaaaactgtattactaccaagtaagagagagtatttttttcctgttctaaataaacaatctttatctatggcaacagaacagtttgtatcaaagataggaattgatccaaataaatagacaagtttcattacattttgcattatttttatgttgtaagttgaaaaccagtgaaattctttggctaagataacttcctagtaaagactgcaaccagtattgtcaaaatgtatttgaaatgaaaatagaaaattggacttgaatttaattccaatttctccaggcaagcttaaaataaatgtgacagttatgaaaattttgttactatgattatatatttatttctattaaaatactaaaattatagtgcagattgtagtggagagctttagcagttatttacctgatttcattcaatataaacaggcaaaccagatacttttatgggaaacaatttgctctggttatcagccataatcttcatagaatcagcctcaacagatgttctttctaatagaaaaccaatgaggcacagtgttatccctttgtgtagcctgtagagtcacatagctgatcagaacctgcgatgcccctcttaggatacacaaaacttaatagggctggtcattgtgctatagttgcaaaacgaatgcagatactctacactcacagcatacagacaacatgtacatcatattttcataaacgatgttgcttatcataatcaatctaatatttattgatcttaccaccatgtatctctgggctaagctagtggtcagaaaactagggttaggcctacattctctttttgtaaataaagttttattagatcattgccatgctcatttgtttacgtatagctactttcttgctgtaatggcaaagttgagtagtggccacagagagcacagggcccacaaagcctgaaatatttctcatgcagccccttacagaaaaaacctgctacccctgagctaagcatttgtgataattgtgacaaatatgtcgggagaagggattgagtgtcttgagaatcagaggaagatgacatttgctcaatttgtgtgcaaatatggcttcatgaaatgagtgaacctagtgggtatctgcagagatgagtagtagcattaggcagataataatttagaacaaaaataaaaggacatcccaggtaggaggaagagcagggacagaaactctgagttatgatgggaataatgtgtaaagaacaggaagcatactcacttgtgatgatttagaaaaaataagaaaatggtgggagacagcctggggggaaatatgtctctccctcccacctaacttcttcttgtgtgattgacaggtttcagacagaaaaatccacttctttgcagagctctctatgtcataattgtcttatgaggttaattgttagtaaaatgatgtcatagaaatgccaagttaacgttgcttcatgcccatccattgggtcattgctaaaatgccaagttttatttaactgaatttagcgagattcaagtttttccatgaacaagacaaatactttaacatcctttcatgtgcccttctgcacctcgtatcatgtttacttaactactgacagaagatgagaaaacaagcacaaatccaaaattgttttattcgaaggcatttatatcagcaaagtattaaaatgacaactgtcagcagtcagatttgtattttgagaatgagattactattatctagatattgggtatgtatatagatgcctacatgtttaaaatgggaaagggtcacgttgcacagttagttgaacagtaagctactgggatagaggtgggcagaccctgagttagtctgggttcagtcactagccagctgtgtgacccagcaagtcatacactgaactggcagcagaacccttctcggtgaccttgaacttagctccataagcttgcattgcctccctttaacctctctttgcaataagtgaatttgacactgtgttctgactcatccggacccctagattttatatctactcaaatggacaccatgcctgtcatttctgacataccttcatagcagactttgtgtctggttttgcaaagctaactagacagactaagatctgactaactacgtctcatgagaatcatgtgactaacccatcgttctttcagactctgctttctaccaagagtctgcttgggattcaaactaatatattcttcagttatggcattctttcctttggaatataacaatttaagatggatgagattttggttctccataaatatttatttttcatgtgttgcctactatttggataaaggcaaaaaggcaagattctttggcttcctatttaagtttataaataattttggcctctttgatgctcaaaatattcatgccatgtggatgttggtaaataataccaaatggcctggcatggtacagttgtaagctgcttaagatttggatggtctctagggtgaaacagcaaatattttgaggtcatgtataaagtcctttataaagatgtgaactcttttgccaagatttctttgcagagccctgtattgtataatagttaaccaaaggaagttaaaaggaatgtgaaaaacataagaaaatatggagtatgtagtgcctggtaaagtctctcctactgcttcctttaatttgctggaagtctgggtatggttaatgatactgttgaattacagttgcaatggtgagagagaattgtaaaactcaccctcttgagtgtagcttaatgtaattataaaaaaaaaggtggtagcaaaatccaagtgacataatttatgcttgagtctagatatattctggataactctacatagagaggaaaacccagagggattgcagtttttaggttaggcttcttagtaaataagattttggatgtgttaggaggcctggagtcttgtgaccacacaagggtatgacagggtgagcacagggcgacactattcacccctgctcatctattcatcagtgatactctcctcttcactggcaaggtccctggaaacactattaacaggcatcagtttcttgttcgggtagaaagacacacatgctgccaacaccgtgccttccctcagcgtccgtagcttatcaaaacagccaggctccaactgtgagggcgtgtgctctgagggggcagggatggaagagatggccacgtggctgcatgacaccctcatagagctgatgtctcacaccacttattattaatgtgactttgtagagttttgtatttttaaaaaaactttttggacccttaactttgttatctataaaaatggcattagaacaattgctgtttactctgaaatgttgttgtgagagacccttgaaacagtatatatgaaacttctttgttaactttaatatacaattttacgggcttacaaggttttaagtagatggcataaaaatgacctccagggcatacgatttaatagagaaaacaaggtcaacgttcattcattcattcattcattcacccagtcaacatatatttaccagggtcctcctgtgttcccagaaccactctcagtgctgagaaaaaatagacaaggcaacggatgtcatagagtttgggaaaataagttaaaccagaaaacaaataatttcagatactcctatgagaagggaaatcaagagaatataagagagtggccaagatgaagtctgggggctgctgtaagtacggagggcagggaccctctcccaggaagtcatatttggccagattggagtattgaaagtgggccacatgacaactcagggaagatggcagaggaaacaggaaaacaatttcagactcaagggataaagttttctggaaggagatgtaagtcaggtgggcttcatcctttaaaaaaatcatggaggagatgagggcacttggagagcttgcagaagtatttttaaaataccagtgctgagttcccacccgacttgatttgtctgcaatatggcctgggcgtccgggattttaaaagctccctgggtgactctgctgagcagccacatgaagactcaccactctgcagggttgtataacaggcacggtcctgcagcaggaggatggacactttagtttttgccctacttcccactgagcaaacagggctttagggagtgcttaaaagttgcacaaaacttattgctctgtggtgtcctttcccaaagctttgttgaatagggataggagggaaaggaatgagtcagggacaagaggggtgggtgggtcgggtaggggtgtagagagaaatacagagaggagatcttgaacaatgaaccaccttaggcacgtttgaataccggcagcatacaggacaatgattatttgttctatatgaaagataattggctgaatagatagaattgtcaaagagtccagaaaaggggctttgtcagaaatgcattttgggttttcgccatagataatttctgctttgaaaaataatatggaggaatgtatttagccactctttttcctagaatagccatggtgatatttaataataaaatattatttagttctgttaccacaacagtactaattgttttccatgttgtcttttttcccatgcatattttcttatgtgttgaggagaggcattcctcaggattatattttccttgttaatgaaactaagaattttgtggatgagtctgtgtaggtgcagtttgagcacattttccattattaaatcaaagaactgaccagcgaatccatatcagctccctacaatctgttcccagcccagccttcctgcttggtccgctgctaagctggctccttgtctgctttgtccccaggtttttgtttgggctttcgcagctacggtgagaggcgacacttctgagaagtgaggcgcatgctcaggggagcaatgagccaaggcgagtttagcagtaaaaccattgcatgttgtccagagagaggctcctcaggaccaatgctgggagatagcccagagagagttaggctgtcctcagatgctccccagaaacccttcatttgcatagtgcttcttttgaagagcccgattttgaaacaccacttctgtcttagctgcaggtgaccccttgtgatccacattggaggtataccccaaccctgccctcaggttagattcctagggctgcaaaaacaaatgaccacatatttgatggctgaaaacaacagaaatttattcccacagctctggagatcagaaatttgaaattgaaaaatgtcaggatccctcccaaggatctaggagagaatccttccttgctgtttctaacttgtggcttttggcgttccttggcttgtgactgcatcactccctgctctgcctctctcttcacatggctatcttacctgcctctctgtgtgtccaagctcccttctcctttctcccataagcacaatagtcttcggacttagggcccaccctaaatccaggatgattcagctctagtctttaattatatctgcaaagaccctatttccaaatgaggtgacaccctggggtcctaggtggacatgaattttgaggaacactattcaactgattataccctcttaggggaaatcaagcccgcttctaccagagatatttattcagaaaataaatgtcttatccaccatatactactttatttgctgatttgtgcacattactttggcctgaatgtttgtgcccttcttaaaaattacatgttgaaacctagccccaaagttgatgatattagaaggtggggtctttgggaggtgattaggtcatgagggtggagtcctcatgaaagggaatggtgctcttacaaaagagaccccagagtgtggtagtacatgcctgtagtcccagctactcaggaggctaaggtgggaggatttcttgagcccaagagtttgaagctgcagtgagccatgatggcaccactgcaattcagccgggaagacagagaccatgtctctaaaagtaattataataataataaaataataaataaataacaaaagagaccccagaaagctagcttgacaattccaccatgtgaggacacagtgagaaggtgccatctatgtgtaggaagcaggctctcgctagacactgcatcttccggtggcttgatcttggacttcccagactccagagctgcaaagcatagatatctgttgtttatgagctactcatctatggtatattttatagcagctcaaatggactaagacaagtatcaaagttcaattagatacagcgtaaaaaagaaagagaaaaacataaatcattgcagtagaatgtagtaaatgctctgacggagatatttgaggtgctctctaccagcaaaattaagagggtgagggaggtcttgaatggtcagaagtttgctcctggagaaagggggaagaatatgtccaagacaggaaatcccatcacgaagcacagaaagatgaaaggatatgataagttcaggtaattgtttcatccagcttatgtatatccaaggtaggatgggagtctttatttgtaagtagatctccagtgtgaatatgaagtattttggcttaaattctgggggtataaatctgtttcataaaactttccttctgtggtataagttgctcagaactctgagatcggctttctgccttcatagctagttttctttctttttctttttataattgtttattttttttaaatggagtctcactgttgcccaggctggagtgcagtggcgctatctcagctcactccagcctccgcctcccaggttgaagcgattctcctgcctcagtctcctaagtagctaggattacaggcatgcaccaccatgcccggctaatttttgtatttttagtagagatggggtttcaccacattggccaggctgttctcaaactcctgacttcaagcgatctacccacctcgacctcccaaagtgctgggattacaggtgtgagccgctgcaggcagccgatagctagttttctgagaggtactctctgatgtgcttccttggccagaataatctgcattgtaatgagggagttggggaatcccatatccagggactcttagcctggaattcatgcaaccccagaggatggttaggtatcagacaatgagaacaccttaaaatggcacaaatatattgtgtttaccttttaatatttttgtgcagaaggagtccatagcttctttggctagattataaaagggctccataatatcaacaaaggtggcagtgatttagacatctctgcataaaatcaaacaaagacttttagctgtcacaatatattattttgagctacatatgctttaactaggtactgtattgtttactaagtaaattagtaaattattcaaaaggtagtcaaacatagaagtaccttgtgatatccagttttatttatagtttttgattctgcttttaaaaaattggaataaaaaggtagaccaagccccaaattattttactataagtcataagaatttgtcactgaagtttcttttaaggataattggtaacaagcagaagttcaagcagagaaaagaattcctctcctgttttactctcagaagacagtgatctttgttctataattccttaggttttagtgtgtatccatgagaaggatctctattctgattaatgtggaagcactggatgctcatatgagtacaacctggcatcctagaaataataggaatacagaaacaagaagagaaataattttaatttctatgctaatcaagtttcatttgaaagtcttttaagcagactcatctcattatataaaaatacagtcttttattaaaactatagaaatttaataaaaaatataattgatgttttgcatttcctacatgactctaacctaatatttagccagtttatagactggctaaatcaaccttcagccgtattattactgttttaactttggctagtgaatatccatatgaatcttgtgaatgtgtgggatatggctaaattgtcaaagacaatttcagtgtggcagagcacccagaacctgaggagacagtagtgaagaagtattaatggatcatgaagcagtagtaacagtggtttgttgatattgaatgatccagggcctacctcctgggcttagaacaatttttttcactatatattcatgtacttaatcattcactcaatgtgattagttacattggcaatataaggtaactagagaatcttcctagtattcactttagtgaaataatttgggttgctgctatttacctcttacatatgctgcttatagattctggttgaatccacggactttgtttctatgctattaactagctacatggggggaaattatgtttagtgagaatatttgctattatttgttcaacataggcaatagattaggaaagtgttaaagaagacatggttgatgcctactatagatcaaagacttagcaacaaaaagctatggtgttgctggtaccagatcacactttgcagcaatctccagtttgggacatataaagagttgttcttcgttttctatgtcctgaaagaattctagcttcctttattacgttttaaaatcctttgtcattagttatagtgctgagcatataagaaaactatacagcatctattttaattaaaagaccttagatgaaagtggcagaatcccaattcaaacaaccagaaacaaataaatgatttatgtgctcacaaaccaaaaaggacaggggtacagatgacctttgggaagaatggtaaagggacttagacaacctcccacagactctctcactctttcactttctgtatcacacctacacccgtgtacatacgcatgcacatgggttgacgcaacagcctccaacacacacgtttctgcttttatcagccctttaatctgaatcttgtctactgcagatggatttttctccatacaggaggaacatggattttagcatcgtctaaggttatagttttactatgctctgaccaagaaagattaaaggcttttccttagcagtttaagggagaaaaaaaatattcagggggaaaactcagattgactttgcttggatgaaatggtcaggtttgaaccaatcactgatgatagagggatggtagcgttctaaatttgggtcaccactgggggcaggtgggaattggggcaacgagatgtgagactgtaagactttaaggagtccttctgagcagaccacagttttcactagatacaactgcattcaggttgatattgatcttgagtatcattgattacgtgtacagccttcttaatgtaacaaagatgatacatagcttattttcagacttataaccaaatgacagcacaacaggacaaaataattcattgatgattgtggtaggtagaatactgcccccatcaaagacacccctgtaatcccttgaatctgtgaatatgttagattacatggcaaaagggacttatgattgctaatcaaaagattatactagatcatctgggtgtgcccaatacaatcacaagggcccttacaagtggacatgggaaagaaagagtcagaatcaagtgattcaacatgagaaggactcaacctaccactactgcctttgaagatggagaaaggggaccaagagccaaagaatgcagcctgtctctaaaagcttgaaaaggccaggaaagagatcctaaagcctccagaaggaatgtagtcttgacgacaccttgatttgagcccagccaaaccattttagacttctgatctccagaactgtaagacaataaatgtgtattgtttttaggcataaagtttgtggtaatttgttattgtaggaccaggaaatgaatacagtgatctttggacatattctttggcatagtcaacagaatatacatcagaagctgtttctgaattatgtattcccatgtattttgaaaagcttttttacaaaaaatctgaaaaagaattatgtataaaagattatttcctttactgagagtatctcaactataggcataaacatagattagttgagatatgattttcttcttggcttttttcttgctttgtcttaaaatgaaaccagtcctcttataactttttccaaagcacaactttatagcttactcgttgcacctatttgaagtcttacaatttattccatgttgtaatataatcttggtatattgtttttaatgattacacattaacatattttaaccaagcataatatgcattatattccgtcgtttaatcaatttttctatttaaatggcccatgaacataattacaatattttaatattatggcctaaattgttttactatttttacattgtaattctacattgcaatttgggatgcatgtctttgtctaacgtagataagtagattcacattttgcagggtttacattttgggagtcctttttaataaaatgaattcaaaatcaaaagtacaaagttagttaaggtgaatactaacttaggatgaaaaggcaatcagcacaaattacatttttatatcagacagataccataaacctcacaaatctagaatatgatgtaattataattttacacatctgttgtaagtggctctgtatatttcaaaacttgttcattctcaacttcttaaatgtgggctgagcattataggatgcatacaattttattatttgatctctcgtcttaaattgtcatgacccaagagggctacagcagtatttctagaaggcatttctataccctgaaaagccacagaagtgatggtaccccactaatagcaaaatgaatgtgtcctcaacccaccttctctttggctgaatctcagaagtacctggagtctttccagagccactggacatgagaggaaatgtggatgagtcaaagttagaatagaaggagagtcagtcatcttacttcactcaaaatttcttattttggaaaaatttaaaacacgtatgtcatctattgtcatggtccttctcagtgccagagactcccaccagtgaggaaatctaaagaatagttgctgttagttccatggtaaatgtgcctgtctctttgatgattgatactgaacaactgcacctggggctgtacccaaagtggagaacagtgagtttctgtgtcgtgactgtcattgaccttccacctttcctctccaaaagaataagaagcaaatcaattgtgaagatggagcaggtgctgtgattcagcctttctttatatcaccagacaaggtgaagccttcctgggtttatcatggtctcccaaaggactgttgacacctttgtacctacgcagctttctgctgcttgatgctaatatcatacacgttcttctgaaatattaacaggaaaatatctgtttgaataaatagctttgtacaagtgtatgtctccatcccaggcatccttccactccctgggtgtgtatggaattagaaacatgtaccacttcatcagctttcaaacacattttttaaaatctggaagtgtatagcctggggcctcagtgtttctatttctgtttatttgtcatacagagtgttgcttctcacctgaaccccttgcagacattccagcaaaatgaaaacatgaccttgagccttagtttcacagtccatgaaaagctcaacttttattatagaaattcagggttagagcccttcttttttttctcccacttaaaaagggataaagaaactaacccacccagattgctgctaagcctaacatgagctttgcatagccattgaaaaaggttcccacactctagaatttttattccaccttttaaaatgctcttgtccatctcttctgaagactttggagacaggagatttttcagtcttaatgcattgaaatgaagataatacaaaaagaaagctttttcaaaatttttagtctcaaaaagtcttctcttgggaaaaggcagacctttatcttagtcaaaagggaatgagactgttggcaatgacaaattaaagtttgaggggataattgaaataaggaaatggaaaagtatggctgattatccccaaagcctggatcagacaaggaaataagccagaggcagcatagatttgagtgaagatgtgcaccctcaggtcaagagctgaggctggttgggagcaaagaaaaataatagaaagaaagaaatgggaggaaatgttttaatacatttaagatagtggaatataaataagcaggcaggggtttctatttctatttattgtgtttcctttgcctgcacagagtgttgattgacttcacctttctccgtatccagaaatccatctatgtgattaaacttttgttcttaaacaaggcttctaatattagatggaagatttaatgaataatagtagttaacattaagtgagtacttatagagttctaggcactgttctaaatgtttgacttatgtcatttaataatctcatcaacctcatgatgatggtagtatcatgattatccctacacagctagtaataacaccagcgtctctgtctatataaatttaatcattcctatttccatcaataccaattcagtctaggttcttgcttttgcccttctctctgtctagaataaccactgacaccttgtaagcctgaaaaaaatgcaacctcacatgtagctgtgatcacattttcctccatattccagctaaaccggtgcgcacttttagttttgtatttgccgtttactataattatttgttggtgttggtctctctgactccatgagtagtgttgattttctttgtatttctaaaacctagaatctagcaaacatttgactgaataaagaataatgattgactgtgaaacaaatgactacatgagcgcacagatggatccagtgtttttttcttttaaataaatgatcatgtaccagtaattacagaactggttctaaacatggattcttatgtagttagagatccatgaatagaaaatctttatttaatttaatacgaggcctctagcctagtattcagttagttctaggttccccagcactgatctggaagggaaaagaaaattgaatctgaaatgaggctgggatgtgtgtgtggggtatgtatgtgtgtgtgtgtgtgtgtgtgtgtgtgttttcctgtagttgtgacttaatatcaaagacaattgcagataatatgagaacttttcattatttatgcttgttttctctaattgagattagattatattttgcagataaacaatttgaattcgttaataacgtgatttttgaaaatcactgacgcttgttaatgttaactaggataaatattattctctatttaaattgtgtgttttgatctttccctttaaaaataatttactacaaattttaaaatattaaatattaatatgataatgcaatccgaggtttataatttagcttgatcccatgacagagtaagctaatgttaactatataatcaacaacttgtaaaaaatgttcagagattacctcttaaggcccacagtaataaaactatctacacttttctctaaaagtcataaaaatgtttgtgaaataaaatcaagtttcatatctttgtgtactgaaattagtttcttattcctacccaattatctaacatacaattgtcattttgttatgagatacatacacttctcattacacatggagaagcattatgtcattatttttataaaaggctgataaatacagttgttccttcatgtatggctcccatacagattcctggtaagatgattctataaaattatataactcaaatctcctgttgactttcatctgaggacaggcagtgggttcaccgtgagtcactgtagttcaaagatgtaaagaaatctgttgtaatcacacttaaccttcgcagagcacaaatttaaagggagactcatgatttaaaagtggacaattaacaaatgacctttctccttcacattaggtgagatcatcagggcagtgtggtaagtagtctgactgtagaatattttaaaggaatgaaagtttttttgggtataccttctggccttctgggcctgtttttggccttctggccctgttttaaatcccatttttaaaaaccctattgcttaaaacagctaaaagaacaaattttgtaagcattccattagactggctaaacatctccccccacccagtttacaatgtatacaatctcttatattcatgtggcttagtgatttgtacaggatgacctaaagccaccaggattcctggagatatgcttagatgtttactaggttgctttggagagtgagaagaaatctgggcttgttgagctttacctaccctacctactgctttctctgggcaaattcacttacatatgttttatttagcatggatctgttaatactttcatttggaatgaaatgtttctgccggtttctttctgttcttgtgcaaatgtgaaaactattgctttagcgaaagcaaacaccgttacttcctgaatcacagctccctccaaaccactcctctccagataaacatttatgttttatgccccaataactacacttccttttattttccctgctctgagccttgaagtgttcacctgaaagcattttaaaatagtctgtaattccaaaggaaatgaagtaattgtccatggaagggaggtgaggactcaggatacagattgacctggggttgctcatgaattgagaccaaaagaaaaacagaggtagaataaaatgaaagggagaagagctcagtgaacatctgtgctttctctttgccgagtcctgacacagcgctcactacccctctgcattttatccctgtcaccatttggagaatcaggcaggaaggcccagcatcagggatttcctctcccttcaaattctggtccctgcaaccagctggagccacccacagattccctttgttgatgagtgcttccggaaggtgaaggagaacctccccatcagggggctgcaatgttccaaactgcagcatcattcatgacgtggctaacatttaccttcattttcgtagggggtggagaaaggtatttttttatagtaataaaatacaatctgtgaattctgccatataccaaattaaaagaggttttgcggtacagctttccatggagacaaggaacaggtaattattcagagataatgcttctgaaacagaacattgtcagtatataatggttccctgccggtagataaatgcagaggcaaagacagcatatttattttttaaagcaagagacattcagtgatgcaattgcaactcttgaaattacctttcctgttttaccagatgaaaggttgtagatttaatcatcatgcctgatggagcactggtgtcacaaagtgacagaaataagcccagtgacagcagccctgctgtgtacagattgacttagtaaacactcttggcacagactttagccgttgaggaacttcttagttataaatgggtggattctccatatagctgctcaaattctaaattcattatattcctgccagttaagccttcgtatgtctttgctttgccaatgaaaactcagccggccaggaacaaatcatatacagacttaatttgaattcaagggatgatattgcttcttctgtaggttaagggttgcagtggtagctcgatagttgtgtaactacactgcactgcaagggctcatcaggtcccactcagtattttatttctaataatagtaatggctaatttttttttttgagatgaagtttcactcttgttgcccaggctggagtacaattgcacgatctaggctcaccgcaacctctgtctcctgggttcaagcgattctcctgctttagcctcctgagtagctgggaatacaggagcctgccatcatgcccagctaattttttgtatttttagtagagacggggtttcatcacgttggccaggcttgtctttaactcctgacctcaggtgatccacccacctcggcctcccaaagttctgggattacaggcgtgagccaccgcacccggccagtaatggctaattttattgagcatttaatgatgcgttagacactgttctaaagactgcacatgtatttttcatcaaccctataatgtatttttaaaatgcggtagatttctcttttacccagggagaaaggagaacttaagggaatggcttggatctgatcacatggctaataaatggtagaacttcgactcattgagttgatgggcctcttaaccattgtacctttgctattcaaagtgtggtttgtagactaacggtatcagcatcaaattgtatttcagatacaacttcagacccagttaatcagaatttgcattctaaagagatcccaggtgatttgtagtcttcatagacagtgtctacaaacttttctggaatgcttttgctattttaaaatgaagatcactaccacccatggatttttatagcctttctcatcatctttgatctattaagcactttgaaaattacactacaatttaatggcacagaaaagaatgagttttgtggacattttaattttagaaaaatgtcattgtaagtgaataacaattttctccgaaataagcagcttaccttagaagttagcttgggactgattgatgtgagtccccgagagatagcccttttgctgaatcagacagatctttcatctatctctaaaaagtaccatctactccaggaaacctggcagtttctactacctttatctgcattgctttgcttgtgacagtcctttgcatatatgatggcctttttcagtgctttctaaagctatttttaatacaaatgaaggatttgaatttaaattaaaatccagctgcacacattattattaaagataatttcgttgtggagaaaatctaatcagtagatatttttattgatgttaatgtgccaattctcagacaataggagtacatctttttttataaagaaatcattttaaaattgatcctaatttcagaaaccttaaaatatgaaaacaacattttagagttaagggtttagctaattaaatgttttccaaatttaatcttagtgtttcttcaatagggagacactggtatatcttaaaaagagccctggactaggaggcagaagatctgagtgaaatcctgattcagacacttataggctgtatgactttgcgtaggtcatttaaccttttggagactccttcatcttgtctgcaaataaagataaaacacgagaattaaataaggattgaaacttgcggttttctgtttcactcatttctgtaacaggtttcatgttttactttcattttcactgcttctcaaagtgtagtctgagttataagattcctctttcatgtaatttttttttatatttcttacaagtttttttggaattatgaccacagaccatagcttgtagaaaacatgtgatatttcaatgctttttgtaatacactttattttttagtgcacttttaagttcacagtaatactgaacagaaagtacagggagatcccatatactccctgccctcacccatgcatggcctcccctgtcatcatcccccaccccaccacagtaggtctattggttacaagtcaggaacctacatttacacagcactatcccccaaagtaattattataatttaccttaggattaactcttggtattgtattttctatgtgtttggtaaattttataatgacacgtacccaccatgacagtaacatatagagtagtttcactgccctacaaatcccctgtgctccacctgttcacccctctctccctacaacccctggcaagcacggatctttttactgtcaccatagttttgcattttccagagtgtcatacagtgtgtaggcttttcagattggtttctttcacttacgaatatgcacttaagttttttaagtgtgttttgatggcttgagagctcacttctttttattgctgagtaatactgccttgtctgaatgtaccactgtttatttaaccattcacctactgaaggacgtcttggttgcttccaagtttcggcaattataatgtagctgctgtaaacgttggtttgcaggttttcatgtggacattaagttttcagttcctttgggtaaataacaaggagtgtgattgctggatcatatagtatgtttagttcagtaagaaactgctgaactgtcttccaaagaggctgtagcattttgcattcccaccagcaatgaatgaaagtctgtgttttctccacatccttgccagtgttgggtgttttcagtgttctggatttgagccattctaacaagcgtatagtggtatttcatcgttttaatttgcatttgcctgatgacaatatataatatgaaacatctttttatgtacttgtttgccatctgtatgttttctttaataaggcatctgttaagatctttgggccatttttaaattgtttttctcttattgttgagttttaggagttatttgtatattttaagtaacagaactttatcagatatgtcttttgcaaatattttctccttgtctatgacttatctttttgttctcttgatatttcttttcttttctttttctttttctttttttttttttaagacaaagtctcgctctgtcacccaggctggagtgcagtggcatgatctcagctcactgcaacctctgcctcctgggttcaagcaattctcctgcctcagcctcccgagtagctgggactacaggcgtgcaccaccatacccagctaattttttttttttttgtatttttagtagagactgtgtttcaccatgttgtccaggatggtcttgatctcttgacctcgtgatccacccaccttggcctcccaaagtgctgggattacaggcgtgagccaccacacccagccctctcttgatatttcaatgctttttacatgatctagtatatgatggatatctctatttttcataaatgttctgtggatagtttagagaaggttgattagagtaagaggcaaagttgacatattaaataaattatccttattaattattttgttctgagttatataatactgcttagactttctcataatagtaatcaacttctcatctgtttctaacagtttttatgtcatatatattgataatgagtgatattgaccaaaaattcatgacttcacatattccttaacattcaaattatagaaaaagaaaatcatatgacctttttgttttgtttagttgttttgtgttaaattctgctgagtctgaaatttaggctaccatgccgtttttctatatgcttgataaatctttgacaaccctttacattttattcttcttcattcctttgagtcagatttgtcactttggggcagcatacactttgatttatgattttgttaattttttacctaatctacaaatctttgctgtaagagagtagggattaaaatatttgagtttactatcataattgacatatttgattttattcctgccaacttattttatcctttcttcataccatttttaattttgtgtcttctttcaattattttataaaatacactgcatacagtttaatgcccaatcctttgaaaataaatatatatttttatttatcctaatggttaccttatattattttaaaaacattgtcagtattcattttatatcaaggtctcaaatttaatggtgtcatttgttcttcatctatttaaaatgaaagatatagcattttttcaattttcctcccatctttactcactggaaattattagtataaactttgctttttataactaggtaaataaaattttaactattttatagtgcttctgttttaatcattaattttgatatttccattgagttgtataaccgtatttatagtggtccttaaatccgactactataggaattgattaacgtaatatagacagccccattttccaattctcccatattttgagcccatttatttatttattcatttattttttgaaatagagtcttgttctgtcacccaggctggagtgcagtgacacaacctcggctcactgcaacctctgcatccaaggttcaagcaattctcctgcctcagcctcctgagtagctgggattacaggtgcctgccaccacgcccggctcattttttgtatttttagtagagacggggtttcatcatgttggccaggctggtcttgaactcctgaccttgtgatccacccacattggcctcccaaagtgctgggattacaagcttgagccaccgcgcctggccttatttatttttttgttaaaatttcaaagtaaattttgaaagaattttatttggacaatttgttttctaaaaccttgaatacctaagattactttttctattgccctaaccatgaacacagtttacctttgttatttaaaataagtattgtcattcaatatttattttgaaaataaaataaatgacaaatcattcaatattttgaatgacaatattttctttctctctaaatgctccatttttgctgttttaattgtaagaaatctgatcctttgtaggtggtctacatgtatttctcacttgtatatttaaattctttcatgatgtgaatctcttaattgatctacccacagagcatggtaagttgtttctaacttcacattgagacctggttttaggtacaaaatgtatacttcaatggtttcttcaacgtcacatctggtactgttgcacttgatttttcttagagaagacccataactcctagattggatagttctacatctatcatcatcttccagtgattttcccttattcatttcctatgcatttttgaaatacttttcagtttgtattccaaatcattgttagatctcccctggtaagtgctgatctgcattgttttcaatggcaaatttaattttacaagtgtacttttattttctttgttgttatctctttcttacctgctcccttgtaatcttagttgcctctctgtctctgtatggcatttttgttattgtttaattggagctatatcttttactgcaatcagtaaagataaagacttcttttagtgtttctgctaaaataattttgaagcatgtgttctgaattcgacttgtcgctttgctggttctgtagctctatcttatgctccaactgatcagacatatgttgatcactctgtcctcttcttggagatgttcagcacttgttggttagttaaagactctgatatatcctgcagtaagaaaagtctttaactctgtccaaccaatatttcctgaaattaattgatcctggaacttttctccccatgaaacaccttacagagctactgtttcatgaaatcatatttgatcgcaaatggttaaaaatatgtcgtcttatagttagtaaatatcttggggaattctttcactgctatgattatacactaatattcatcttcaccttaaggataatttatttgattttctatttaattgcagtttctttacaaatgaaaagaaattgtgatgcagtttcccagtgatttttttttttgcaatgtaaaaatgatttgtagatgttaagtctatatctcatagttctttaaatgaggaggaaaggcatttaatgagtttgtatagacacattttcagatacccacacagagaaactgcagaagagaagtgcaaacacatttacactgtcctactaccatagatgatgttgaaattttgcaagggattactaaaagatgtcaaatgagctaactataggatgtgaagtcatgtttttgcctacatttgctaattgaagaactgtgtgtgagagaggttattgtaaagtgtcaatgactcattttttgtgtatcatgaaaattttgctccattattttatagctacatagaatatgaaaagatatttacacaaaagtatctgaaaaatgaaagtcaagagggtctccacagctacagctagttgccaaggcaagttaatgagtaaaggaaacattttaaacaaatggtactagaacaataatataaatgtttgaaaaagaatgaatggacctcttccacacagtatatacaaccgaatgtaaaagtctaaactagaatctagaagaaaataggaaacaatttgttttgaccttgggttgatgaagatttatatacggtacacaaaaaaaagcaaaaactataaaaattgattgaatttcttataattaaaacaataaacttggcttatcaaaacacactcttaggagaatgaaaaagaaagtcacacatggataaaatattctctctctctctctctctctatatatatatatatctgacaataagctatacctaaaatatataaaccacttttattactaaataatacaaaggtaaacaacccaactacataggaaaaggactttatcagatgttacaaaagaaggtatatgcttggctagtaatcacttggaaaggtgctcaatatcatcatcagggaaatataaattaaaaccccaatgagttatccctgcacaaccactagaatggagaaaattaaagagcctgaaaagcaccaatatgttggttaggctgtaaagcccagaactctcatacattgctgttgggagtataaaatggaacacctgctttggagaaagtgcacacctactctgtgacctagcaatgtcacataggtgttaacccaagagaaatgtctgcaaacaatatgtattggtaagtgaaccaccacttaccaattattccattcataaaatggaatattactcaataataaagaggaataaattactgataaagacaacaatatggatttatttatatagcttgtattttatctccattcatcaaaaatctctacttaatttgggtgaaagatacacattttctttctttacctgagtttttcttgaaagagactatcaggtttacaagtttagaagtaagaatgttagtcttctaaaacatcacttcagtagaggagaacttttgagtcacagactaagtctagccttcagtttaatttcacctgatgatattgctttgatcagataatgattgtgaatggcaaagcagaggttctcaaaccttaatgtgcatggggatccgctggagtttcagatttagctggactggaatgaagcctgagatttctcatttctcccaagttcccaggtgatgctggcactgctggtccaggatagatgagtgctctggataatgaactttctgttggaattggaagggctgaaaagaatgtattttcacaatttgtatttcaaagagtacatggatatcagagcgtggtgaagcctgccctttcaggcatatcacagttgggaccaccgtctgagttcattttaagccattttaggcacctccataatgaatgtatctacttttgccccaaattgaccgttttcctttctacttgacctgttgacctgaggagaagcaatagtgaaatgatgaactagattaagaagggtatgcatattgttttgtatcttctaattgacctggcgttgacaatttcaaaaagtgtatgagttcttaagccatctcgttgatttactgaaataggttgaatgctgtggtggcttcatgactgtgcccagttcttccatccatgcatgttgccctgtgacttctattgctgtgaaactcatgtgagttgtcagccaaaaaaaccaagtggaatgtgagtctgacagttctgagcagaagctttgagagcctcccgtggcttctcagcctttttgctttttcccttctgcagtaagaatggcacgtcacagatagtgactgatctttcggccaaagtaagaaaaatacgtgaagagttgcagctgacatgtaacctgagcaagaaataaataattgttgtatctcagtgagactttggggttattattgtggcaaaatctagaaaaaatccacaaatagtctatatctcatacctggtgtcaggtattgggataggctgattatgtattttatttgtattagtcatcacaataatggttacataatttttctcaaatcataggggagaaaataaggtttacagagagttgacatcactaattctgggaaaagatttatttcaaatgtactgtggtgtgatgatgcataaaattatgaaatatgactaagattttgtacaaatataatgagaaaagttatcaatagtactagtttaaccttttaattataatattctaatcaatgggcagaattaatgcaattatagacaatagcagaaactccttttcactagaattggctttctcattcaaattcaatcgaatatatttttaagaactgaaagcaaaatgttccagttaaaaatttctactctgcaaaacttggagtacaatttaattagctttcttggagtaaatgaactgagattttgatctttgaaagtggaagatgatagactccaatggggagatgaccttagcctagttaagaaatgtttagtcaagtaagtcaacatgataatgtaacagatcattggtattttggttgctaatgaggcagaaaatgaaagcttcataggagacataataaaggccttgatatccaagttttgtgcttaggaggctggttttaatgacgagattaagtttagggatatgcaaagtaagatacttttccagtgagatgggaaagatttcaataaagatgttatataaagaaagttttgagaatccactgggctagtcatttgggactagctttcttaaacatttcattcatttattccttaattacgtttttacagtggacctactcagctaagagtgccaggtgtgtgtcatatgcactgaataggaaattatcctgttctcacagatgtcttacatttcagtgggggatataaacaagaaacaaaggaattcctttttaaaatcagaagtgcaatgaagaaaatgataaaagaagagtgtggctatttgcaaggggcagggatagtatttgcaagaggaaggggtgaatgaaaagggagctgataaggaaccaatgttttatctaagacccgaatgaactaaagaagcatagatatactttcaatataagcaaaaggtgtgtgtgtgtgtgtgtgtgtgtgtgtgtatttctagttttataggcaattatgctcaatttcaattcgaatttcctttttttttagctttatgtgcatatcttaactgtagcagctatgctgggaacatgttaaattgtatattatatagtcaaaagaaaatgagaatgtacaattatctgggaaggtttcgtatcattcatacagacttttagaaaaaaaaattggttccctaaattatctgtgttgcctcagcaaataagagtctctcaagcttttgtggcacaaaatatcctatggagcaaaagatttagtcactgagttatttccacccctggcctaccttcaaaaaagaatgtcataccgaaggaaataaaacacatgttaaatatctgcataataaacgaaataaaagaaccgaaaataacatctatttcaatagaatgaataagaatataatctctttgaaataaactccaatttagtcataaacaaataactcatgctagtcatagatattattacatgccatgtagttgtgtgaggtttaaaaaatcagtctcaaagcttattaaaggaagtacaattgtattatttgctcgtagagtcaagaaatatatgaaatgtggccatatttcaatgagtgctattgttcaaatacttgctgattcccatggtaaagacagaagatacattcttaatctgtatgcactcaggtactatagattaaatgtgcagctctttgtgtattagaattcactccagtaactaatgtagacccaaaccatataggaggtagtaattatatatgcataaagaagggcagattaagtcatttcaaacactttaaagaatatctgggctaattttctactctcatatggaactgaataaaatccagatcaaaattgcatccaccatttatatttaccataacttaattgtggcataattcaatcagtatctaaagaaaactgagaggaaacaattactgtttacctaaccaagttatgtctgttttaaatgacttaatttccaattaactattaaaaattaaagaacataaaaattatacaaattaattatttactcagtgatgagaacttttttatcccaacaggctgagaccatatttaatacttttccttgtattttattcttccatgcaatacacttttgagttttcagaatatgttcctcttttcagtttgtccctatatgttggtcaacagattcctaatggcaattcagaatagaagagtgtttaactctagaaatttgattttgggtaccaacagcctactgcagacactttcaggaagaaaaactactttctaattggccagtgtcaaggatccaagagtcacctattcctttaatactcaaacatatatccacttagtgggaaagttaccttaatttatcatttaatcataatcattttcaatctgaacaaatcagaaacttatgacatgtttaatcaagggctaacaggaggaattggcactctggatcaatataaaatctccatatttgtttagaagcctattcaaacatgtatagactataggcttgttaatatgttacttatatttcttcagtattttttaatgaacagaactattgaaaaattaattggaaccttcttattgactttcgttggagacaccaagttctactcctaggttagcagaggattaatagcattgaactacttaaaaatagctgcatcttgtgctttgcagaagtgggaaggagaagctaaagaaaataattattcctcacactgtgtaatacactggtcctggtgattttcaatattgaaatacgttctatcatctctaaagtttctaatattgatcctgctgtatcttattctgaatatattatttcatattatttatttggatgccaaagactcagtctactgctttgataaattttgttctagctcatcacatcaaattttttgtgaaggaatttaattaaattaattttacatgttatatcaaaatatcacatccacttaattctgaaagcaactctttactggggctgaagtttaaaattgactacatctagaaaattctatgggtattcattagactatttttatagttataaagtgttcatgtgcgtatcaccaaaaataacaaaatgggaagatacatcaaagttatgtagaacaagtttgctaatgttccatatgtgtaggcactttcaatgacttggaggtgatgatattttcaaataaaataatttaaaagcatacctcaattcaatgtttgttatatacccaaagaaatttgtgtatgtatgtaaccatacttgaaatgtcaagtatggtttgaagttaaatcggtgctggggacaacaaagtcaaaatgattggaacagtattttttttttttttttttttgagacagagtctcactctgtcacccaggctagagtgcagtggtgcgatctgggctcactgcaaccaccgcctcctgggttcaagccattctcctgcctcagcctcccgagtagctgggactacaggcacgtgccaccacacctggctgaatttttgtatttttagtagagatggggtttcattgtgttagtcagaaaggtctcgatctcctgatctcctgattcacccgccttggcctcccaaagtgctgggattacaggcgtgagccaccatgcaccatggaacaataattttaagaacattaattgttgacatcttggctgccatcacaccaacagaaatactaccatcactctaagccaactctctcttttacctttggtttacatgggcataccatatctggctacagagaaattctccaggagtctgcagtacactttcacattgtccagcaatgctaacattcaatcttagaggtcatttagcagctcatgactgagttgattttgtgcagtaaggcatagatctataatgaaaaacaaatcttcatttacttctgttgccccatttaatgattatgaagagtaaactcttataaagtaaagtaatactctacttgaaaggaatattcctgttacactataaaatatattaccagatattaatttgatggtagaacaaaggaaggatctgctataaaatatatcaagtaaggttttacatgtcattatacacaactgcagagttttttgagaggctctaatgaaagggtacttctcatgctttggaagctcaagtcttcctcctcaaagagagtcaatgacattattttacagaggattttgtagaaatgaaaggtaattaatgccatataaaagcaaaaacattacatctgtaattgctacatagcatgtgcatgacaagttgctggtgcccataagggacagcacttgaaggtcaaaggaaagagcatacccttccacctctcagtttgatttgagtattaaatgagctagcacacagcttggcacatgttaggctttcagtatttaccttctttcttaaaaaataaaaaaaaaaaaactatttgtattagcccgttttcatgctgctgataaggatatacctgcaactgggcaatgtacaaaagaaagaggtttaatggagtcacagttccacatggctggagaggcctcacaatcatggtggaaggtgaaaggcacatctcacatggcgggagacaagagagaatgagaatcaagcgaaagggatttccctttataaaaccatcagatctcataagatttattcactaccatgagagcaatatgggggaaaccacccccatgattcaattatctcccactgggtccctcccacaacacatgggaattatgggagctacaattcaagatgagatttgggtgggaacacagccaaaccatatcactattattcagagtaattatgatcaaatgcaacagtgagattgaaaatattatttaatattgcattttgagtacaaataaattttggcttttaatcgtgaacagtcataatgttgaatgttttacttaactgtatttattattaattttttgaaatggtaaaaagtaacaactaacaaactaagaaaaaagagaaaggaaatgaacagtgttataggcaagtagatgctgtggcttacaagcatatggttttctctcagaaacgccccagtcctgtctcctatctcatctctaggagcccacatctacacatcaacctttcctacctgaagtcaagacctaaaatagctgtttacatttggaagatagtattcagagtattcgctttaaatatcttatctagaaattacaaaaaaattcagacttctcatagattttctataccatattttctactcgtggccaatatttccctgagacaaagttttcttttgttctgaaattcatgggataaaataattgcttgaataatcaatttttggaaagactgataatgttgctcaagaattgaagatacacatatctaatcatcatttggaattgggtgagtcatctccaagttatttcatatgaaataaaatcaaatccattatttaaattacagctcacagatatttctgaaattacaattccttcaaatatatataagaagaagttaaatatttacttttaagatttattctaaaacaaaatagtttactacattgaatagactcagatttcaatttgggtctttaggtataagtaggacctgtcttccttacttttaatttattttagcatggctttattattctgcattacacaccgtcttgtgtgtttccaattacaaaccatgtttcattgggttctctcagcattttagttttgtttttgaaatatttggtggttgcttctcctctaaaatgctttaatgcaatttcggttaaacttcagatcatccaattatcagaatagcactatatagacaacacatgaagaagtgagtcattcacccatttcctgtcttttgtttctttactgattgaagggttcaataaattccttcagctcataatgaccatgaaagttaaatactatttttatccattcagctgggttttaaatacagcatgtggacccatcattctgtcatgggcagaagctctggaaattcttgacaacttataatcttccctgcccatattcacaagtgaaaatgattatacttacaagaaagaactttacacactaatttttgaatcaactttcagaaagacaagaagtccatgaaaatcagtgtacactattgcttttgagaaaaaaattatctgagtataaagcattcaggatttaagggttcaacttattacttgtttatcacaagttaaagttcttgtttatcacaagtggaataaaatcaattattcatgataacactttggcttactcaatgtaaattttcttggattaaagttaaattttaaaataaggcagtctgtttgacagaaaatgaaacttttactttaggagaagaatacaatgtcccagaccactcaatttagattacaccaggcactctcttgatttatcccatacccttgtatattctacctgggtacattttttactacctgaaatctcaccgtatatttttttacttctagaagtctattttaccttttaggataaaattacagaagaacgcacacttttcttatttagctttgtggtctttaaatttttttaatttgcatttattttattttaaaaccttcaacttccattttggattcagggggtacatgtgcaggtttgttacatgggtacactgtgtgatgtcaaggtttggggtaggaattatcccatcacccaggcaaagagcatggtacctaataggtagtttttcagcttttgtccccctccctctctccctttctagtagtccccactgtctattgttcccatttttatgcccatgagtacccgatgtttagctcccacttataaatgaaaacctgagagcagtacattagcatgtcaagtactccagtgtcctaataaatagctgatgactaacgttgaaggaatgaaaaatatccatcattacttatttagtattagtgtacattttactaccatggcacttatgactaaaggttttgaaatctgcactgcagaacttcatgggtctttttttatgcctatgttctgagtgtaattattccttagttgtttcatgtgtatatatgagttatttttctcaattaggatgcaaacatgctgatggcaggaacttacaatagcttcatcttttgagttctatcatggctgacatagattagcagcagagtgtcaatgtgtgcagtgagggaatgatgagtcaatgtctgagtgcaacagtaggtgtcaagtaatggttgttaaataaatgcattactttaataatctgccagtcagtttatgaataaggtgaagaaataaacatatatttctttttatttttttgcatattttaaattatttcctcttggtctatatagaaaaggagttaaaatgtgtgctttctaaagtctctctgattttttgattgtctatttatgtcattgtggtttttattctcaattttggggtgtactccttcataacttgtgtttatgtgtctttcttttttattttattttattttatttatttttattttttcttttttttctttttttattatgctttaagttttagggtacatgtgcacaatgtgcaggtttgttacatatgtatacatgtgccatgttggtgtgctgcacccattaactcctcatttaacattcggtatatctcctaatgctatcccttccccctcccccgaccccacagcagtccccagagtgtgatgttccccttcctgtgtccatgtgttctcattgttcaattcccacctatgagtgagaatatgcggtggttggttttttgttcttgcgatagtttactgagaatgatgatttccaatttcatccatgtccctacaaaggacatgaactcatccttttttatggctacatagtattccatggagtatatgtgccacattttcttaatccagtctgtcattgttggacatttgggttggttccaagtctttgctattgtgaagagtgccgcaataaacatacgtgtgcatgtgtctttatagcagcatgatttatagtcctttgggtatatacccagtaatgggatggctgggtcaaatggtatttctagttctagatccctgaggaatcgccacactgacttccacaatggttgaactagtttacagtcccaccaacagtgtaaaagtgttcctatttctccacatcctctccagcacttgttgtttcctgactttttaatgattgccattctaactggtgtgagatggtatctcattgtggttttgatttacatttctctgatggccagtgatggtgagcattttttcatgtgctttttggctgcataaatgtcttcttttgagaagtgtctgctcatgtccttcgcccacttgttgatggggttgtttgtttttttcttgtaaatttgtttgagttcattgtagattctggatattagccctttgtcaggtgagtaggttgcaaaaattttctcccattttgtaggttgcctgttcactctgatgttagtgtcttttgctgtgcagaagctctgtagtttaattagatgccatttgtcagttttggcttttgttgccattgcttttggtgttttagacatgaagtccttgcccatgcctatgtcctgaatggtaatgcctaggttttcttccagggtttttatggttttaggtctaacgtttaagtctttaatccatcttgaattaatttttgtataaggtgtaaggaagggatccagtttcagctttctacatatggctggccagttttcccagcaccatttattaaatgtggaatcctttccccattgcttatttttctcaggtttgtcaaagatcagatagttgtagatatgcagcgttatttctgagggctctgttctgttccattgatctatatctctgttttggtaccagtaccatgctgttttggttactgtagccttgtagtatagtttgaagtcaggtagcgtgatgcctccagctttgttcttttggcttaggattgacttggcgatgtgggctcttttttggttccatatgaactttaaagtagttttttccaattctgtgaagaaagtcattggtagcttgatggggatggcattggatctataaattaccttgggcagtatggccattttcatgatattgattcttcctacccatgagcatggaatgttcttccatttgtttgtatcctcttttatttccttgagcagtggtttgtagttctccttgaagaggtccttcacgtcccttgtaagttggattcctaggtattttattctctttgaagcaattgtgaatgggagttcactcatgatttggctctctgtttgtctgttattggtgtataagaatgcttgtgatttttgcacattgattttgtatcctgagactttgctgaagttgcctatcagcttaaggagattttgggctgagacaatggggttttctagatatacagtcatgtcatctgcaaacagggacaaagaggaaggctttatgtgtctttctccattgcattagtatgttggaataaagtccactgtgatcacagaacacagtttgtggaaaataaagtctaggacttcattttctcatatgtaatctttagtcaccagtgagaatgagctgctttcattccctcaaatttctaatacagggtacaggggagcaatttgagaaccagctggatccactgtaggggctgggagagtagcttgatctcttcacttctctatcccctcacctgagttcttataaataagtcttagaaataagttcttataaataagtgacttatttataagttttgtgttcagcagttctggttttgcaatgagaagtgctacaacttctcaatgaataccaagctctttctcttctttctggggttgtaaactggcggtcctccagagtggcccacacaacgttagctccatttcaaacttagagccaacatccagatttctggaaactctttgaaaagtggaagatccggcaactttggcccagatccctggctggccgtgtcacctcggggcatagtagctgctgtctttgaaggatgcatgcttggccctccctgttgctcccttacctgaaccttagtggaagcttccagttaccctcatacttgtcgagtacagtctaatggagaataaaacactgactctgcaccttcaataaaaactactttggtcactagatatgtgagtttgttctttctccaccagaatataaaacagtggagttttatgtataaagtagagggagatggtcaggctcaattttatccttttcattgcatttggaatctgagtgatattcatggaaaggacaacaaggagttcaaatattagaagtggtgtctaatgtccacttcagataatggtgagatcaaatgattgcgatgcctatggacactgatgtcgccttggagatattaagtaggatatcctcagatttataactactctatactcacagtgagattacagcaggaaaatgaagttcatcaaattttcattgaaaaaagtaaacaaaagctgccaaataaagatttaaattcctctttagggattcagcaaatacttgaaaagcaaagtcatccttatatttacatttatattttgttcaaaatgcgctgtaaccattttgaacaaaatgtaactacgcctctgaatttgtctaagaaaaatccagtaactcttttttagatgagtaatatttactcatttatgtgaataagcaattgacaaataaaggaataaattagatattgtggagtacctaatgaaaatattagaatgtataaggcatggatttctaattcatgtaataccttaagaactagattcttggagagaaaatattgtcagtttcagataaaaggattttagatagaagatgaatgtcatcaaaataagcagcaatggaaaatagagaccagataagtaaattggagaattgcattactcaggaataatttttgactcaataacagacacaccccctcccaatcaaatggcagtttaaacaaattttgagggaggtcttattttgaggaagtgtaaaggtaggcaggttagggctggtgtgaccactgtgtaacatgaccaagtctctcatcagagaccaaggcttgctttggcttgtggtctgtaagatggaaccacacttgcactcatgctctaagatatctgcagggaccctagagtcatccctgcgtctcaggaaggaagaaagtaaaatgccaagggaaaacaaaacgacattgcttattctttaagtaaagaacttgacacctttaaagccaccttttcaggagcccactcagtggcttctgtttctttttcatacaattatatttcattgactttgattgcattcgacaggatatagctatgcctatctgtgaatgagcctgggaatagagcttcgtatttgggcacattataaacctgaaaaaaaaaatttgtctctaagaaacaagggggtcattatattgtataggcaactagcattctcattgctttttctctcattcggggaaattaagtataatcaataccttgaggcatagtttgcaggttctatgcaaaagccttctctggggtgagccaggtaagcagccagggagtgagacagggaatctgaatacgggctctaagaagtgaagatgaaaagctcagggatgggcatagcatgaggttcatgccccgcaactgcctcacgcaggagggacacgtgggtaaggagactgagtttaggtaagtgtgttttataaattctcatttctcatattttgtgttctgggataatttattttttgttttttggaaattaagtggggaaaaatcctagtatttagcttttgatatttgaattttttgttttctccaactgaacttctcttgcatctgacttcagaaacagtctccagttttgctggaggagcaatataatgctgttctctgcctaatgaaagcagttaataatgattaatgccaaagagtgagtgctcagagggaggaacagagctgctggacagtatccacctttgattgatgtgtttccattggcttttacccttcattgtttctttgcatctgcaatggcgtgaactgcaagcaccattttgaggacagtatgcttcttgttgtagtctctcacatattccaccactccactgagtttccctaagaataaaactcttttacagtaatgggtgtttccttttgagagccaccaggtgtaattattttaccttgttgtatttcagttaaaaaaaaatcattcttaatgtgaaaaagcctaaaaaatatatgaagattgcaaattacataaacgaatggtcaaagaaccttaagaaataacttacccaaaggttaaaaaaaagtaattaaaatgtatatataaaagttccattaatttggaaatatgaaacttttttacttataaattggaaggatgtttttagtgacattcagggttgataagaattcaccgtggagtaactggccagtgtgaataaagagccttaaacatctatacccctttcccaagtagttttattttacagagtctacctcagtaaatgctacaaaatgcaaaggtttatatatatgtattaatacaatctttgaaatttaatttctaatattggaaaaaagaaagcaacctaaaaatctaataagagaattaaatggttaaatagaatgctgaaccacactaaaacaaaacaaaacaaaaaggaaaaaacttttcaaaggacagtgaaagacatgagatgttactgatgtcatatgtaaaataagtaagattcaaagatgcaagagaggttcagttggagaaagaaattcaaatatcaaaagctaaatcctggagttttataacatatattgtatataatccgttaacaagaaataatagaaattaaatgggccaaaaatctaaaagtaatagaccctgagtggtacaattatgtattactcttgttttcatctctttttttattttcccattttagacagtgaatctatatttgttcagtcattaaaatgtgttaaatatcttagttagcatgatgtttgttattcactgaaatatatgaagtcaatttctaggacagatgagaacaaaaatgccacataatcatgagaataaatttttagacttctgtttaccacaattatagaaattaattaacctcaagcaagtaattcagtagtaatagaaatagttatccaaattaatatttttcattttcaaaaccatctatgatgagaaaatatttgtctataattcatttataatacaagatttttattgaaaaattttattgttaacacattttaaaaattaatatgtggttcagtttctttttatgatgaaatagttttagcagaccaatgctactgacaaagtcaacaagaaaagctgtataaaataccaacaaaaaaaaatatatttgaaggaatgggaatgccgttaaggcagccagtgcttgagaaacccagatctcatagggaaaagaagctgatttgggtgtgcaattcttccctctcaggccatttgctgaattttaccctgtgcagggaaagagggtgagaagttcagcagataacttggatataagaagagaagatgtcagaactttctgggttcttacagggttggaagaaaatatagaaggttgagacttttaaagccaccagcccttttgggtcatgaccttggagacaaaggaggtgcgaaaaagggagccagctattccaccctggtttttttctccaaagcatttgccaattcaagaacagtgaaagattagagaataagaagccaagaagaaagtgactaacaaattgattagaactggtgggagcgctggtgtgcttggaaaacaaatactgaatttcaacatccatgaagaagcatggacctcatgttcttacagaagcgtatggaagtattggtgaatcagagagatcaaacctagcaaagactgccacctccctggcatcagctcagtcgctgattggacttgtgagatctacccctaattttgatgactgccagacaataggataaattatttcaggagaattattacaccgttcagagcttctacagtgtcctacattcaataaaaatatatccaaacaaacaaaacaaataagcagacaacaacaaactaggactgttaggaaatacagatgatagaaagagaaaggtgagacagatattggaattatcaaatatgtgtgatatatgtttaagagaggacaagatatagaattcaaaagatatttagaatcagtaaaagaatgcagtaactaagatcgagaactcaagtagtgcgtttaacacagattgggcataacagaagagagaattagtcaaaacaaataagagatagacatttaatgatgaaatatttaaagctttctcccagtgatcgaggacaaggcaaggatgcctgatagcaccacttgtattcatcattgttttggtgaacttagtccatatataaaggcaagaaaattataaaaagacataacaaatggaagggaagaaataaactgttattgttcaccaatgacataaagtaatttctggaaaaccattaaaattattaaataaagttcatagaaaataagaatataagaaaaaattagttgtacaactatcctagcaacaatgttagacatgaaagagtatattctgcataattccaattacaaaaatttcaaaaattgatctacagtaatagaagctaggttagtggtggagttggtgggggacagaagaggaaatctgggggtgttagtaatattattttctttcacttgagtgttaaattgatctgttcactttatgacaattcattgagtcatgaattcatgatttgtgcatttctctgtatatgcatgataagtgatactaagattgacatactaggaatatgagacatctacataagattttaaagagtgataagagccataattaaaattatgattaacacacttttattcttaataaagaggagtatgcatatgaatcaagaaattggtaattttagttttagagtcttgttggcttttaaacatctgttcacttttgtggttcacagatattcaatttttattgaaatttaaatgtgaaaacacatctgtttctctgattcatatttttatggtcaactctgaaatgagacagttgtgaactgagaaattattcaaaacacaagggatgtgtcttcctattatttgtgaggaggaagtacaataaagtcctgaaatcagcaacttgcattggtggcttgtttacataaggaatatattaaatatttccttttctactgtggatttctgtctttctcaattagactataaggtcaatgtaagaagggttcctaaataaatgattaaagaaattaaagtgtgaatagcagagctacattttgaattagagatttttaaaaatattgtcaaggtaagggacctgcggatgatatttctcatggaaatctatacttgtttagatattttttttccagtccaatgaggtaatgtctgatcgcctagatgcttctgtcacaaccttagcaaggatcatgatttctcaattgtattgctcaagagcctttggctgctcttactgaccagcctattactcatcttgtacactttgatttatgtattcaccacactaccttcaaggtaatctggccaaaattttattttctaatttttcagcttaaagtttattaagactttaggacacgtctagattcctttcctctaccataccctcttagtttcacttcaaacctcagtgaaagtgtgacctttttcaagaagctctcagggctggaaccagatatctgtgatctagttacatttcccacattcttaccaccttgagttataacatgtaggattatttgtctgctctgcccaataaagtgtaagacacctgagaaggatttagagtaagaataaaagcaagagagagagagactgagagagataattagcgtttttttctgaaaatgcattgtcctcttaatgctcatggtactgttgggtctcagctttctcatcagattctaaaatgctcaaaaactttttgattaaagtaaatgtaattgttgccctgcaccgtggtcttatattttctcagatatatactaacagcattagaagctgtactttactttctttcttttaggaagaatattaagttagtttgtgtttaaatgaactaattgttttgcaaatgtgtttataaggagatgatatacatttttttttcttgtaccttatggtaaatacttgaatgtttgtattatatattttcccagtatcttcctttgacagtaatttttatatcatgacccttatttcatgttgaaaagcataaatacattcatggtaattgaaaatattaattacttttctttagcatttgtccaaaataaaaagtaagtatcaccagtgatttaaaatgcaaattttgagaaatacaaaaattggatcaagttctggctccccatctgctggccaggtgacttcttttttttctttttttttttttttagtcaacttttaatttctagggtacatgtgcgggatatgcaggtttgttacataggtaaacatgtgccatggtggtttgctgtacagatccgcccatcacctaggtattaagccaagcacccattagcttttcttcctgatgatattcctcctcccatgtcccccttttgacagaccccagtgtgtgttctgctcccccacagcccactgatatgtccatgtgttctcattgttaagctcctacttataagtgagaacgtgcagtgtttggttttctgttcctgtggtagtttgctgaggattatggattccagctccatccatgtccctgcaaaggacatgatctttttcctttttatggctgcatagtatttcatggtgtatgtgtaccacattttctttagtctatcattgatgggcatttgggttgattgcacgtctttgctattgtgaatagtgctacagtgaacatatccatgcatttatctttatagtagaaggaattatattcctttaggtatatacccagtaatgaaattgctgggtcaaagggtatttatgcttctagatctttgaggaatctccacactgtcttccacaatggttgaactaatttacactcccaccaacagcgtaaaagcattcctttttgtctgcaacctctccagcatctgttgtttcttgactttttaataaaggctattctgactggtacgagatggtatctcattgtagttttgatttacgtttctctaatgatcagtgatgttgacctctaatgatcagtgatgttgaccttttttcgtatatttgttggtcgcatgaatgtcttattttgagaagtttctgttcatgtcctttgcccactttttaatggggttgtttgtttttttcttataaatttgtttaagttccttgtagactctggatattagacctttgtcagatggatagaaggcaaaaattttttcccattctgtaggttgtgtgttcactctgataatagtttcttttgctgtccagatgctctttagtgtaattagatcttattagtcaatttttgcttttgttgcaattgcttttgacgttttcatcatgaaatttttgcccgggtctatgtcctaaatggtattacctagattttcttctagggtttttatagttttgggttttacattgaagtctttaatccatcctgagttaatttttatataagatgtaaggaaggggtccagtttccattttctgcgtatggctagccaattctcccagcaccactcattaagtaaggagttctttccccattgcttgttttcgtcaggtttgttgaagatcagatggttatagatgtgcagtcttatttctgagttctctattctgttgcattggtctatgtgtctgttttgtaccagtaccatgctgttttggttaccatgtgactttttaaaaaaaattatttatttatttatttatttttagagacaggatctcactctgtagttcaggctacactttatcttagccaaaagaccaagaagtcatgtcgcccaggctagagtgcagtggtgcattcatggctcactgcagcctcaaactcatggactcaagagatcctcctgcctcagcctccagaggatctgggcctgcaggtgcatgccaccacacctagttaattttttttacattttttcagcaacagggtggccatgtgaccttatgtaagttacctaaaccctgtaagtctatgtgcctcatctgaaaaactgataaaaacagaaccctctttatagggtcatggtggagaagaatcaaacagtggacaaggaatatttagtataatgccaggaaactagttgactggtcatagtcacacagatgcttcagggcaggcctatttcttgcatacctgtgatttcaggacattttcagaagtcccagacctagaacccataggtggagaatccaaattttttgtctgaggacaatgaaggtgtcagtgaatatctactcccttacaagagctttgttacaattgttcaaacctatcaacttctagatggggaagactggaagaaggttcaagaagtgtttcctcagaaacacccaaaatgcacgagaaggaaatagacgcaccaaagttacctcaatatagtgatcatcacagaataagaaacttgagcggccgggtgtggtggctcgtgcctgtaatcccagcactttgggaggccgaggcgggcagatcactggaggtcgagagtttgagaccagcctgaccaacatggagaaaccctgtctctactaaaaatacaaaattagccaggcatggtggtacatgcctgtaatccagctactcgggaggctgaagcaggagaattgctcgaacccgggaggtggaggttgcagtgagccgagatcacgccaccgcactccagcctgggcaacaagagtgaaactgagaaagaaacaaagaaagaaaaagaaggaaggaaggaaggaaacaagggggagggggaggaggaggaggagaaacaaagaagagaagaagaggaggaggaggaggaggggaggaaaggagaaaggaaggaaggaaggagaaatttgtgccattgactaactgaggccagtatcatggtggaaaagcctgttactagtgttgaggtgaagaagcttgaccatataagagatacttctgaatttattcaggtgaatattgggatatcactgattttatcagattcattatatttaagagtaagaaggaagaaaagtggaattctgggatcatgaagagttcagaataaatgggaaaaggaaatgcagcactaaaaacatgaccaaaatcaatcaacaaaagtcagtcaacaaatatatgttaggtacatatgtgaattacattggtgttcaaaatagaatctttgactttaagtgcatacattttaattagtaagaagagggctccaaaaacatgtaaataggcagcaagacaatacatgcttttggcaagtgctattatgaactatgaccacacagtaagagatgaatatgggtggtagagaaggcttctttttttttgagacagagtctcactctgtcgccaggctggagtgcagtggcacaatctcggctcactgcaacctctgcctcctgggtttaagtgattctcctgcctcagactcccgagtagctgggactacaggtgcgcaccaccatgcccagctactttttttgttttttgtttttttttttttgtatttttagtagagacagggtttcaccatgttggccaggatggtctcgatctcttgacttcgtgatctgcccacctccgcctcctaaagtgctgggattacaggcatgagccactgtgcctggcctgagaaggcttcttagatgacttatgtgttgagaaataaatgacaagacagtgaacaaaatttggggggaattctttacaagcggaagtaacaacaaataaaaaatgccaagtttgccgatttcaggaacgaaaaggatcactgtgttcagatgatcataactgaggccgaggaacagagaaagatgagttcagatcttgttctgaaaacagaccatgcagggccctgaagtccaagtttggattttattccaaattaatgaaggcccttggaagatttttagaaggggaaggtgacatacttttctttcctttgagagatcactgtggctgctatgtggtggatgcctccagggacccgaaggtggggacaaaggccaactaagaaacacaacaggagttcaggtagaagatgatggtggcttagactgggagcggtggaaatggtatcataatttccatttgacatccattttaccaaaggtttgagatttggaatatgagtgaaagggaggaatcaaggtcatttttggtctgagttactgtctgaagagtcatgccattaacagagaaacagaaggcattgaggagctgactcgatggtggcatgggcaaatcagtggttctccttcggtcatgttacatttgaggtgcttatgatataaagtgagaagttcaatacacacgtctgaaagtaaaaagagaagtctgtgttagacatgtagatgtcatgtcttcagaatgcagatcggtgtaaagctctgggcctggatgcaaccacccagggagaaagtctacttatgggaaaggctggggacaaagcaacatttccaggtctgggaggagagacctggaaaccaagaagaaagggtcaaagcagtgctgaggaacaggcagatttcagttagagcaaaaagataaaagcaatgttcagagaagaaggtgtatgggtatagatgaccttggtgatgacagattaaatttcacagacattaggaagggagtgcagaggagaaggggccacgaggaatagatcagaatagtgacgcatttccttttggtggcgtgcaatctggagacagatttctgaagatgactgaggtgaaagtgatgcaaggaatgatgcacttgcttaaaagcaaagtgtgccatgaaggcggggatcttggcaaagaggagaattaattcatcaaagcaccctgcccttgaaatctcaccacactgctagattgaaactagattgatggcacagaatggatgttttgttttatcttatctctctattttcttatgtgggaggagtggacatattgcaaaaagcagttgccagacatgcacatttaaatgtactgaaacgcaaggtgatagacaagaaaaatttagtcaaatttatgcattaattatcttcagaaaatgcaaatccctgttgtagttattttcctatttctacaaatgtaattaaagcattgataacacaggggaaccacagcattggaattgagaacaacctggtgtgaaagaaaagaagtgttgaaaattttaagtttccctctcctatgctttctattatttctgtgtgtaaacccaattttcacttcccctttctatgaagctaatgctagatcttatctcttgacatttaaaacatccactcttcctgccaacattcatttgcttctccattgttaaatcggatagtcacaactctgatgtgctgtgttgtagtacctgagctgatcgtatggaggcagatcttatgacgctggccattgccacaagtgataattggcaatgcccaaagagatgctatgaaagccttaatattgttgacgaaaagagtcaaactctgtgaaatatttgaagagatttattctgagccaaatatgagtcgccatggcccatgacacagcctcaggagaccctgagaacatgtgtcgaaggtacagcttggttttatctattttaggatggcgtgagacatcaatcaaatacatttaagaaatacattgatttggttcagaaaggtggcacaactcaaaacgaggtgggggaggggggcttcctcgctaaaggtaaatttaaacgttttctgattgacaattggttgagtttgtctgaagacctgggatatatagaaaggaaatgttcagattaagataagagactgtggagaccaaggttcttttgaagttttatagtggctgcccttagagacaaaagatgtcaaaggtttcccattcagatctttaaaaggtgctagacttttagttaatctcttcaggattgggagaacctggaagaaaaagatctagctgttagtagagattctttactgatgcagttttccccccacaaaggacagctttgcaggtccatttcaacatatggcagggaaacatgttttgggctaaaatattttgattttcttccttgttttgtaatgttatgcctgagtcagagtggaaagtaagccacaatatatagggttaaataaaatccatctgatgagaatttatggtttgtagggcatgactttctagacaacttaggaacttgggcaagataaaaaaaatcagagcttagtccttaatatccagagaatatgatgcattttcataaaaaagtaaggatcacccacttaacactctaccctttcaaaatccactcatattgtaatttgtttgtaataggtgacaatatttttctttcatttatagataactaatcttcacctttatcaaacatgtctttcaagagtatgtaatacatcgattgcagctccaagtctacatcatctgtttttgcatccttcttatttacttatttttctttttgtcaataaaatacatcttaaatatatagtcaggctcctctttagctcaaatagtgttgttttgtttaattagactgtgttcccagtattgcttctatttttttttctttttttctttttttttttaattatactttaagttttagggtacatgtgcacattgtgcaggttagttacatatgtatacatgtgccatgctggtgcgctgcacccactaactcgtcagtattgcttctatagaaggctagcccaaatgcagagaggaaaatggcttgacttggccttaaatataatgaagcttgtacagtgtgcattgtgttttaagtttgaatatgaatgtaactgctacatgtattgtattaaattaatgaacttttattatgcttagcccagtgtatcctcagtttttaattcaagttgcacaaaaatttattattttgcttcttgataaaatgatttattaatattttattcaacctcattgttttaagcttttctgaaacatattccctctttaatcaatgatgatatgctagctttaggtaaacggtctgatgttaacacatatacagagagtataaaattccacttgactcctcaagtgcccatcaaacattttctttaaaactcctttgatacatcttagtcccattctgcattttatatgggtcccattctttgattttcatttgttttattacatttgagtctctttacaaattagctaaatatgcctaaactctaatggtgttgttgtagattttttaaagttacaaaatattttgagattggttttctacttgttgaaactggacttcatattgcagggtaatattcccccatggggccatcagtattcataaatctatttgatttacatgttgaacactacatgttccgtaaaatacctagaatgctgcacatgtggatgaatattaatgattgtctctacaaataataaagcaaagaacaaatgacctctctttaataatctagtgttacagcagtcctgaaagaagtgggcagagcaagggtccccagccctcacagctcttcttatcctttgggtagcacacaagagaaagaagtgcatttgagagagttcatgagcaattttaaaagacttctgtaggaagatagatgcttttatccaaaaaatggtctacttactgatttaagtgattacatctgcattctctcttcactaggaaagaatggccaattaatcaaacttaaagtaaattcatctacatttgaaattctgtcaggtataattcaaatgtgtactttggctggtaccaaatatgtatgctccttttaagaaacaatgccatattttgggataaagttcaactgcaatttaagtcatgaaaaaggctactgggagaatgaccttaattaaaataaatcattttcaaattgttcctaactaaaatatttgttataattttagatgaaattatattgcattgtttactcatatctggaaaaataggtgtagttaaaatactagaagaaaatcagttgaaacattaacagtatttgttcctaaagctatgtttaataaggaattttctgccttctacttatgtgttttaaaaaaattaaagtgatcgtgtattgctttaatattatgtgtgttgctttgataatactttttaaatcagttaaattataatctaaaataaaaggtgattttagtgcatatacatgcatgtgtatgcatgtatatgcatatgtgtcttatatacttatattaaaattttgaactggcaattagggaagtggttttttaaactgggataatacattttaaaaatatgtagtggatgggaatctcaggtaatggcataaaagtgctaatgacctgcacaagcattgaatgaaagatgcaaatgagcagcttaatggaaaaaatatgaggaacttggtgctaaatcattcacagtcaacctgtttctgggctggggtttcctaagcagcggagcacctccctcactaccgtctattgaaagtcagcttttaaacaataatagtaataaataataaaaaataataaaaatatacatatatcaaacaaactttgacaccatggtgtacattttagataaatcaatatttgttagactacagcactaacaagtttctatcttaaacattatagtgacccctaatcaggccttagagtggtgattgaattttttttttttttttttttttgaggcggaatctcgctctgttgcccaggctggagagctggagtgcagtggggcgatctcagctcctcagctcactgcaacctctgcctcccatgttcaagggattcccctgcctcagcctccagagtctacttaaaacacataaatagaaggcagaaaattccttattaaacatagctttaagaacaaatactgttaatatttcaattgattttcttctagtattttaactacacctatttttccagatatgagtaaacaatgagatataatttcatctataattataacaaatattttagttaggaacaatttgaaaatgatttattttaattaagatcgttctcccagtagcctttctcaagacttaaattgtggttgaacttcatcccaaaatatagtattatttcttaaaaggagcaagtatatttggtaccagccgaagtatacatttgaattattcctgctgacagaatttcaaatgtagattaatttactttaagcttgattaattggccattctttcctgtagctgggactacaggcatgtgccaccgcacctggctaattttttgtattttgagtagaggtggggtttcaccgtgttagccaagatggtcttgatctcctgacctcgtgatccacccacctcagcctcccaaagtgctgggattacaggtgtgagccaccgcacaggtcctggtgaggtaatttttaagtaactatgtatctgttcatatgtaagtatatgtgtgtaggagtgcagatgccagtgtgtttggacctctggggaaggagagggtaagcaagagatatgatgcaactcagcctcagatgagctcaatcactcacagaattaattaaggtaattgaccctcattcacttctgggttcctcaataacagcactactaacattttggaccaaataattatttgctgtggagactgttcttctgtgcattgtagggtgtttaggagcctccttgacctccaccctatagatgccagtagcactgtaaccaccagacaggttcttcctgcccgctgaacaaagttaattcatggagaccataacattgcagtaaagaaatagtttaataaagttgaggccggccacaccacgtgggagacagttgtaactcaaatcaattttcttgaaggctcagaggttaggggttttttcaaagatagtttggtggataggggcccagggagtggggagtgctgattggttgggtcagagatgaaatcatagggagttgaagctgttctcttgctctaagccagttcctgggtgggagccacaggactcaggactggttggcaaatgctggtggggccatccagttttcagaaatgcaaaatcctgaaaagacatctcaaaaggctagtctcaggttctacaatagcaatgatatctgcaggagaaattggagaagttgcaaatcttacgacctctggaataatgggtgttaattatgtaactatgtttgcatcttagcagaattcaggtccctctcatcttcctaacctggtggccttttattagttttacaagggcagtttacttttggggaagggctattatcatttaaactataaactaaatttctccctaagttaaccttgcccatgcccaaaaatgtgcgaagacagccacccttgaggctagaagcaagatggactcaaccatgtcagatttctcttactttcataattttgcaaagacagtttcaagacctctctattgttatatctaaaaatgcctccaaacattgtcaaatgtctggcattttgtgagcaggtggttgggatgggtaggaggttgtctgggattgagaaacacaaaacactgctctaaatttgttaccaaggggtgaatcattttgcggggaatatttcatccagatgctctatagtcttttccatacaactgttgacattcaattaaagaaatatgaaacaggactaaggaaacaacaacagacagtagtagcagatgcataaatgaccagttattaggaattaacggatatacatatttaaataactataacaaacatagtaaaaaaaaaaatggcaaggtgggtaattggacaatatccagtctaaagtacagataactcaaagaatattgtttttcctgactttggttcatggtggtttgcttccttgtgtgtgtattttttggtcttcagtttcgagcttatcctaaactccggaatatcttgaaacctaagttcaggacacgtttttcaataagttttgtccatttttgagatgaatattactgatcttgcacctcttcagtcctcatttcatgacacctactccccggcttactcaggtagtcttgggtctatcttttccacctttatggcctgaagtaccaatgtaggaatttacccacagagctcctttcatgtgagcttatggtttattcctcttgcttcagcttatagctcttgttttcgggtttcctgaaggatattacttcctataagtccagtaataaaacaaacaattgatatttggtataatagattatttggtctttgcattgctggaagctaaagcccatatactgtgtgcttcattgtaatatatctttcatcatgctatttcagaatgtgacaattactaaaagctgacatttgagatcatatcaccacctaatattttttttcaaaagtaaaagtaaagtggaagataaacgagaaacttagaaaagactaggtttagaaagtttattaattatacttctgaaaaagcaattgtcattttctaaacggataaaaatgaactgcaaattaaaattcccagtggaattaatgcagtgactcattacataatacatcatgggcaagtaatccatcctttgtactctcaggcaatcggatgtatttaagccaaagataattcaagacaaaagtaatcagggttcctccaacatcgctttttatgtgacatagagcttatcattgtttaaagcatcgaactgcttaggcattctttgttctcttttattgccttcatttcattgtctgaatagcttttgtagtatgatgttaactatcactgtttggactgattgaatagtttatttattttgataaccatcaggtgaaagcaaaagtcatttcatggcaatttcctgttacttcaatgagacactgctttccaaaaatggcaagaatgttcttgacaattagcatttacacgtgattttaaaattttactttgtttttattcttccatatgagctcttttgattttattgaagctttgaatgagtgagacataagcacagtttaagttgtatgatgggagctaaagtaagtttaatttcaatttcaagcaaatactatttattctacattttctatagtcagggagacatgagggcttgcatgaaggacctgcatgtcaaattcctctattttctgacttttttccattaccaatatagacataatcacatacatttggttgttcttacttttccaacagcctccctccctttctctttactgtaattggaagcatatttccatctcttcctctgtctccatccctcccactttgatattcttattaaagtggaatatttcctcttatctggtagaatgtgaggaaaatagggcaccctaatttatttgatcaccgttcagtttttctcggtaactaagtttgtccctgaaagtttctggtctcacttatggttacattgttaattatcttggaatagtgaaaaagatagtcaatatttttttttcatatgtcttcccacagtgtctgaactatttccatgattttttgactattcgcttttgtctttgtagaaaatattcattaggatataatttacaaatctaattttcatagttctggatcacttattgccccagtaaattccattatttggaactgtacctctatacttaactactagtgaatggcagaaggtgtttctctatcctagcttctttagggaaagaaagattatttgaagggaaccacaagcagctttgtttctatctgtgatggaagataacaattttaatatttaaatagatgttgaataaatgagtatgatttttatatgtacattacatagtaataatagtaaatgtctttgggaaaaaatgcaaataataccatgatagatgctatcagagtctaatagattatataacttgactgcacatatttgaaacatttaagtagaaaacaggactggtagttacaactggtgtagctttatgaatctctaattctattacatctgagacactttagagatcgcttgatctagtctctttgtgcagaaaacaaggaactgaatctttgagaagcaaaagtggcttatccaggctacataattaaaactgtcatcaaaatgggcctcccagctgccatcacagtgcttggcccataccaaccattgattcttactttcctatcaggcctgggcatattccagtctgtccaccatttcttgtgcatatccttacaataaacatgaaatttatattttataatccaaattgaggtaatgttccatttgactgtcatacaaggtttcccaatcaaaagcagatgagatagtggttgaggccaaggcatcctgggtattagttatgtatttaaattctctaattaattgtctccaggaaggaaacaaatgtgtacactttggaatttgtctgtattactactaatgtaaaataaacattgcactaaaacttggatgatgattgaaaaaacaatttaaaaaccatgaaagaacaccacaaaatatttttcttacttgaactacattaatgttcaaggtggcctaagggaaagagagagaggaagtgctgttttaaaatgttctctctctctcttgagaaacagcagatttattgtcataataatctcaaaatgcttttgaggaggtcagcagatataaagtacatgcagattgagtgtaatcattatatgaaaaattaaccacatgaacaatgaaatggtactgtggtagcagccctttgtcaaattaatgttctgaagagtgttatttgtgaaatacaaaggctctgaaaataagtggactggactaacttcgcagttttatgtgctacatttgtaactggattccagaaaaaattattaggagaaggagaatttagagcttaacattctgttcacctaatataaagttacagagtgtcagatcagatagcatcatccaattagtcaatttacattgacataatatatatgggacttccataatgaacaatagtcaaaatgtattattttgggaaatcttgaatcaaattatttacaggtatcctgagagatctctattataataattgtaaaaggcagcaatagctttctgaaaaatatttatatattgtttcttttttaaatattgtttaattatacttattttttatttatgtctataatgtaaggtaagggttaaaaatactgtttaaatgcagttgggatatataattgatccaggatcaatttattgaaaaataaacttttttcactgcactgtaacattagcccaccataaatcaagtgaccttatgtgtatgaacctgtttgtggtgtttctattctgtttcatttgcctatttgtctgatcttgtactagcaatccattcttgtttgtttggttggtttttgtgagatgaaatctcactctgttgcccaggctggagtgcaatggcatcatctcagctcactgcaacctctgctttccaggttaaagtgattctcctgcttcagcctccccagtagctgggattacaggcacccaccaccacactcagctgatttttgtatttttagtagagatgatgtttcgccatattggtcaggctgattttgaactcctgacttcaggtgatctgcctgccttggcctcccaaagtgctgagattacaggcatgagccacctcacccagccaatacattcttaaatactatagctttacagtatgttttaaaatctgatattgacatctgtccaccaattttttttttctcagcaaggctttggctatttgtatgcctttgcatttgtgtataaattttagaataaacttgtgaattttcttaacatgaaaactgttgggattttgatgtggatgcattaaatctataaatcaattgacagaattgacagcattgatgttctaatctatagccttcctttttatttgtatattttttaattcacttaataatttgtagttttctataaagaggtcttgacatatttcatgaatattcctattttctgttttttatatgttattataaatgacataattttaaaaatttatattttaaatgtttgtttctactatataaaaatataactatttttaaaattattaaccacttgtatctagggaccttgctaaattaatttattaattgtatgtagcttcttttatattttctacctatataatcatgtcatatgtgaataatgactgtagcatttcttcctttctgtactgtttgtatttctttttcttgctttggggcaattagctatggcttctgtgtaatgttggttaggtgtagtgatagtgagcattcttgtcgtgctcccaatcttggagaaaatgctttgtgaaagctatcagaatcaaaatggaatcacttttgtcaaacccttacaaaaaaaagtggggaatatgaagggagggttcttatgcacaattgcctaataacaagaactatcataagagactgccaaaaccacagcgttgcacaaagaccaccacagtcttacacacacaaaaatatatatacttatgtgaggatctgcccagcaactgcctgcctaaccttggacggacactggctttgttattgatccttgtagccagggataattatctcaaaataacttatataacctcctcattttaccttcaaaaacccttgtcttttgttttcctcccctgaaggtgtctgtagtttactatgctatgttattccatgctgtactgcccactgccagataaacttattatctttggagaatgtctgtctttctgcccattattaagactgacataatctggtatcaagaaatgggacagaagtaagctcacctggaacagccgggcagcccctggaatcaagtgcagtaccaactgaatgaaccctttgtactctctgcttccaggagtcaccttttctgccctggtgattctcctcttaaattcttggactgcctccttttagtgagttcttttgacttgacttgggaccgcactggtttatccggttgcctcaagtagaagatattgcatccctcttggaactgtgagcctgtcttctctggcaagttctttttaatagaaggacaagtatctttccagagagttcttggatttctgcagaacttacattatttgtgaggcatgttttttttttctcgtgaattcacttttgattttttcttcatgtttgatttaatgttttgtttgatctgtaccactggcttaaaatttttgtgagtacagaattttgttttatttttgtttggttacatgtgtctaatgatttagcaattttatgtttttctccctcttgtttatgaacatcttttgaaagcaaaaataggcattttaaacagtggatgtgggatggcaaattgaaagtcactagagcagtcaccaccatctttgtggcaccttaataataagagcctcagagaaaaagtctcccatgtcaagatcaactgttacggacaggcaaggtcaccttcaggaacccagtcggttccaagaaaaattctatacaatgaaggaaacttggtcacaggtcaaagaattagggcacaagccatctgccaagtatgaaataaaggaatcttgtgccacgtacacttgtgaaagcaaaacgatttgtccaaatccttaaaattccttgacagggcttataggattatctgtcgctctccagagattaataagaaactgaatgacattccaaaattctaagacatgccaaacccttagactgctatacattcaaaatttatggtccattctcatgaacatttttttaaactgatgggaaaattacaccaagaataatgtatggccattatggagattgttttggccttccaagcttgtttttctcagaaatgaattagaaaagtgcaactagagggctaacatatagtcttttaagtttcctatttttctattttatctctgcctatttgaatatactgacgtttttgcttgcattggaagagaaactctctgctgcaattgttcttgaaactaaaataggtcaaagtctgcttggagattatttttctcatggcatttcaatgaaacataaacagcaaggaattaatccttaatctaatttaacactgagaaaaaaaaaaaggaaaagaaagtaaaagggacttattaaaacaaagttgctagagaaactgctttacccaaaatttgatgcacagccttcataatattacccatcaggacaaatgaaaatcttaagtttagccatgtgaacatttcccattgtgtcagaaactgaatttagattcaattgtccttttataaaccattgagtttatattactattttactgtctcatgactaaaatttttaaatgaaagctataagatctttgtgtgtatatgtgtttatgtgtgtttagacacatatgcatgtgttatgttgtatgttgtatatacataatacaatctggcatagttggccagaaatcctttaaggaattcttttcaagttggcttagagataagatatgcaaatgacacttaaaagtgtaaaaaaaaaaaaaccccaaatgccttttagctcatgggattcatatgaatctttgataaataaattggttttaaatttgttggtaaaataaaaatttgtttcagaattgttagcttacattttgttgcctgggtttgctggttagacaggattacattgatctctgttagatgttttacagtcataaaactataaattcagcttaggccaggtgcagttgctcatgcctgtaatcctagcactttgggaggccaaggtgggtggatcacctgaggtcaagagttcgagaccagcctgaccaacatggtgaaaacctgtctctactaaaaatacaaaaattagccaagcatggtggtggcctcctataatcccagctacttgggaggctgtgtcaggagaatcactggaagccagggggcagaggttgcagtgagctgagatcatgccacttcactctagcctgggtgaaagagtgaaactccatctcaaaaaataggtaaaataaaataaaatatattcagcttaatagcaaaatagattttgtttgtgtagctctttaaaaaagatgactaatattgttggtttaagaaaaacagctgtattttctgagttactggcaaaatacccatatatttcaggttcctacttgggtgatgaacacctgatattcacaggcttcaaaaatagttaacagagaatcaacttgaaatgagaactagcttgtctaatatctcagttttcatgaataatctggtataattgtttaaaataaataggtgaatataaatggtataaatgtgtataaatgaacttttcatgtaatttcagatgttaaaattatgttattttgaattaagtaatattcataaactggattatttccaaataagataaaataataaacattaatttctgatcagaggttcatgtttatttaattttggcttcttaaattttacaggaaaacacaatatatttggatctattaaaaattatatcatgtttcacattaaaaatttgttctatgaggaagcacacattcctagaagttgtaagatgtatattcataagctgttgctatatgacaaatagttcaaaatgcttacctcctaggctttaactagaaattaaagctacaaagagttaaaccttttaattaatatatgtaattctatatgtaagttgtacaaggaagtaagatacctttttcgttaaaaaaaaaagtataagcatgggaaatatttaaattttggtaggaaggaagaataattttgtctaagggttatttcaaagtattaaaagaaataacaacaaagcaaaaagaagccaataattaggggagtgagagggatgcaaagaaggttatgaggaagtgtttttaggtaaagaagttaaaagcagaaagtgaataatatgaaaaataatattgtgtggtcagaatgataaagggaaataagaaaaataaatgtttgtgctaaggtagaatttaaaaagaagaaaatataggagaaaactgaaagcttaatcaagtcgtaaaaggtctgaggagaatgcaaaggtttgtaaagtataatcttatgaaaggaatttgtgtgcaatcaagttggcttaagttagaagagaattgtttacaattctttctaaaattgaacattactatactgatacaaaaccagaatctagtcctctgtgtttaaagcaacacagttttcttggattattgatctgctctcagtgaaatttgcagaaagtttttatttttaattgtaaaacttgtttcttttaattttcaatcattttctgaactgcatcttttgcccaatttacagttttcatttattttttcccaattccagattaaaattgctatgttcttcttttaaaataccaatttaatttcacaaattggagtttcctcttgaagcttttcagattcatgtctcagaagttcaacttttcattgcatctcactgcacataatttgcaggtcatacatcattgcctctagctcttcctccttctcttcctgcagaggtacatcttttcatattgttaaagttgtgactctctccattgactttttagtcagctcctactgcctttttttccccctccagttgttactctgccactgtggtctgatgctggaaaatgtcttgaaggcccagaagagcaatgtcttcctccaggataacttgatctgttctcttggcttttcttgatgtgtctgaattgttccatgtaatgaggcaattttgcatgcttttactttttttaagagccacatattaccctgctcaaggtactagttttcttgtttacttctatgatatgaagtgcactcataacctcgggcagacaattccagtgtcttagagaattctggtatcttttcattgggttcaacttccaggttatttaaatggacttccataagcagacaacaatcacactgcaggaggttcgtgtttgtgtgtttcttaaaccttttgatgatgggcctaagaaacaaaaattttgtgttttatcaagataattccctatgctttatgttgtcttactaggtttttcattagtgagggaaactgagctttgaaagagttaaagttttcttacatccttgtaattttctgtatttatttttgacattttctgtcactctagttaagtgaataattattatttcatgatgacatgtgattctgttttaattaaatgttttaaaccttttgacatctttggcaggcttccccagtatcaaagttctaaattaagtctttttgacttcaaattaactttgggaatttctagtcaggaaattctgaaggatgtgtctctcatcttatgaaagagttattaaacgaattaggcttatttaatatgttgggttgtctggtaagcattgtctaataatagagtgatgccaaatctttttcaagttatatttatatgaatatgttattgatgtgaatgttccaaagattatgtaaaatttatagaagtctgatggctctggttggatgctgtcaaccataattctggttgttatcttaaaatgttacatgcgatagaaataaccgaatttcttcatcaattttgtcattattataatgaaccctgcagagttcaaattcatcagatttttaaaccatagttattctaaatctttgtcatctactgttacagttttgtttcttctctaaacacatgtgcattcagatgcctagaaaagactccagtaattactcttgcttacaggtttctgataacactaaactcagtaggccaagcgaaaatttccagaactctgataaagaaactgatacattcatgaaactgctaacaaaaatcaagcagaacaaaaattaattacatgaagtgaaataactaacaaagatgatgttttatgacttttatttgaaacattgttgtttctttacttaaaacgtttcagttgcagatttaaggaaactttccctcttaagctaattataatttacagctatttgacaaaagtatacctttgttttttttttgtttttttttgtttttttttgagacggagtctcgctctgtcgcccgggctggagtgcagtggcgtgatctcggctcactgcaagctccgcctcccgggttcacgccattctcctgcctcagcctcccgagtagctgggactacaggcgcccgccaccacgcccggctaattttttgtatttttagtagaggcggggtttcaccgtgttagccaggatggtctcgatctcctgacctcatgatccgcccacctctgcctcccaaagtgctgggattacaggcgtgagccaccgcgcccggccaaaagtatacctttgtaaactaaagtggaaaaatttactttttatccctatttgatcctatcaaaattcagaaactacatgagtattcttatgttttttaatggcagtatatatgtttgtgtaagttcaataagaatctgctttctttataacagaatagaactggaaatattggctatattacaaaggttttgactgagatgtgatatttaagttatttataggtactacagacaaaacctgaagcctgccttggtttgactttttagtctcaagagatatttaagggtccaatctgagattactatatgtttaatcactattcttgctacatttatgtaaataattcagtcacatttgacaaaattaaacttattttacaaacaaattaatcttattctcattatctttagtaaagattgggatgactgtagagagaaaaattatgtttctaaagaaaaactctaatatacttgttagatgttggccctgtgcatagtttcttagtttttattatctatctgtagactagactggatcttgaattcttctgatataggagttaagaagaaattacttaggcagatagtgagaatatgggagtcctcagtaaggttttccttttaatgaaaagcagcccccaaatcattttcttttcttacgaagagcagcctattgctggcagttgtgccaataggaagaaactacctgggaataggcaggctcaaaatggcagctccatcctctctttgccagccacacgtacagtaaggagcagacaagatggttctggccaagtggaaagtccatttgcataataagattagggtggggcgaccagccttcccacacacaatgtaaatgtcacacctgatccaatcaatctgtgggccctacataaatcagacagtgccttctcaagcttgcctgtagaatccagtgcactctgccaccagcaggtctttccttttcagatacctctctctggcaagagacagacagagacggctgctctcctctcccctttcttctgcttattaaactttccgctccttaacccattccatgtgtgcgtgtccatgttgttaatcttctcagcacaaaatgaccaaccccaggtatttaccccagacaatgatgccacttcacttgtaggttcctccaatccacttttctctcatgaaattagtgagaacaaaaccacccttttctaaacccgcgtagaatgaagctagacaatttgatgtaaatttcaagggacaagacttgtgcctgatgtttgagccacacggcaagttcaccaaactgtcgaatgctgtaaccagagaccttcaaaccacaaaccagggtgagaagttgacaatttcatgctgggaaaaattcttcccaagacattgaaataagattccttatcataatgagactcttgcccctcttaatttttccttgcttgtgcctacctttttcacttggcaggataatggtatagttaaaatttcacaatcaatagcttctgcaggaagctgtaaaaaatgttgcatctgtcatgcccatcctaaatatttacatgccctgacagataagcccttagcctgcccaatgggtaacttcaacagcatctctagtacaactgttgctcattctgtgttttaattcaacccagctataagatacgaaatgatagaattgctctagattctctattggttaaataaggagatatttgtgctattgccaataatacatgctgtacctggataaacccctttgggcaagttgtgatgcaaatactcaagaaaataggccacatagttacaacaggacttacctaattccccatggtcatttggctgattcagtcagttgctttcaagcctaggttcttggctcaatattattacataaactagaattttcctattactattaattttactttgtatttttctttataaactttgtacttattgcttgtcaaatttcagcagaagtacaactcctgagagaataatgctggctcagagttttgagatgataacccttgtctatgaaactgatgaagttggacttaacaacgaacactccccacagaactcctgatgctcaaatgtggctaaagggtttcatactgactcctaatcagcaatcacttccctctgacatgggatcagagttacccagaacaagttcatcctggcactgatggatgatgaaaatctaaccacagaatgattagtcagcaatggttttagagacgtattttgatcaaaaggggcaaatgtgaaagttgtctgaatcaaaatgaagtcacttgtgtcagacactgacataatgaagccaggaaaggccatgaagaaagcgttttcatgcacaattgcctgataataagactttgacaaaactacaatcatatacaaagccattgcaacctaatacacacacacatacacacactcgcgtgcatgcacacgcttctgtgaggatatctgcttgtctaaccttggactaatgtcagacttgtttttgatccttgcaactaagaatagctgtttcaaaataactcatgtaaccctcctcactttacctttaaaaacccttgtcttcttttgccaccctgagtacttccatagtttactatgacatgttctgcattgctgtgcgtgttcctgagtaaacttactatctttggagaacctctctctgttctgttatttaagatgaaacctttcaatattatacttctaaatatgatgtttgatataaatttagtttagattaccttcatcaaaataaggaagttactttctatttctttcttatgaatgattttaaatattgtctaatatagagtatatatgttgagataatttttttttctgtcaaaggtactatttattttgattttaaaatgataaagcaaccctctattccttgactaaatctacttatataaatttttttgtatatttctgggttcaaagttcatgagattgatttgtaacctccttttcctaatgtctttatgttatttctgtatccatgctattctagtatcataatatttacattctagatttagtttaacttcatcttatttttatggaattttttcacttagatttaccctatatttgctttttgtttttctttatttgcttcttgacttcagtgtttctctttctctttttgatcttttatctaatatgtgaagaaattttttctttaacatttcttctgataggctcctctggtcacaacttctgttagtatctgtttgtctggaaaagttctgatttttgccttcaaatgaaaggatatttttgctatgcacagaattctaatttgacaatttttttcagaatttttaaaatgccatttcatcatcatctggtttggccatttgttttggtaattcagttatcagtcttgttgctttttcctttgaaagtaatgcatctttttatcttttactactgtaaaaatttttccctttttctttgtcttgactttgtcatgactgtgttatgtctctgtggatttctttttatttattctctttatgttccatgtctcagatctgtagtttgaattagtttggcatttgtgttagtttgcaaagactgtcaaaaaaattattaaagactgaatggcttaaacgacagaattttaattctcacagtcctggaagctagaaatccaagacaaagatttaagtaaggttgatttcttccaagggcgtctttccttgtcttgtacatagccttccctttgtgtcttcacatgatctcttctctttaatgtgtgtgttcaaatctcctcttctagtaaggtcaccaagattagggtcaccttaatgatctcctttaacattaattaccactttaaagaatctatcttcaaatataatcatactctgaggtactggtaattaggacttcaacatataaatttaggggtgggatatttcatccaataatagccgtgtaaatgtcttatccattatttcttcaaatgtcctttctgcctcattctatcttttctccttctgagaacccaattagatgcatgagatacaatttcaagtccaatgtatctcttatgctcctttccccaattctttttcttccctatctaatctgggtattttctactatcctatcttccagtttgctaatctttccttctgtgtctagtctaccatcgaatatccttattcaatttttaattttactgtatttttaaattcagaatttccactttatttgttttttacagataattgtctagtgagtttctccacacagtaatattttttgaacattttaaaagtaatagatattttagtcaatgactgatgatttaagtttgttacctgcatcattttttaatctctttctattgtctgtttttttctcttttatttttagtgaatctgtcctgtctcttgacatacctgtttttgttttgttttgcatttttgttgttgttgttggttttggtgtgtttaaacattgtttatcaaaatcggtagaattttgtaaatgatatgatcttccttgagggacagtttactttttttctggcagatatatagatatagatataaatatagatatagatatatatccaattaggaattgagataatatctaaagtgaaaatctgtggtgtttatggaatgtttatcaatacctccttcttgaaggttgctgtgttccaattactgtatttgcagcaagatcaaaaagccaaaagttctgcctagtttattcatattttagatattgttttctgcttggcatttcaacctcttgccccaaatagtttcggaagtgacaaatacatcaaagagattatttggatagaaggtagaagtcactttccaatggtcctcttttctctagtatcttggccacttaaatcctggttgcctttgggtttacttaatactgtttattggatttttggtaatctaaaaattatttcttacaacagagacaaaaattccaataggactttaaagtggaaaaggagtcggttgaagaataatgtcagtataagatattcgtataagatattatttaaattaccattaaattaaataagcatagtagcattactggctgggcacactgtctcacacctgtaatcccagcactttgggatgctgaggtgggtggatcagtcgaggccaggagttgggtggcgaaactccatctctgctaaaaatataaaaattagctgggcgtggtggcacatgcctgtaatcctagctacttgggatgctgaggcacgagaattgcttaaacctgggaggtggaggttgcaatgggctgagatcacaccactgcactccagcctgggcgacagagcgagactctctttctaaatatataaatacataaataattagcactacttaatagagaaaccataagttatctgaaacatattgtcggcagagggggaaaaagaagaaagcagaaattcattttagaatgagaaacatattaggtgtgaaaaaactatataccactgtcatatacaaaaatataatatgtgtaggtctatttgtgaaaggcttttactctttaggttatatagttcttgaatttttaaagctgttcagacactgtaccacaacctcatatcacagtggtacccagaaaatccaaatagtagtacttgtgtaaatagatttctatttcagcctctttaaaggcagttatgtagatactcttaattttgaatttttggaaatagggaggatcattatttcctaaaattatagcacttataagtggtagatagggaattctctcgtaggtctcagactccagagcacaaacgaccaacctttatgaaatatgaacttcctggcttcacttccatctgggaggagaaatgtattcccccttatgctaatccattccattcaggacaatgctcatgggtagaatcctatttattatagtatgttaaactctacttctctgtaactcttacttattaatcctgcctatgatgaatgtgctgtaaaatggcaaagtcaaagcaaatttactacatccttaaactttaagcttattatgtttctggcatttggggctatacagttcccaggttctgcatatgtttgacacggcttcatagataaaaatggcttacatcccgaatatgatgctaaaaactgttttccaaaattggatataaaatgtgtgagtaggtgtatacatgattattgatacgaccttatttttgaaaataccatttaactacataaattatatatagttttacttatgtatttttaaattataaactatttttatttgaaataatttcaaacttagaagacttaagaatagtacaaagagcttttttgcataaactatttgaggataagttgctcacatgaatttgcatcatcccaaattcgcatgtacatacattctcacatatgtgtaaactcgtatgtatgcaatattctttctaatgtctgcgacttggggaagtttattttggtagagtcaaaaacaaagactaataaaaagataagctagaagaaactgttgttttatggtgaatttttcttaattttaaaagataagcctatttgtgaaggaaagtatattatgtatttttctattgattttgttgttcaatttgtaaaatatatttgctaattatcccagatttgggaagaaaacagtttaattagcacttctgaaatgtgtattaaggaagtgacagattcactgagactttttttttttttttgagatggagtctcattctgtcacctaggctggagtgcagtggcacgatctcggctcactgcaacctctgcctcctgggttcatgcagttctcctgcctcagcctcctcagtagctgggactacaggtgctcaccaccacacccagctaattttttgtatttttagtagagactgggtttcaccatgttggccaggctagtcttgaactcctgacctcaggtgatccactgctttggcctcccaaagtgctgggattagaggcatgagccactgtgcccggcccactttttaatgttttaaagcgttagtaccaagaagttcaaagtgactagagcctgattctaccctactcctttctcctccccaaataaactcatcttcaagaaacactttttttaatttttttttttatttttttgagttggagtctcactgttgcccaggctagagtgcagtggtgtgatctgcaacctccgactccctggatcaagcgattctcctgcctcagcctcccaagtagctaggattacagacatgtgccaccacgcccaggtaattttttgtatttttagtagacatgcggtttcaccatgttggccaggatggtctccatctcctgacctcgtgatctgccctcctcagcctcccaaagtgctgggattacaggcgtgagccaccgcgcctggccgagaaacactttctatagaaacatttatctgattatatcaacgacaacactttctttcactggtgcatgacgttgattgcctgtgtgtgtccttcagcatttatctcataaagtaattttatggtgaattacagttgagtgtgtttgtttacaatctggaatgaaatcattaaagtcaatgtcaaagatcagccagtatttcataggacttatgtattcagaaatccataactgtgtttcgaaagcagggcactgcctgatgaccaatcaatgggttttgccagctagaaaaaaggagatttttactctaatttacatgggctgcttcatggtggactacactggttaagaacttcagctctacatttcctacctcagtcattcactgactttttaaacttggacctgtcactcagtttcagaattacttttgtatatgagtatgatattactacctaatttatagcgtttttgttagaaaaaggtgaatcttgaatagtttttggtgttgttgtagaagccatctcaaggttcaaataatgagataatctgttagaatcctaaatgacctcctctgtgatgttttgctctatggtttggaaaacctttagagatgagtgtggcctggcgcttctcttcccattttcaattttagacactctaagacagagaagagaaaattatattagtacagaatttgcttaaatgtcttagttcctcacatagtccatgactgattactttaatccttgtgtactaagaaaacacaaatagaagaatcgacatttatctgtattttaaagttatgagcaactttttcttggctaacgattgatctgtaatgtcaacgtggcttgcattatatgaagttttactggctgttttgaaatggaaggtgagggtgcctcttcactttcaaatgtctgaaggaagattactgtattcgcacaaaaatatttgtacttagctgaaatggcacagaatattatagttctcaagtgtttaattccttctcatagaaattgcaagggaacttaggatgcatttggcaggcgctttctctagtgcaatcaggttgctatggcaaacctattattttaggcgaagaaggactatgttagtaaagtgctaatctattttctgttttatgtgagcctctaattactccccaactattgagcacatactgcaagtgtggtttttatcattttaaaaagtgaaaaaaaaaataaggtcatggagagtgtgcctactgttaccacaccagcaggtgcatttgatgatacagtgctctcctgaaatcatctcattctgggtcgggaatacactttttttttttttcatagaaaagtacaatgaaaaaggaagtgaacaaattgtatgtgagtaattgaactccaagcctcccagctgtgttttacttattaaaatatgataataatatctaatatttgttgaacacatactatgtgccaagccctgtactgtgtagtttgtacacattataacattcagcccttacaatcatcctgtgctatgggtattatttttactcccattatgcagccacaataaatgaggtttaacttattcttccaaggaatcacatttagttgtgtatgcaccaagattaaaatccagacctattaaaagttagagcccacatttttaattgtacctgtgccacaaagtgtatttcccttttagacacttaaacaaacacattaagactcaaccccacattatctttgccagaacctttctctaaccctgcaggccctgtgtgcacgtgcattttaccttaatttcccctgctagtaaaagtgttaaaacatccttctttcttttgtatctcaatatctagcatgatacttaccccacagttgatagtcaaaatgtgtctggggaatgatcaaagtaatgcagacatttaagattgtgagccctgctaaacctattcttcagcaagaacatgtgtgttctctatgtggggtagttagaaggaagttagtattcttcagcggaacactttaaatgtgaccatatagggaagaaacgtatgtgtatgtgtgtgcgtgtgcctgtgtgcatatgtgtgtgcgtgttgcatattcagtcatggtttctgaaggtgattacaatttttaacactagcagttcaagtccaggcatctaccctgtggcttctgagtttacagattttcaccctttcacaaatgtgcaaaaatgttactggtggtcatgcagaagagatgtacttggtcctgaataaataatgactttcctgaattagttatctgaggactctcttgattgtcaatccatgaggttagtgggcgactgtgtctgtcttgttcgtcttcttgtctccccatccaagatctagaaacttagtccctgctggtttgaaacctgtgtcatgtggaagtgagaccttaaagcgagaaaatcaaagaaagtgagggaaggagatgtcaaagtctaaggcttgagatattggttgtggttgagattatgaaaaaagaggaatccaagaagaaaagaaaaacctggaagaaagagggaaggagtgaaggtggtgtgtgtctgtgtgtgtgtgggtgtgcgcatgtgcgcatgtgtgtatatgtgtgtgtgtgttgggagagaatagtcagaggggaaagggagggagtagaggatcaagaagaggcagagaaggagagaaaagaagaagaggaatatagcttgaaaaacaaatgtcaaacttcacaatttcacaatctttaccttataccagttttagaaaattaacctctaccagaagttgacaactttccataaggcagtgcttccagatatgagtcatccatgaatgtttaactattaaaaaataagacagacaatagttaaataaaagattgtggaacaagagatgacctttccatttcttctcttaccctctgattatttctactgtaactacactccagcaattaatcaggatgtgaaccaatgaaactactaaagttttaatctatttgtaataatgcaaatgaggcaatctgtattttataaaggtcacaagctactctttttcattttgtcttatactttagatatactgacttaccctataagtaaaagaaaagttcgactttgtctttctagtattaaaataatagtattttgtttatataaatcttgcagtatcttatggataacattccaaaaaaactgtgaatgagagtttcttccaggctatatcaagtaaaatttagtaacaaagatttcagaaatgtcaagtatttcaatgaacacggtaactttcctaaaagtgtaattatttcaagtttgcagttaatttccatcatatttactaaaagacaaaagtaatttcatgttcacaatgatcaatatatattacttctattgtgaataacccatttttgccctcagttcatttttcttttgctcatttattattagttatttttattttaacttatacacatagtaatgttttcttagtgtctatattgtttgtacaaatattttgtccttgtttattgtttatattttagtcttaggttattcattgctctatagaaattgaatattgaatattttatggtcaaatttattaatattgtcctttatatttctgatttggtgtcatatttagaatagttttctcacccaagtgttatgaaaactctcacctatattcttgtctagttttatgacttaaacttttacatttgaatgttgaaacccctggaaacgtatttagttgtaaggagtgaagtaaaggaaatgaatatttttgaaacatggctcaccaattttatcaaacatattttttgaataatccattatgcccagaaaagtatataacataaatttatagcattatgaatcatataaagtaatcacatgcccagattcagaaatagaagaatgccagaatcctaaaagctccattctcacttctctgaaatcagcataccctctccctaaaaagataacctttattctcatgttcatgtaatcacctctatacctgtctttaaagttttccgcctagatatatattcccaaacagtgtgatagttagacgtgacttttttggaattaatccaacagcatgcattgttttatgactgagttctcgcactctacattatgttcttgagactcaggcattacgttgaatgtatttgcgattctttcttttaattgctatagtgtttcatttaagaatatagctgatatgtaagtattccgtaattgatgaacatttggggcatttctcctttgaagttgctaagaataatgttgctatgattattctggaacatttcctggttcacatgtgtatgcttttttctctagggaacttacccaagaattaaattgctgattcttagattatgcatgccaacttcactagataatgccaaacggtccccagaatattctaccaatttatattctcaccctctgcaaaagacttatctgtatttccaaaccattgccaatgcttattagggtcagtttttaaatctttgctaatctgattgggttggggcagaatctttttgtggttttagtctgcatttcccatgtgaataagaggaggagtatcttttcatatatttactggccatacaatcccatttgctgaagtgcccattcagatctcctgcccatgtctttaatggattgtatgtatttgttgttgttgttgttagagttctttaaatagtttggatatgagacagttgtcagatatgtgtgtcactgatatcatctctcattctgtggctcaccttttcactctcttattttctaatgtactagagctcctaattataattcaaatggttaatattttcttttttagttacttactccagcaccatttatgtgaaaagtcatctttcctttgttgcttttcagtgtcaccttgtcctaatccagtatttgtatatgcaaggaattgtttttggattctctattctattctacttggtctccacttccaccaaaatccaacttttatgattactgtgcctttaaaataagccctgatatctatttcaaaaggtatttctacctccttcttgttcataagtattttcgttattggtgctttccatttctgtataaatgtcataattggcttttaagctttaaaaaatcctgataagattttggttgtagttacatcgaatctatagatcaattaggggatatttggtattttaacaatattgaataataagcatacagtatttcttcacatttaaatctcaaagctttcatttgtctatgctgcatatacatatgtgatttatttttgtatatatgtttgctatagggcaactaatatactctcttaataatccatattatttgttagtagtttttgcattgtctacatgcacagttttcggttaagtaatttttgtttccttctttcaattctttatgtcatctttttatccttaccatattctaccgacaaagacatctagtgcaatgttggatagaactaaaagataaatttatctttctcttattcctaatccaaatagaaggttttaaaatgtttaccattagcaccaaccaattattattattaagtgcatgcatatcctttaacattttttctctcttcctctttcttcctttttcactagtaaaacactttatttactatagttagaggacattttatttggttgaataatataaaattgatgacgtctgactatttttgacttataaaaagagtcattttacattgttcagcttacctgttatgacatttctccacttattttccatagatacacacagactctgtttttaaagtatttctgaatattaccatacttgttatttcagacaaatttgagaatcatttcatcaacttgaaaacattcagtgagtttgattggtacaatattgatttattaattcaggaaaaatcagacacttcttaataagaaagtatgtccttttaaaaattataagtcttctcctatggccttcactatgactttatatgcaaagttgtataagttcatttattttacgttgctgatatttttgtacatgaaacaattttccattatattaggttgggttagtgttggcacataaaaattttttcatttctgtatgttaattttgtcacaagataccttgccaaaatgttttattcctttaaatgcatttgtaatttttaaaatcttgggcataaagacagaccatctgctaataatgatcttggctctttattatattgtttgtctaatttttattaaattgcacttaaactataacaatggttgttataaacatctcccatctctaacttagatcactccctgttaaccataatgttggatttcttttgaaaagattattatatatacctgttggcattagtatttaagcaattttctagaatagtgtcttctcaggggatgactctaggccagtgatatatttgagagtgttcatcatgtaagacagttgtttaatccatgggatagcaggaaattttggaaaatatagaggaaagaaggttcagggctgagccatggggcaatccaagatttagatatttgtataaagatgagaatccagtaatatagcctaagaagaattcgtaatccaataatagctaatagaagaaagtatttcccaaaagggcagggtcaactctcaaaagcttctgagaggttatataagatggtacagagaattggccactgggttggggtcattggagacattgctgaagaagtacttgtcacatagcagtatcttgaggtaattggattgggttgagatgagactggagttaagagaacagcagcaaacttctttttgggaagtttactttaaattgtactttgctgctatgcttttgcaacacaaggtgttttctatcttttactcatctatgttttgcccggttcctatgttactcctcccggcaaccaccaccaccactgctttcccctattagaatgaagcagttctaactaagcctccttttcctcctccttattctcctgcttctccttttagctgcctttgaggtttagtctctcatatatggcaaccatataaagagaaaaaaataatgtgatgtatttttcatggattatgctgagataatttttgaaggcagttcactgttagtgggagaaggtgctgtggtctataggtgaggtctggaaggacttcagacaaatattcaagtgctgactaatttataaacccagagcagaggttttacttccagaattatttttacatataatatattcaatctaatagcattaaaatgctatccaagaatacacatagcattctaaaattttaagcttccgttttaatgaatactttaaagattttgagctagtcatatagaagattgggtttaaggttagaatgagataatgtggattatgttgagataatttttggaggcagttcattactagtgggcgagggtgctgtggtctgtaggtgaagtctggaagggcttcagacgaatattcaagtggcaactattttataaacccagagcagagttttatttccagaattagttttacatataaaatattcaatacacaaaatgctattcaaaaatgcatataacattctaaaattttaagcttcctttttaatgaatactttaaatattttgagatagttatatagaaaattgggcttaaggttagaatgagataatgttctagtaaattttagctgtctatatattctattaaacaattattacatatattgtgaccttttagttttatactagtagcatttttttattatgaagttagtaatgctggtcaaaatgtttagggtttaattttggtgatataatcattcctccacattttttggtagtcaatatgcagtaaaatgaggtaaatgctatagaatagcagactttagagacatatatatcttttatttaacagtgtactcccatatctaatcgtgtatttcatacgaaacagattcttaaatatttgttgaattttatataaaatattttggagtaagtgaatcaaggttttcacattttcatgtagttcttatgagaaaaaaatgtactctaaggtgaaaatagacactttatctgaatcttatatcttaatgattgtgggaaaatataaatttaaagagatttaaattaagagtttttattaaaatgattacctgcacatagttgggctttttgcttatatcttgacttataatttgtctatattttacacaagttcagagtctgaacttgtttgaatttttaagtaaaatctattttgatcggaacttctaaaaatctgccttagttcattattcttctttgatagcttataatgagctttaaaatataattcataaaaaatgcagttctttatgaaatgatatcattggaatgattttatatgtgcctaaagattatctactttattaaaacttaataagagtaggcagactcaatgtagagtaaatttcagataagttttggttggatgatattgatgatgttggctgaattaatttcttctcacacagttatttctatgctcctttctgtctgtttctgaattgtcttcttgcaaattacttgctttatttttatttctttgggtatctctttttttagattttcttttaaatatgtcgtataaagtagcacagtgctagaaaggcagatttccattttccttctttctcatgtatgagaatattaatttggtattgatttcagaagccacagttgtatctccataacagtaaaacaatcactgaaataataataataatattatttagtaaacaaaagaaaaagattggactcaatttcttatctgaaatcaagtcaataaacctgtatgtcagcatccttctactacattaagggagaacttagttggctgctaccaagatacaaatctcaccgttagtctggaccgtagtgattttatcatttaacaattgggttgaggcacttgcttatctagtttaaactttgcattcagtattctactaggtatagacaaagggctgtgggatcagaaaggtgacaattcttccaggtaaccaacctgggatggcaaggaaggtttcagaggagattagatttgggctggctatagaacaccgagtaggactttacagagaaaatggtggtgtgcaccacggagggaagaaatagggaacataaagtctctgaacatgagtgctctataattgctggatatatacttgaaaagtttaagttggaccatgtgtggaaaactctgttgaagaatctagtctttgctttgaaggttacatggggccatcagagggatttgtgcaaaggaattacacaatcatatgtatgtttttaaaaagcagattatgtggattttcacagaagacccaagaagaagagtaggtttgtgaatacagatgatgaatttgtcgtgggacatatttaattgatctgaccatggaaaacacaaatgaaggtattcaggcaattggaaatgaatatctattctgggagagatataccatttcaaattcaagttctaccattaatgctcatgtattgtgtgaatatttctatagtatttatatatgattactgtttaatgcacgtgttcaataaatattgattcaaaacattatgattgccgggcatagtggctcacacctgtgatcccagcactttgggaggccaaggcgggtggattgcttgaggccaggagttcaaaaccagcctggccgacaggtgtaatcctgtctctactaaaaatagaaaaaaaaaaaatcatctgggtgtggtggcgcatgcttgcaatccgagctactctggaggctgaggcaagagaattgcttgaacccaggagacagaggttgcagtgacccaagattgcaacactgcactgccagcactcaagcctggggacagagcaagactctgcctaaaaaaaaaaaaaaaaaaaaaattatgaggacacataagaagcatagttaattttattgtatttgtgaaattgtgtgagtaggaggatgccaatgtcacagatttggtgaagttttccttggaccttgaagaatgattggaaatttacctgataggtatatgataatgactgaaacaaaattggtagtgatttgtggtagtggctaaatagaagttgtgaactgaggcagcaaaataataaacttacaaaaattagccaggcacgtgcctgtagtcccaactgctcaggaggctgaggcaggagaattgcttgaacccaggaggcggaggttgcagtgagccgagatcatgccactgcactccaacctgagtgacagagcaagactctgtctctaaaaaaaaacccaaaaaaatatggaatgcatgaagaatttactcttttttacctctctgtctgcaataaattagcctttcctaatgcattatattttaattgttaactttttaaaaaatgttgtggatatatagtaggtgtatatgtttgtgggagacatgagatgttttgatataggacacaatgtgaaataagcacaccatggaaaatgggttattcatcctctcaagaatttatccttttgagttacaaataattcagttacactttttcacttattttaaaatatacaattaagttattattgactgtagtcatcctattgtgctaccaaacagtacgtcttattctatttttggtgcccatcctaatacgttatttttgatttttatcagaagccactgtatcttataaactgtattagggttacatgcaaaaggttaattcatctcatagttgccttagtattagtcattttaaaactccaatagatacatggtgaaaaaagaattggaaattggttactatattctctgatattttaaaaagatatgtgaattgttatttatcaggaaagaaaatgtgccgacgccagaatattaacactttattgtctaactttacacaaaaatatgggacagaaattatccacaatgaaaacaacggaatgttgaaatctgaacacatatgccagtgtttagttcatcttttctgaagaggcacagaagccaatgaggcacattcaggaaaattacttaaaatgtgaattacttaaaattacttaaaatgtgaataaatttgtcaccatgaatacatataccctgaaacgtagaaactggttctatgtaactggaatgcattgcccctcaggaataatgcaactgatgatcatggcttcccacatctgtgtgtgaaggaacagttcaccatatccagaccacactgctgatggtactacagtttgcctctttctccccacagcctgcattattggaatcatttgcacatccacccatgaaaaagattagagcatttatgcacattgaaaggtgactggagttcagaaaatctaggttctaaaaccaacactactaatagatagagagctggccttgggcaaatcatttagccccagcatgcttgagtttcctcatctattaaataaattgaaggaagtcatggatccttctgacattttaccaaaaaaaatgtgtattggtatatttttccagggatagatctgtgttctgccaattatggttcttgattacaaacaacaaaaccaacttcattaaaagggataaaaaatattttattagaaggctttaggctcagaatgcaactttgaacaattagctcctgcagcaacctggggaagcaaggcactgccaagaaccagttcctgctgccatcacttctgaatgtcagccactgcaggctgagcttcaaggctcccagaattgctatgctgttgcatttgccacactgcccacagacgttgtgcctttgctttcaccctcaagaataaaagccctgaccaagggtgtctgatgtgtgcctgttctagctgccagggtataggaagagggaatatcgttgaaggagggacccctgcctcctgctgaacctgggactacctccaagtagagattagttgaaggtcagccagcacaacactgtattgccatgtctttcaccagattctcaaagggatcgtgaccccatcatgtcagctagaaaatattatgaatcattgcattagattatctttaattacagctctgaaattatatgatcctaaatactaatttttctttcccccatcatccaccaactcagaatttctttaacaagatacaagttcagcaacagagtgactaacaacattgcaaggtcagccctgaagcatcttgtgattatttcagtgggtgtgtaattatgatggttgggctaatgacagggagtaacagatgtctcggagcactgtcacccaagcaaatttctggcaaaccagtagtgattcctcaaacaaaagaaatttactttctcatatagccttccggtgctgcattagatgtacattaagatacaatgtggtttaatggttagttgtgcaaactttgaggttaatgagaatggatgtaaattttgaatctatttcttcctagctggttcaccattggaaagttacttggcctcaatatgtctcggcttcctgtttagtaaaatgattgtaatgattctagtcaatgtgtggtgttggaaaatgaaatgatgtcatgcagggaatgatagtgtttgacacatagttaccactcaataaatcatgatgaaagtcagcataatgggactagttaaggggttcccaaacgatgaaccaaattcattgcaaaaatatttataattttaaattttaagacgaggataataaagatatttaggttatgctctttgacataggttctatgctaaaatgagttctatgaactataaaattgactacaaatagtcactaaaatagcacattgaaatattacctatgaccactttttttttctcatggagcagatagacccaagattaaaacattttaaaatggccacatcatactaaattatgtcagtatatataatgtattatgttatgttcaaggaatcatcaggataagttgtatatgaaatagccagagagttttataatggatttattcaaaaatgaatgaaacaaaaattagagaatagcaaatgtgaatgacttctgagacagcaactgccacttccactccagaccaccacggaatttcttcttgaacttcagcttaccttagggaggttggaaatgtgtatttgtgtaactattatcaggcacagactggaactattctaggagatttgggtttaatagtgtgctcacctccttgaaagccttagtgattccgggactctcctcataagtgtgcactttctttatactttccaggtaaatgtgaatgtggcaaatgcacctgctatcctccaggagatcgccgggtgtatggcaagacttgtgagtgtgatgatcgccgctgtgaagacctcgatggtgtggtctgtggaggtagtaacctttctcatagctgtatgctacctgcatgcaacttgctttacctgcctttgttattctactgactcttgctttttcaattgctgttaaaaataagataaacagaaagcaatataccattgaacctaaaagcaatatacaattaggtttgtaatgacttttatttccctgaactctttatttagcaggtatgtgaaagtacgcagtacactatcaataaaagatcattgaatctaagtactaagatactttatgatcgtgaaaggttttggggcaagtcagcattttaacatgattttcattactttatttataaacactggtaggagaaagtataatatcacccacaaacttgaaaaaatggagtaagattactcttagaaatcacaagaggtatacgctcagattctatgatgcctctcatacccaaacaagagctcactggcattaataaactgtccagagaatgagtgaggcagatagaaggtagtgagcagaggtaacccacaaaaatgagagtcccaggagtagagtgctgatccgagcacctccatggctgggaatgtgggtcaacattattcttgcattgcattcttgaaaaagttcatatcgctgaggctgatgcatgtgaattacagatctttccacgtttccagtataaatgaagtgatgtggacatggaattacattacaagaaaataattatatccctttattgggggaaagaaacagaatgtgtgtcttttctaacttttattttaagttcagggatgcataggtaggcttgttacatatgtcttattggagggtggagggtgggttgagggagaggatcaggaaaaataactaatgggtagtagagtgtgtgtcttaatggaaggctgaggcaccatccatccatcctatctgtctgtctgtctatctatctatctatctatctatctatctatctatctatcatctattatctgtgtatctattatctatctatatcaatcatccatatgcctgttctctctctaaccaacgataagacatttgaaacctgacaaaaaaatactttcttctttcctttctctgtgagttgaggggaaaagcccttttaacctgttaatgactgaggttagacttttttgaatttttgcagtcagaccttggtgatgacctggagcagtaggatataaaaaactcccacatgcttagcgtcccaataatggaacaccaggcataaattcgtaaaacatctgctgtgctgggcagtttatcttatgccattgtcatggcagccaccctaagagattgtttctactattttttctttcataaatggaaaatagagtgaggttggagaagttaacatcccataactaaaatgtggcagacccagaatttcagctctgatatttagttcacagatcgttccttatgtcagtcacagttttccctagagtgacaccaacgtgttttaacaatatgtcaatattattcttaggttaaatcctctgttcactggtattagttaaccagaaatacctatgtaggttttactctttttgtttgttaaggacatgacatatattaactcatttatttatcatagcaatatgtatgtatgtatatatacgtattcatgtataaaaagcttgcctggccccttgaaagtgccatctacatgtctctgctcttgttaccattgttacttttcttttcttttcttttcttttttttctttttgagacagagtctcactctgtcacccaggctggagtgcagtggtagaagcagagctcactgaaacctcaaactcctaggctcaagcaatcctctggccttaacttactgagtatctgggactacaggcacataccaccacagctggctatttattttttgtggagatttgggggtctcactaagtggcccagattgatcttgaactcctgggctcaagggattctcctgccttggcctcccaaagagctggaattacaggtgtgagccactgagcctggccagaaatggcttttgtatgttttttctgtctatttgttgctttggagtaatctcagtctcttccactttcatatttaggtcaatgtctcttgaaatgattgatcagcaatcagtcatccttggctttagattcttttcaatttctaataaaagattttcatatgggaattcctccaaattacgcatggtttaaactgaagtaattattttttcattaactaaacaaatattcattgagtgtctactatttgccagcactagacattcagtggtgaacatagagcatttgctctcctggagcttatggttgagcgtgaagggaggacattgagaaaggaatgaaaaggagctgagtgatctgaaaagagatttgattcaatgggaatatacataacggggatttaacataggctgaaggctaagaaagacttctctaatgccttcatatctggataacaactatgtaatgcagactatgtgctttacaggtattaactacacctcacaacaatacttggtagtaataggatacatggaacttggccaagtaggggaagtggggtacagtcagagagcagcttgtgctcagttgtgtgggagaaaagagagtgtgtgacgtgtgccaggaacatttgaggaccagagaaaaaccctgtgtgattgcagattagaaaaccaaagggaaaagagtgtgacgtgttttgtaaacatgttaataacttgaggctttactctaaaggtgacaggaaaccaaaggaagggcttaaacagagcttaaacatgatcacagtgttttaaaaagtacttctggttgtcagatggagtatggattgctccaaggactatgtgtgtttgtgggttggtaggtgaatctggatgttaggagatgagccctggtgagagatgaaggtgccttagctggatggaagacagtaaaggtggaggatcttgaatgtgttggagaacatgttagaagcagtggggtcaagagactaacaaaacccttcaccctgctgcaagagactccagcactctgttaaactcctagctctggttccctggcaacagatgaagatggtgcattgcagtgttaacaagcaacattgctcatggtcataatgatttatgattgataagtttcaactacattggaagagatgatgaattgaactataagcagctgatgggaacctcatgcttttggatttcataagtgtcataactctgccaacagtcttgtcccttgtgggctccttgaaagctgtttacggaatcatcgggaaagattttggctcctgttgggcgtgcgacttcttctaagccagaaaagcctcaacatctgtgcagtgtggatctcatctctgtgcatatgggctgtgttatcccaagagaaaatagtccccaattatatgagttcatcctcatgaactcctgcaagaactcccatgggtatatcctggtgcctgacagtgcctgctggtaagatgtggctcctgtcccacagccttcaaaggagattggtggcaagtgtcagcctgagagcttagttgaaacttagagctccctccccagagtacaagcatatttaaggaaattcatgattgcacaatatgaggggcagggtaggatcaaggatgacaccaggtttctgttttgagcaactgaatggtggaggagactatgcttgtcttgaccagttgtctccatttcttgaaaaattggtttcttcacagagagcaacagagatggagaaacttggatatgttgctccctttggaacatatcccttgggtatgttagttccctctcctagtccttattgtcacttctccttgtgaataacttattgtctttccattcttccatgatttttccaaattacctcctataggaagcctctctgaaatgatgtcctacttcctctataccgcaccacctgcatcgtagtgtgatgaagttgtattgagagtgtccctgtgtcccttttctttaagtctacaattctcatggatataatcaatctctctctctcattatcatatgctcaaagctaggataaaggttagtgctcaatatttttatttgaataaatgatcaagtaaaggattcacaattaaggagaatgagaaaggaagaactattccagttttggatacaggattcttcaagttgaggtgaggatgtgatttggaccttgaacaactagtatttagatgtgcagaaataggatgtgaagaatattttaggcctgggaaagctgggcaaaagcacacaggtgaaaagttatttattagatattgaaggaaaatatcgatttcattttttttttttacatcaagagctctttctcagctgcttctgtacccatcattagaaaggatttttttcacatattacttactcatgtattatttataatatatattatgtcaccttcatttcttatacttggctcatctttagatatcaggtctttaaaaatattgttaaattggtgtttttgctttcaaaattaaaaaaatatatagagagaaatggaaaccacaaaataaaaatcacccattaattgatcatcctagaataatatctgatgacactatgttgtatttcttcctaggttttgtttctgaggagtaaaattattttcaaaatataaattcataaatcttctttgggtattttgatattttgtctagagaaagtccacattgtatggtatcctcagttgctttaatgtacatggtgtgcactttgttgcattttttcatgtaagatttaagtgagaagaagtaaccattttctttggaattaagtgaggcagtgccatatagcaagacgaatgggaaccctgtattcagacagaccaggattttaattctgggtctatttcctgcttattgtagtaacttggacaggttgtttgtcttctctgctttggtttacctatgtatttgtttgacctgtctaccttggtttactcctatatacaataaggataataatccatttggctttatggaaagaaagagacataaagacggaaatgtgcctggtactatgtgccagtgaatatttgatgaatgccctgtatctgtaataaaaataaaagattgtagtggccatctgcattacagaacaaaataatacatctgtctcaggtatctggaagcactagctgcagagcgttttgcaaggaagttggactcacacaaatcagcagctctgtacctcggggaggaaattgcagctggtttttccaaagcaattagtcccccccatcatctctccagtggagaacaaatcttactaatatgagaatgtgaaacacacagacatcatccctctgttatggcttcagagaataacaaaataagagagtcactcattttggtaatttttttagttctccaccagacactaaaccataagatctgtggcctttcatatggagaatataaaacctatatatccaacatgtggccagagagtaaaatatggtacttgactccaaaatcagggactgtcttagcattttagcaaacaagcaaataagtaagataaaaaacatgtataaacttaactgatcagcagatgcatgagcactaagagccaatagtgtttatcccctttcctaccaataacactaaagatgattaaaccaattctgataggttggataaattagcaattgtacctgaaggtgaatgtaactaatttcataatttttacagttcagttttgattacaccaaaattacaacctggaaaagagtcatgaaaatgactagcagaaagaaaatcagcatgaagtgagatcgttcttcatttaattaacttgtgagtcatgttcaatcatcatagactgtctgtggatgttctcaaaacatctttattaaaagaagatgttatgcaacctatgcatgcatggatttattatcagataagtcactatttataaaaagcatgacttgtccagtgatagttcgtaagatttatttattttattggtatatcattttaagattacacaagtgaaatatattcacatactggcacatgtgtgtttaattgtttagcctaatataagttaaatcagagacttccctcctgtgtgccatatacctagggtgagaataagaactaggctgcttattgcttttcttctttcctctatactcctggaatagctacccatgagtccaatttaaaaaacaagaagggataatgaagagccacctcttaattacacaatcagttcacatttcttcagggagttctctagttcatcgctgcaatttgaaggagatcatgccgcctgagagtatgaattcagtgactcccaggcactgatggatttcttgtatgaggaagagatcagatcacacactcagactaaccctttcttaactgaacaatacagtcagaatgtgattgtctccaaattacatcttaaaattgcacacctgtttcgtgaatttgtaagaggatcagttagtcctgtgtttggctgaaggtgatagacacaaatactgagtcttcaggttgtcattccagggttggatggtgaggcgactgcctgagcaccacagtgtccctgaaccccatctctctcttctgctctgcccttccagtatgacgtttatcattgttatggtttggctgtgtccccacgcaaatttcatcttgaattgtagtttctataatccccaagtgtcgtgggagggaccaagtgggaggtaattgaatcacgggggtggttttctccatgttattctcatgatagtaagttctcacgagatctgaaggttttataaggggcttcccccttcactcgactctcatacttcttcttcctgccatcatgtgacgaaggacatatttgcttccccttccaccataattgtaagtttcctgaggcctccccagtcatgcagaactgtgagtcaattaaacctctttccttccaaattaccgagtcttgggcagttctttaaacacagatgttgttatcaatgaatggtccatgtagatgattctccaacagttccaccactcctgggtgttcctcttacaggtctaagtggcaacacagtcgtgttggtgagacaaaagatgaataaaactacttctatggtcttattttttaaactcaaatttccaggaacattccacttagtagacctccagtatgggacacgctcctttgtcatttcatgagacaacacaatcttagttttctccttccttactgaatgttcttgtctggcttctctagttacctaactctaaatattggggtccccaagactaatttctccctggatagctgcttcacttctagggctttaagtgccatccacatttgtaagctctaacatgtgtatgcctagagccagcactaacatgttctctgagcagcagcttgtgcctagctgcttacttgacctcactatctcattgtcttaagagtgtctcaaatacaacaggctcaaaacagagctgtttttctgccctcaacctctttctcctgaagtgcccctacccaataaacagcatcattattcacactatttcttctagctagaaaacttgtcttgtcttttcctcacttgccacatccagtccaacattgtgtcccacatatacaggctccatcaccaaaatagatttccatgtacttctctgtgtttccactgccaccactgtcctttaagcttctatcacttttcacttggaaaacagcaagaaccctctaacttccccatattcattcctcccaacataccttaatctgtcccacctagttgccaaatgagtttgcaaagtgtaaactatatcgtcacatcattcacttccttaatatccttctgtcatttctcaatcctcttaaaataaatttagattttttttaccaagagtaaatcatttgctatgttctcatttctgagaagggaatatttctccaccttcattattcagtgtttttgacttactattcttcaaacacgttggccttcttttactgcctgtaacatgccaagctatttcttgtcccaagaacttttcatttgtttttctaggctctgttcctagaacattggctgtctggctccttctcatcccttggctgtcactgaacccttccctgactaccctagttaacagtgttcttgctattgaatatactagcattttctttttgtcttctattactcaaatgttgcttatcgttattttcttccctagaagaccgtaattaccatgaagacagggccaatgcctattttacttactgttatattctaagctgttaatacaattcctgatacatagaaaatatttcttgaagagataactaaattattagagtttattaaaaagagggtattgaaagttgttttgttcttaagtaaagtcatataaatgacaactcaaagcatttgaatattaatgtattttgatgattggctgagctagataccaacttaacttcgtggaaggatataatagattagctaataataaaaaatcatcgccaggcacagtggctcacacctgtaatcccagcactttgggaggccgaggcgggcagatcatgaggtcaggagatcaagaccatcctggccaacacagtaaaaccctgtctctactaaaaatacaaaaattagctgggcgtggtggcacatgcctgtaatcccagctattcgggaggctgaggcaggagaatggcttgaacccgggagtcggagggtgcagtgagtcaaaattgccactgcgctccagcctggtgacagagcaagactccatctcaaaaaaataaaataaaataataataaataaataaaaaatcatctattttcttgcataacattttatattatttgcaatgagatgccataaaattattcttaataatattgtaaatcaaaggcagaatatcaacttctaaaaggggaaaaattgtctcatactacaacatggaaggatctttaagatatgttaaataaaataagccagtcatgaaaagaaaaacactgtatgatttcacttatataggtacctagagtagtcagatatatagacagaagctggaatggtgatttccaggagctgagaagagaagggaatgggacttactgttttatgggtgcttagtttcaatttgggaagatgaaaatattctagagatgaatggtggtgatggttgtacgacaatgagaatatacttaatgctactgaaccatacacttaaaatggttaagatggtaaattttatgttatatctattttaccataataaaaaatattgtagaaaaaagtagccataggtctactttaattatctgtttctttttatgtgggttttaatagattgtgtcttcacggaattggtccaaatgatccaggttatcagattcttggacaaatcattgtttgtaatattctattattatccttttaatgtccataaggtaagatataatcatctctctcttaattttcatattgaacatttgtgtcttctctctttttacttgtttagcctggcctaatatttatcaattttattgatcttttcaaatagccaacttttgttttattgattttctctgttggttttctatttccagttgtattgatttgtcatggaattgattgtatttcttttcttatgaccaatttagttttatattgctcttctttagtgttttaaagtgaaagattacatcactgattttatatttttcattgcttctgattgcattcatgctgtaaatttctttccaagtattactcttgctgtatcctacacattttcataatatgtattttcattttccatatagtactaattaaatttgaaaaaaaaaggcagaaaacaaaaaaaagacagaatatttttctatgcaatacagattaaatgatttcagttgtgtcaaattgtgataattcttaccaacctagggtcagtaagaaacatgagcatttgagaagttcatagcccaattgagctggtactagaagctctctttctcttcatttttggtttcttgtacaacagattctctgccttcaaagatggacaactttttatttaactctttaaggacatctggactttaagtggactttggttttcatggagaagtaaagatgtactcaatttaacaattattcattgagtagataggggcgtaggggtgccagttttctaacttggctctactctacagtttgatttgtgggtaaaaatgagaaagatgttttgaaaaagacaatttcaatctcctccaagtttttgaagatccactgtgtctcaggcattgtgttaggcactctgaagactacagtgctgacagaagtaatactcagaaaattcatagtagagtagtggattcatttgacacataactatataccatgagatggaagtcaaaaaagttccacaggaggtaaaaaaaaaaaaataaggtattacagaaattcagaggagagacaatgagtctcacttagggatattaggtaaatcttcacagaagggtagtcgctttttgctgagctttgaaaattactcagaacctgaatgtgtatagtaagggaaaggtacttctacctctgcaaaaacatgaggtcagaaaagcatgacaaatgtgcaggaaacaatgaatgggccagtttggttaaagggagaagagaaggaatacaattggaaatgtagcttctgtttttcaagaagctaaaacataacaaaggctagagtaggtaaactctatgccatgagtattaggaagttatacgggactaaatatcaaggcaagttgtgctgtaggaatctacgagccagagtattggagagacatgacaggaagttttttccaacgttgtgatggtgatgtaagtgggaatgttggaggtggtttcaacaagacttgacaacaagctggatgagggcagtaagggaaattcaaatgagactcaaaacatcatgaactggttgattgaaaggatagctgttacattaaaagaaatgagaaagacaagcagcttttggaaagaaaatcatatatggatgtaggagatcggtcagggtggtgggaaaaattgtagaagatgcaaaccttcttggaaggctggaagattttacaaaagctttggaaaaggatttggctgaaggcagccagattctcttatctggtgaaactaatctaaataagtaagttaacataggccttggaacctgggctttgatcatctgagtgcaggactactctctctggggaggggaggggacgggagagaccatgtaaattgcccacaagtgtgttgactcagagcctttgtgattaaatctatactgaataaatgcctgcagtgccagcttgtcagggccacggctgctgactctttacagcaccctccttggtgtctggtgtctgtgagcagcctggtcccctagcccactctttcactggatacctgtgtctgggtgcatttgttcatccgttgttccaccagggtctatgggtcggaccctgcctatgtagctctggaggtattaagtggggatgctaatagaacacaaagtgtggaatcatgaaaggggaatgtaggagaaaatcaggggctggagatacagccctgtggtcttggcagttatctgaaagcccaaaatttaatggatttttcaagaaagaaattatggagagattaaaaaagatgattaaagataaacattgggtgaatacctgcacttattcattcagtaaaaaaaaaaaaaaaaaaagtagaagaataaatagagacaaaggaggagtgttgaatgaggccaagagaattttgtggcatgccaatagagaagagacttgcaaggagagaaagtgcctgtgaatatcaaatatataccttcaaatgatgtggtggttgaaagagacaagaattaagaaatcctgctgtgtctcactttctaaagtgaaatatagaagcaaagcaacacattgggaagagtgtagacattggaatcagaggaactagagtcagttccgatctggctgagccaattatcggtcacatgtttacatgcatgctacttttaaactttaatggtttcagtttttgggttttttgtttgtttctttgtttgtttttactttgcatgtaaatcaagctaggtgaaaaagaccacaattacctcatttatttgtttatttatttacttttttccttttttgctaacctgtgtgacaagaacagtcattagccttagaaagtgccagagcacttgctgattgagtgcatgttaaaggtatggcagcgacatttttcttgcagatttagtagtcccccattcgtatccgatgtttttcccagaatattttttaaaagaatgtcagacattcctagtatcctgtctttctttcaggatcccaattttctccaggggagcaacatatgctggattaaaaaaccgctctcccagaccttctctggctgttaggaggcacttgttgcatggcctgtgaggtagggatgtggtataacccagggaaaatctctcttatttaatttaaaaagcaaaaaaaaaaaaaaaaacaacaacaacaaaaaaaaatagttttccaagaaaccctctccaggagacttctgcttacctctcagtgatcaaaaaccttttcaccacagttacttaccacgtcctaccgatccgcattctcgcaagtgtccttcactccatttactctactgcatttttcactgtatttctcatgccaaaacttgggcttctccaccagtctgcacacgttcatgctctcaattctcacagccatctatttcattctccactaaactgttagagggatttctgtagaaattaaagaaattcctatcactcctaaaaaaaaaagaaaaaataattataataattaattgcaaaccattaagcattggttactcatcctccctgtggagagctgaatggagggggagcagatggagcaaggttcactcctgagggtcctgccagagcaaatggtcaggagagaacggtgtcaacagcttcagagaggctaatcagtgtgaatgatgagcgtatctgtccctgggagaagagcagggaccactttgtccatggtgcttgattttgtatcccctagtgcatagcaaaatgctctgttgataacagatactcagtaactcttcgctaggcaaatagttgattcagagagaccctgctgtaaggtaatgcacatatcaggaaaaggaataaagggtcgagcggaaactgaaatggaagaaattgaaatggaatatcatgcaatctaatggtgtgttggtggcaggcaataaacaggtgtacatcctggtatatagctgtcacaaatacaatgttacatatataccaaaagataaacatctgaaaaaccaggaaccaatgtcaggaaccaaaccaaaaaaaatgtgccaaacatgaatccaagctaatgttaatttttatgcaataatagagagacaccattacttccacttgtatctgttgttatttgtaagcagagaggtatacagataaactaatatagtaccaaatgccatttgtatgaaagttacccttttgttttattagtaagcaataggagaacaatcaataaatactgccaccagtggtaatgtgactagccttgcaaattggtctggatggcatggtgtgtgcaatgaagaatagcgctaagactccatactgataaaaatgcaaatgaagaagtattttctatcaagaaaggtggtataattccatttaaaattattgcaagatttctttctctcaagtcatctcctatgctacattcaaatttattatgttaagctagaactctgttgtaagttctttcaaacaattacatgccaaattgactatgcataaagaagaatgtgttggatgggaaatgagatcctatggtttacacatttctttcttaaaactctctgcttcagctggttatttcctcatcctctcactcctttcctgtggttgcttcacaggccacggcacatgttcctgtggtcgctgtgtttgtgagagaggatggtttggaaagctctgccaacatccgcggaagtgtaacatgacggaagaacaaagcaagaatctgtgtgaatcagcagatggcatattgtgctcggggaagggtgagtatctctgctggtgcctggactccattcctgttctgacacatgatttgtagaacagcatgtagcaactgtctttcccagactgaactttgcatgaaagcaaaccactatgtcctctgctgtccccaacttgaagcttgaagattaaccaaatgaagttttggatctaagaaaatgaaatgcgtgtgagaggattcatgcaaaaatatccttgtatgcaaagttattgctgaatgaaatagaattaatacttttatcaagaaattaggacaacaaaatataccagatactaaatggacccaaaaatggggaaaaaaggcaaaagaatgattattgggctcacctctgaaacaacacagctcagaactacagaaaagtaatcacaagcatctgagctgcccaaagatatgactttgggaacttctggggctaaattatttagctgtatgtggagcaggggaagattgaaggtgtgagaagacataaaaggagacaaaatatttaatttagtttaatttttttaaaaaggaaagaaaagctatgggggaggggtagtatcccacaagtctgatggaattttctttgccctaaaaatcaccaattgttccaagtaaacatgtgcagcctgatataagaaaataggtaattgttcggttgggcaccgtggcccatgcctgtaattctagcactttgggaggccaaggcgggtggatcacttgaggtcaggagttctagaccagcctggccaacgtggtgaaaaatacaaaaatctactctattaaaaaaaacacaaaaaaattagccaggcattgtggctcacacctgtaattacagttacttgagaggctggggcaggggaggagcttaaacccaggacgtggaggtcgcagtaaactgagatcacaccactgcactccagcctgggcaacagagcaagactccatctcccagaaaaaaaaaaaaaaaaggtaataattaaacaaagaaaacaaaagcctgccaaatggttataacctacaagttggttgaatagaagccaccaacccaataaaacatttgccatggaaacatattaaaggaaaaagcaagccttctccatctcccatcctacacacatgcaaacacacacacacacacacacacacacacacacacacacacacatacacacaaattggaagaggattcccctgagtaaagaatgctaatagattaaattttgaacaccttgattttgatgtttctgtatactattcttgaagggactttaaaatcctgccattgtaatgcatatggcatcatctagaaagctgttgtgttcttctttgctagtgactaggaagacacagggagcctgaaagattctcacctcatgtctggggagcagcgcttcaaagaaactgaagttaggggcttcccagctctcctcttcagctcagtatcctctttacaccacagacacacttttttttttctgacaaggcacagctctggctgaagcttcatttaccctcaaaacctctgctggtcaggatgaccaggtaaataattttctgaagaagacagcaaagcaaaagtgtgctagagacactgaatcctgttgccaaagaaccacaccagtgaggctgccacacacgaaggaaggaggtctctgaagcaagatgtgccgtgtgtcccctaaacagtagcttttgttttgcctcgtatgcaagaccaatgctatcaagttgaaagagactttttggcagaacttcagacatcaaagaggatggatgctgtgactatctgtggtgccaagaagggggatgaaaatgaatgcagatgtattcacttcaatagatgacagtgtccttggtttccaggagttctgtgttcaacacttgtatttacaatgctcaggcaaggaggccatgccatcaacctaatgtcattacagcaggcaggtggaaaatgagtttaaagcaatcgctttgtgccttgtttgttctctcactaattcaatctaatctcaagccccaaacagatcttccaccagttctgttctcagggggcttcagcccctagaaacacctaccttgaattcaagctgtgttgggacaaccaaaaagaaggaaaggttaaaaggaagaaaacaagggaaagaattggggagaaggagattaaggaagaaaagcaggaggccgggcgcggtggctcacgcctgtaatcccagcactttgggaggccgaggcgggtggatcatgaggtcaggagatcgagaccatcctggctaacaaggtgaaaccccgtctctactaaaaatacaaaaaattagccgggcgcggtggcgggcgcctgtagtcccagctactcgggaggctgaggcaggagaatggcgtgaacccgggaagcggagcttgcagtgagccgagattgcgccactgcagtccgcagtccggcctgggtgacagagcgagactccgtctcaaaaaaaaaaaaaaaaaaaaaaaaaaagaaaagcaggaaaggaggcagggatggaattaaactgcaagagagaagtaggagagaataaaagagatgttatcagaggggaatgatctgtgtataaaaagatactgagaatgaatcgtttttgaattagatttttttttcctctgagcatggcttcagacatagagcacttaagtttagatacttttttacttggttttctgtaatggcattgtcactgggataagaatagaagcttttcacagaagctctactgaaaaagatacccatacatattaaaacactagtgtgcttatttatatttgtttattttaagagtcaactattgtttgtgtttgtgtgtttactacgctcactattgaatcattaacactttccataagcgggtcttccctaagacctgtccaactgcgagtacaggaagaacacacaaagccataccctccagggtaacaaatagcagtcttccatttcctaaactgaaggtcatgtaacaagagttgtttcttctcagaaaataaatatgcttatgaaagtcattacagccctaggaaagattctcatctttcagcatcataaatgtagaaaatacaaagaaaaaaataggttgactaaatattgactcaaaggcatttcctgaaaacaaaacaaaacaaagccaaagagtccctctagctaatgcctttgcaaattgtttgctttgggaggtggcgatatattcagagatcaatgaagggttgaaagcatatttgtgtaaactatttgtttatccttcaatgggtagggagtttgggagtccttaaacttaaaagggaatatgaaagctgcctcaaggctgcacattttgacattcatgttagtggaccggcctccggactgttggcagcagctgatcgtgatctcccttcttttccccttttatggagacatcaatgctggattatcgatgacgaaaggggataaaaccaggatcatggaactgtgatctatgataggcgcagaggataatggggatgccacagttactcctggttccagtggggagcactaccccacaacccaccctgagaaccacaggaaaagtaatgcatgaaatagactaagggactttaacatggtgatggaaaagaaaaacctgtttccgattttttgactggggccatgtatttctagatcaatttcatggacttgtccaaattttctatcatttttctcaaatttgtcaatgaaagtccctcaccctgatggtcacaaaagatgttcaagttctttctttatttgattatgggacagatcttagcagtgggcatgagatcgccatggcacacagcttggtggcctgtacccaccaaaaggctgaaacgtgcacttcccatgagctgtgaataaagctgtcacctcaggagacgatgaagaaatagcgttttatttctttacaaatttatagccaagacaataaatcactccatagaaaaatttaaaacaagatacattcttgtgaccttcataacagatggagtagttagtacaatagtgaaaactgcctgctgggatgtcaggttgcagcattttgtcaggcttgaatgaaaaagaaagtccaacattagtaatggaatgggcaactgacaaaggtgccttgcccttagactcaaattgtttttgtgaataaccaagagagatgaggttagtgcagtgccgggtcttccctaagcttagctacctttgcaaagtacatgatataattcattgtgggttgttttgttcatttggggatttatttggcttcaagactacacaattatatctttgccttgactacttcaagctagatccagataatcacgtccaatcttcttacagatgctgttgtgtgacaatggctgtaaacacatgtcattaactgtctccttaaactctcacagtgatacttcttgggtcccacatcttccaaagaagtccagcatacacacacactcacccacccacaacctgtcccacatccccagaaaagagaaagagtgaaagatgcttcacaaaatcggcctcagcctggtgttcaagttgcctcgctcaatatgcctgtgcagtcagacctgcaggaagaaacagctcatttttaaactactgtatatgaaagtttttgcctggagatacatcacagataggcagatcactaaaaagaagagtggattgaatcagagtgaagtcttcagttaactgtttgtttattgcctgtgaggtccaggacagtttcctttattctctcttccattctcatctttgaaggtaaaatttcatttctttccccttcctatgtcctaagatgccctgaagacacatgagaaaatgtggctgattccccagggatggaagccagcaaaaatgcacagaagggagatgggaacattctcaagggtccttatattgagaaagaaaatgaatggattagtggtgctgtggtgatgaactatctgccctaaaactcctgccaagatcagccagctgttctctggctaggctgggtctcaggggtgtgagtgggtcttggccagctgagttgaaccatttctcacctcttgatagtcatgcagcctacatctgtctgatggaaccctctccctgtgtgcttcccatttaagagaggcacaatttgacccatgttatggaagaaaacagctagagcgttctacaggaaaagtgctataataggtcctaataactattcacactgtgttattactatgtgctatctagttctagtttcacaagcagtagaataatttcctacctctaagatgcactgagcattgacaaacaggaaagaataacacagctgggaaaatgctgacctagaaatgctactgtttcatgacacatacaaaatcaatcctcattttttattctaagtatttcagcgactagtagactttcagaactggaatttactcatcaaatgttctatccatatatgccatattagctttagctgagcttaccagttttctgaaaatgctctactatggcatgaagctaagcattccagaagcaagagcagtgattagaatagttccagggccagaggataagtttgaagatgaaatataagatatttcatgaattgtgacatatataaaatgatatcctgggtgtatatatgaatattatgggcatataaaatcagcactactttagaaacaactaaagacagccaaatacttcaaataactaattttccttcactcatggaaataaaacactaagtatggtgcctttcgaggaaacttctctgatagtcaatgaaatactccatgtggtctttgttggcagatatatcactatccatttgttaaacaagcagtagagtgctgtacatttttttatgcctagaaatgtgaaagaaagtcttcaaaattaggataaagaaatctctaaaatcaggaaattcctcaccttgatgagaccacaagggaaccagcatcctttgcagactgacctgggagcagcagctcactgggtcctgagaaaccacagggctgtcagtcaattattaaaactgagaagacgtgtatatttcctcaagagcatgcaaatcaacctggaccctcaggaaaacaagtcaagactaaatacaattatgccatagctacgcaagaagttaaaaaacacaattgtcacaatctaaataattctgactgcactcttactttgagaagtgtgtcaagaaatggcaaacatttaatttggactttggggatttttgcagctgaaatgcatataccagtttccctgatatgaaatatcacatagttgagacacatgaacctgaatcctttcatgatatctgtgatgaccacaactcctttttcctgatcactttaatcacccaggctgttaactcatttttaatcactgtgttttaaaagaagcactaatgattgattcttgccccttttcaatatattttgaacttaccaattctgcagttttgttaaatatgtcaaaatactcttttcaactgcacattttttcaacgtgattttgactcaaaaagaatacagccatcttttagtaaatggaagtcatgtttggaaagaacaaccaacccaaggaaacagaaggaaaagaaagtcctttttatttgtttctttttcattgtaaagtctttcctgctgtcgttgaggcagtttttccatgtaagggtttttagtctgtcatggaaagctgtttagactgagagaacttctgtcttggataccattcatcatctcatttattttcttttattttaaatatatcattaataaaatttttactcagtaagtaaagatattttaaataaccaaagaggaagttttttagttaggtaggagaaatgggtgaagtggagggaaaaagagttgaatccagagcctcataaaatatgaactttgggagtaatttgagctatcccagtttatgacagagggtcctgaggatgagtctcacaaggcaaatatactgagtgactgtatgcatttttagcactttaattagccacccaatatgcaggtgtgctcctactccaagaaaatcatgtaaacgaaaatccaaaattataagcacaataatttagtagttgttttaattagaaatgcaacctaatttaatacaattccctattcatttcctttaaagagcaggcactttaaaaacatgattcaatttaggaggaaaaaatctatttttgaatacttttttggaagaccatctataagaatcaaccccatcctgctctcattgacatttcaaccagactgggccatgggacatttgttcaaggctaattgcaactgtctagatccataatgaaggctttcctgggtgacctttatgaattacagtaagtaaagctcccctctgagaaaccagccattcaatacacttttacctttggatgatgggttattagaagcctgttgtcagtgtgtcaacgatattctattcgagatggaaacctttagttataaggtgatggtgagtaatagcctttgtaatttcaggttcttgtcattgtgggaagtgcatttgttctgctgaagagtggtatatttctggggagttctgtgactgtgatgacagagactgcgacaaacatgatggtctcatttgtacaggtgcagtattaaccttttctaattgctctatgccacagtttgttatagagccaagagacactcgtcatgcaatgctttaggtggctggaccaacagggccaaccgtgaatatgaaatatctaccaaaggcgaagtgggcatttgggaaaaagccctcacaaaagcctcacattattcctaggcatagaagaatacaagagaatgaagctaaattttgtgattatttgggatccttccacaaagtaacctccccaccctcaaactcacatgtatgcagttgtatattgaacacagaaaagaattttgttggcaaccattttactttgaacatggtatagggaatgaaatattcttttaaacagaatctgggtaccactagttgatgtgttggttgcttttagggaactggatgtgtgtatgggggagaggtataaagagggctcagccgtgtcatagccactgctatcctaatttattgagtcctcataattggttataaattcatttgtttagccaagttacgaggaaacagagacatgtatacttctcctcagctctagctgaaggtaaaagatgactctttgtgtgtcattaagttagacctttgctttctgcccatccttactacgtaagactctcttcacggattacttggcctgcctcatgttatgtcaaagagccttatgtttttctgtatttattcataagtcagatataacttgctctttaagggaaaacaaaattgtcacctaaaagcctagctggagtgatacaggatggtgactatctgatcggtaaagggtggcaccaaataaatgccactaattgtttgaaagattagatgtctcgcagctgcttaataagatgtaataataacatcattgcacaataagaaaatctaccaaggatgaatgaaatgatttcattgtggacacttgtgatttataatagcatgtttaaatttggcacattttgatcataatcatgatacctatatgtattttattgcagggaatggaatatgtagctgtggaaactgtgaatgctgggatggatggaatggaaatgcatgtgaaatctggcttggctcagaatatccttaacaattacatgagagaggtctggattcttattttttctgggccattagaacagataaatgcgaaggaaaccatgtatattcaccactaggacaggttaaaaagaccattgtatgtttttctatttctgaattacgaatgaaatccgagtacctattagaaatgagttatgcaaatttagatgcaaataacattagaaaaaaaagattcttccataattaacataagtggttcctaacgagagcaatttttccacccaaaagtcatttggcaacatctacagacaattttgattgtcacactgggtcgggtaggaaggtatgctgcagacatttggtgggtagaggccagggatgctgctgagcatcccgcagtgtacaggacagcccccaaacaaggaattatccagccccaaatgccaatagggctcaaactgagaaacattgagttatatggctattagaaatccacattcttacacaagaaagaccatattagaatctaaggaaaacatgcatattcacattaattaatcgatcagatttttccagaattccgtatcagtcaccattttaatatggggacaatgaagacaagcacacaggaggtagaatatcagagtggggctggatcaagggcaaaaactggtcattaagtcatctgacattaaatcatttagccactaagttatttgtctactctcactttaaactcaccaaagaagattctcttaaagaaattatgaaaaatgtacaatttaacattttaaataaatagtgacagaagttgtttatactctgtgtcagtatatatatctactgataattaaaaatgaattgttattcagggatatctattttaggtttctagaaataagggatcacatttttaaaactgggcaggggttatgcgtacaagaaatctgattttttattttaatttattccatggtagtgtggccttttaaaaagacaatattgagttacatataaaatgggcctgaagtatgcatccatttcccttaaaatacttttttttctaaggataccttacttactggaaacctggggtcatgcaaagaagtcaagacgagaaatactgtgataaaatggcaccaatctcagaagctcacaaaagaccaaaaaaaaaaaaaaatctagaaatggcttaaatagaaattacaaatattcactcagtgataggaacaaaatgtttattttcttaatggtgaaactttgctttgtatgaaattcacattgaattatgaaagtgtacaataattgggacttcccttacatatttacaggtaaatctacttatacacattagtttaggcaacctttaattatttagagctaaaaaaaaaaccactttttttctaaaggtgaattactttgtaaaatcctagaataatgtagcaaaatcatttccgtattactttaagatgaaaatttttacttggaaattttattttaatgatgtaaatattctagtcatggcttaaactttataagtcaaatttccaaaaataaggaaaatatgcatccactgagttacttaaaaatttaatattgaaaattattttaagagaacatttaactgatcctgatttttatagtactaacaatgttctcataatgtaatagatttataaaaattgttatctctatcctgagattaaggagtgcaaccatgttgtagttctattattgagtacgtaaattgatagatctcttccgtaaaatgagggaaatataagtagtcaataaataatgtaggttatattctttcctcttcactacctaaacattttaagctgtgaacaacctattattattgttttgtagcaattttgatgacgtattcgctgatgcacagacattggaattcattacattatctagccatcgtaatacaaatgacctttggatttctctatcacggcgcttatcctcctattaaggatcagaaagttaaactttacggaccacgtacgtccctgtctcatattcttctttgttggtttctgtttaatactttaaagctgtaaaaaaaatttaaaaaattccttctgagctcccaggccatacaaaagcaacttaagggtggatttggctggcagctgggcagtactttgtcagcctcagctccactggaactgcccttgattctctatagctcatcacaaaacctcaggtatgtcttatttttcttataatcctctgtatgttattatcctttttattaacaacaacaactacaacaaaagtgctgctctttttcatagtctcatgtaagaagagtgtcaaaaatgtcctcggcatttgttttctcagaaaaagaatttagatattggagaaattatcataccataaaaagttcaaaatgtgattcatctaaaattttggacaaagatgaaaatatagtcagctctgttctagtgttcatttagttagaaaccatagtaccggaactgtattatagtagaagttaatggtacctaaactctaaggaatgctttttctttgaaaacagaaatatttttacttatttctgtccactatgtttgtgtgtatgtgtgtgtttgtgtgtgtatgtgtggttttgatgccagcaatgcaaacaccaatatatctattaagaagtgattgaatttagattggaaaaaataaaatagttacatgtaaagacataaactctttccttcttaaatgtgattttcaactctatgatagaaactccctctaaaaaacaagcagggcaagaacaaacttacttgtaatgggtgagagaaaataagcaaatctcattggctcattcctgtttttaggaagttgcagtgggattaatgtcaattggaagggatgcagcaagtttagagaaggtgttggcactaacgctgcttgtttggcaaatcatcatcactgaggtattccacccagagactttttcaaaaaagtcaactaaagtgctaagtcataagaggagagccattatacccgttgtctttctgggctccttgagtttatctggattccaacagcacttggaaagtaccgccctccactacctcaaatgcaaacacaatctctgccagtagacattggaattagacttagtgaaaaccaggaaaaaaaaaaaaaa

SEQ ID NO: 50 - DNA, 118559 bp, Homo sapiens
gggactcggactcgctcctgggcgagctgaaagtcggctgcagcagaagctcctgccttgggtgatccatcatttaataaaccccagagaatccagtgtccccggcaggctttttgctcccctgctctcttgccttctgaggccctgggtcgtccccgcagctctagtcgccctgttagaaacgggaggcgcccgagggccgggtgggcggctgcctggacctgggctggcgcgtcgcagcgcctctggtcccggcagcctgggggcagatgctgctgcagggcgtgtctggggctgtgctcatgtgatgaagcgagggaaaaaccggggggaggggggcggaggctaagaggtggcctttttttttttttccttttcttttaaggagtttgccgcgagcgcgtctccttcattcgcaggctgggcgcgttcgcagtcggctggcggcgaaggaaggcgctctcgggacctcgcgggcgcgcgtcttttggctcttgcccctgtccctgcggcttggggaaggcgtaacccggcggctaggcgcgggagaagtgcggaggagccatgggcgccgggagctccaccgagcagcgcagcccggagcagccgcccgaggggagctccacgccggctgagcccgagcccagcggcggcggcccctcggccgaggcggcgccagacaccaccgcggaccccgccatcgctgcctcggaccccgccaccaaggtacgggcgtgccgggccacctgcgccgggaggcgcgggtctttgggggtgggggtgggggtgggggggtccctccgatttccgccgagagaacttcccagcccatccagccgcatctgcaaactcaggagtgcgaacccctctttggaggcttttcagggtctttcgcgccggggcggggccagagcagcggcgagcgcggcggggggcttgcatctttgtcgcgggtctccaggggaggcgactgcgccatgcgcaataataaaacccgcgccctgcccacggcggctgagcctttctgcgcactcttccggtgggagccatgcagcccgaggcggaggagctgcgcggagggggatccgtggagaatggaccccgggccgggcctccggagctccgagatgcggaaagtcagctgtgaggccaggactcgtggtggagcccgccggggagcccagccaccctcgggttccccgtcgcgtaccgccctggatgccagcggtgcctggagcgagcgggtttggtacccagtcctcctgcggcagcggcccgagcaggcaccgccttcccgaggcagagaaagcctggggtgtagctcgctcagagccaggaaaaacctgggcaggcgctgcgtttccagaaggaatgacaggtttcgcaaaccagccagcgccctcgcgttcgctcagcgctttgcctgcagactcagttggccaaacacacgctagagtggctagaagttctcaaaggatggggtcagtgtaacgagcattccgggtactcttccctggacgcagtgctgaaacgactgcattttatcggcttcagtcttcaaggctggaatatttcttgtgggccaggacagccgccaagactgtggcttgttctggtcgtggtattttagatctattttccagcgcatgtgttcattagcaaggcttcactctactgattttgtgatacccttgtatcacaaaggtacccttgtgataccttgtagaaagatgtggataaccatgtttaatagttaaatttgcggtatgtcaaatttgaggatagagtacgtgagttatcgcaggaggtgtagatgtttacaatatgcaaaaaaaaaaaaaaaaaggaacctacaaccatgacctaattgccttgacctccttagctgccctagtctcttttgggctgagagactgctgttaataatatagtttttaccgccagtctttgattcataactacttgtaaaatccatggtccctagatattaagtactaactgtgtctctgtgctatgtaggtttttctaagagatgcttaagcttctggcctgaggaatgtactgtccttttgagattcaagtcgcattttaatacttactgtatgcacataatgttttgatgccagctactgtcaaagtggctctgtaaccagtggtcagagtctagcgatgaaaataattttaaggtataattgctaaaaacttgcagttgggtgacattccccccaccgccccggcttttatactccttcagatcttactaactgttcaccctgaaatatgggatttaatcccttcccagtaaacttgaatttgtttatttaaaaatattccttccattctctttttccgtcttccataaccttatccttttcctctttccaagttgccaaccgtcttgaagcaaccaaacaacctccttttaaaaaatcacttaaatgacatccagaatatcattgaacttgttggcataatgcccagttatcaatttggagacaaatcagtgcacttacatgtatccttggaatgtatttagttttcatttgaactagccaaatttatcactcaggctttgaacacaaatgtcttttcaaaaggactccccaattaagaatgactcagcaccatggcccttgcctcccctcttcttgttaagctccaattcctgacctccaagtaatcccatctcccactctaggctccgtggcaccatggacccgtcccagcagttttcacatgtgtgggtttagtgttcttgctgttgtgaatacttcgcaggggcagggaacacgcctggttgtgccgaccaacggtgttccttcatgcgtgccatgttgcctggcacagaggcagctctcaggaatacttgtggaaagaggaaggggtgatattggctccttggttttgattggaaaatatcaagttggagaataccttgacctatctgattttactacaatttaacccttgatcatttcattatcacgtgagactgattatgatagtgactaaggcaagtcagtctgttcggttattaatagatcaagtgaatagtttgaccaaaaacttcagatttgggggctttggattctgtttctctagatatagagtgacttgttagcattgcaatttcaaattgcgttttatcttaaatagacaaatatatgaagtgcatatggctcaaatgagtccatttcataccctgagttacttaggattacatcttgaacttccttgatgtgtctgtggacggttggggaggtttaggctaatacatcatttttccctccttggatagaatgtggtcattaattaaaggttgtaggcagatctttttctatctaatagctgacatttatatcacatgcatgctatctatttagcaattggatttactttcctttttttctgctagttttagttaccagttattcactaagtgcccttatctgaacagacattacactggttgaattatcacttgtattaggtcaaatggagagttaaacaagcttttgattactcaggcttaacgtttagatgcactaaagcagaagtcttggttttatctatggttcatttctgtaaaatggaaggagtctttatcttctattcaatcttttgtaatctttattttttccgttagatccagagatagactggaaatcttttacagtctttatatgtaagatccaggcgggggcagggggaatggcttggtctgttatctgccagggtttaattttgagacatggccgtttcacaactgcagggtgcgggaagattagatgacctgaatgctggtggtaagtaaagcctcacacttcacattattccttaattgtctgtttttaaaaatttgtcttaaaaaaatattaaggtggcaacatattcaggtggcaacagagggtggggtgaccagtgacaaactgacttccatgtctctggctaatcttgatttctggagccaggctccagactaagtctggacaatcaattaattagcctttctatatgtattgcctgatgaatgatttcaatgctggacattgaacaatggtctgttgcaacagggtgaggccattgtctctggcaggtggggagatgggggctcttgttagctccatttgattacaagagccttgaatcaccaaaacataaagatgtactcgaatagaagagtccgttgtctgactggtaaatttaaggatgtgtttgaccctcgtgcattaaaacagacaattggccgggtgcggtggctcacgcctgtaatcccagcactttgggaggctgaggcaggcagatcacaaagtcaggagatccagaccatcctggctaacacggtgaaaccccatctctactaaaaatacaaaaaattagccaggcgtggtggcgggcgcctgtagtcccagccactcgggaggctgggacaggagaatggcgtgaactcgggaagcggagtttgcaatgagccgagttggcgccactgcactccaatctgggcaacagagcgagactctgtctcaaagaaacaaacaaacaaacaaacaaaaccagacaattgaggcggccagctgcatttcataattcctcccataagcttcctcctatttgccacttgtttagcaatggaaatggagaacgaagatggcctcaaagtgactacatcaccagtgttacaaaaatgggccagaatttaaggcaagaattatatgtttcttaatagagggatgtttctctgtgtgtggctacttgtattcctgtggatttttaccagattataagagctgctaatttctgatcagaacagagaccaaaaattggagatatggatgtggggatgattcttttgggtaccgatagactgcaggaatcgcagggcttcctttaaatccattacagcttataggctagtggatgaataagataagtggagattttctcttgaaatatttccttctatgaagaaaaggccttgaaatgtgcatcctctttgggttgactaatttctatgcctttacagctttaagctgacattataagattattctagtttggatcttgtaagataattaacaaaatggaaataaaatgttttgtttttaaaaatgctaataaattatttattttcctttgtcttagttagttttaatacatattcagtgcttaaagaacaccagtgcaggaaaactcaaactaaatggcatcatcccccatctctataattctatatgcagtagccattcatgcgaagttagaaattagaatttatagcactaagcattctaagaaaaattaagccagtacgtttatctcttgaaaaaaaaaaaagcaactaaatttccttgaaccgaattcttttttttggctcactgcaacctttgcctcccaggttcaagcgattctcctgcctcagctttccgagtcgctgggattacaggcacccaccaccacgcccagctaagtttctgtatttttagtagagatggggtttcaccatgttggccaggctggtctcaaactcctgacctcgtgatccacccggctaaggcaggagaatggcgtgaacccgggaggtggagcttgcagggagccgagatggcaccactgcagtcaccactgcagtccagcctgggcgacagagagagactccgtctcaaaaaaaaaaaaaaaaaaaatcaaaagcatgtgtttacccttattaatgatttttatttaaagtcattgcatagcaatattcatttaatgtttattttttaaaaaaattaatgattgagaacttaaatttataagtagggtaaattactcacaaatttaagtaaaatttgaagccaatatgatggcttcttacatattctttcgaaaacttcatgcacatgaaagtagataaaaatggcacagtcttttccatttaagaaaaagatcatatcacatatagatttaggttttggatgtcttttcatatcaggacataaataactgcccccattcttattaatttgggtgcataaatttcccttttgtgggttgaagccctgtaacgatttaaccaattccttgggtttatatttagattgtcctcgtccataagtgtaattgctgaattgcaagctttatatgcatttaaaaatttaacccggcaaggtgcggtggctcacgcctgtaatcccagcactttgggaggccgaggcaggtgaatcacaaggtcaggagttcgagaccagcctggccaacatggcgaaacctcgtctctactaaaaacacaaaaaattagctgggtgtggtggcaggtgcctgtaatcccagctacttgggaagctgaggcaggagaatctcttgaacctgggagggggaggttgcagtgagctgagatctcaccactgcattccagcctgggtgacagtgcaagactccgtctcaaaaacaaaaacaaaaacaaaaacaaaaaatttaacccttcctaaattgactttccaaagaggttctaccactttgcagttccaccgtggagatcagcactcgttttcccatgctttgccttcatgggtatcagattttccaatacttgccaatgtgctaggtgaagaatggtacctcagtttccttggtgcatttttaactgtgaagttgaatgcctcatcatgtttctctgccatgtgcttgccatctgatcatgcactggtctggctgtcagagcatgaaaggctatggtttgtttcactgttaattaattttcattttcattttcatttaactttaattttatttatttattgtttttgagataggctctcattctgttgcccagtgtggaatgcagtggtgcaatcttggtttactgcagcctcgacctcctgggctcaaatgaccctcctacttcagcctcctgagtagctgggactacaggcacacaccaccaggtagctgggactacaagtgcacaccaccatgcctggctaattttgtttatttttggtagagacaaggtctcactgtgttgcccaggctggtctggacctcctggactgaagtgatcctcccacctctgcctcccaaagtgctgagattacaggtgtgagcccccatgccctgcccaattaatttttaaagatttttttttctagccaggtgtgggggctcacacctgtaatctcagcactttgagaggccaagaagggaggatcacttgagagaaagttcaagagtggcctgggcaacatagcaagaccccatctctacaaaaaataaaaaatttagctgggtgcggtgacgtgtacctgtagtcctagctacttggaaggctgaggtgagaggattgcttccacccaggagtatgaggctgcagtgagctatgatcatgctactgcactacagcctgggtggcagagcaagaccctatctctatttaaaaaaacaaaacaaaacaaaaaaacaaaaaaactttttccccagaaattaatcaaattggaaaaaagcaagttcaagaataaaaacgcagctgaggtagagcagtcttactctcctttgctccttttcctttccaaattaatgaaccatctttaaatttatttgcttggaggatgacctacttctttagctatcacttttaaaatttcttctcttggaacaatctaaaatcatttagttgccagaaattactttgtggtcatgatccgtgaaatgttgagatcagggattggaagcagcagaaatccacctcttgggaaaacaatagagtgaaggcttacccgggatcctctcccgttctcacggcaaacagcctggctctgttaactggatggtatacatggattttctgagaaaaatgtaggtgttcaaagcacaggaaaccatctgggacaccgggacaccattaggcacctcttaatacaagtattcatttcaggttcaaagctttttgtcttccctgtgatttctctgtgatgttttttaaatgggggaaaccctgtagtttctctctgcctaatcttaatcccagttgtagtagcatgtcagtttcatgtttgatttcaaaacgaaataaaccaaaatttaagaaggagagattactgcagtttattggctgaccatctatttgttatatgcaaatactgcaaactgggagtattgaaggattaaatttttcctaattcccaaacctggtggtgctattgaatcacctagagagcttttcaaagacacccctacacctcatcctggatttattgaattagaatcccaggcaatctcagggtctgggattctgtgatttttttttttttttttgagagacagggtctcactgtgtttcccaggctagtcttgaactcccggactcaggccatcctttggcctcagcctcctgagtaactgagactaccagctcctgccactgtgctgggattctgtagtcttaaaatgctcatcagatattctaatgtgtggggtgtgggctccattaccttaagggaggggaaggagtaggcgtaagagctgaataagggccagggagaggttcaggtctaggtgacactgggtgatagcatgtgcagatttcactgagattggaacttgtgtgggtgagagggacggtttcacatgatgaaagagtagcattttccttcacacatctggaggataaaataaaggaaaatatttcttccacataatttcattcctttgtttgactatattaaaaagtgggttgctggccgggcatggtggctcacgcctgtaatcccagcactttgggaggccgaggcgggcggatcacgaggtcagcagttcaagaccagcctggccaacatggtgaaaccccatctctattaaaaatacaaaaattagccagtatggtggtgtgtacctgtaatcccagctactcgggaggctgaggcaggagaatcgcttgaacctaggaggtggaggttgcagtgagccgagaccgcatcattgcactccagcctgggcgacagagcaagactctgtctcaaaaaaaaaaaagtggattgctaacggaggctttttaaaatagattgtgccattcaaggtaagtaggtgttcagtgaaatgcccgtatccctactgagccagaagctgtgacttttcggtgttccccttccatctcattgcctcctaagccctcttcccttatttatcattttaaaacttcccttgtgctgaataagtagacagtagctaagggcttagtttatggcatttgactggtccaaaaatctgtaaagaaattttaaaacctaccaagttgttgaagaatagagttctggctttctcagccacttactattcaatcttgatttcataaatatttctgttttaatttcttccatttattttttaatataatagagacaaggtctcactgtgttgccaaggctggtctcgaactcctgagctcaagtgatcctcttgccttggcctcccaaagtgctgggttacagggtgagccacctacgcctggccatttcataaatacttctttactagcttctgtactccaggaactgtgctaggaactggggaaacagaagttcagttctaaaaaagttaaagttctctctttcatatatttagatctttattccactagctactgatgatgtctagaaggagaaatcttaaattcatttttatatgggttacctattgctccagtaccattgattaaaaagttacctcttgttaaaactcaagtttccatatatgcataaacctgtttattgatttccttttacttttaaattttttctgctgtgtctatttgtgcaataaactgaaagcattgtgggagtggctaaacatctgatcaattataatagcaagcccatggtttaaaatagttttatattctacatctcaagtgttacccttgtctctttcatggctatggtgagttcatacatacataaataccaacatgtggctcgtgggcatggtggctcacacctggtgggcatggtggctcatgcctataatcccagcacttcgggaggtgagggtgggaggatcacttgagcctaggagttcaagatcagcctaggcagcatagtgagaccccactgctacaaaaaatttaaaaattagccgggtgtggtggcacatgcctgtaattccagctagttgggaggctgaggtgggaagatcactagagcccgggaagttgaagctgcagagaccctgtctcaaaaaaataaataaataggctgggcgttgtggctcacgcgtgtaatcccagcatttgggaggctgaggcaggtggatcatttgaggtcaggagtttgagaccagtctgaccaacatggtgaaactccgctttactaaaaatacaaaaaagttagccgggtgtggtggcgcctgcctgtagtcccagctactctagaggctgaggcaggagaatcgcttgaacacgggaggcggagcttgcagtgaagccgagattgcaccactgcactccagcctgggtgacagagtgagactccatcttaaaataaataaataaataaataaaataagaaaatgggaatcgtgtgttcttttaagcttagcttgttttcttggtatgtaatagcattcattaaaaatggtcagatattttcctttttttttttgagacggagtctcgctctgttgcccaggctggagtgcagtggcgcgatctcggctcactgcaaactccgcctcccgggttcacgccattctcctgcctcagcctcccgagtagctgggactacaggcgcccgccaccacgcccggctaattttttgtatttttagtagagatgggggtttcaccgtgttagccaggatggtctcaatctcctgacctcgtgatccacccgcctcggcctcccaaagtgctgggattacaggcgtgagccactgcgcccggccaaaaatggtcagatattttctaaccacatacttatgttctagatgctttgggagataaagaaataaaaacattacccttgaacacctcataattgagatgaggtaaggcctttctagatgaaatattcaacagcaaagattccaataagttggctaggtaatagaagaattgccattagtactactgtaaaaaaaagaatttttgggaaagtgttctaggcagataagaggccattagtcaggaggccttctggtacaagacgtattgagttggtagttcttaaggaaacaatgaaagaggataagttgcagcccgtcgatgttaagagctgcagaggcaatagagagccactgccggcttttgacaatgaacaaaacaaagtttcagaaataccaggtgagtgcgtcgtgaacccctgggagaccctcttgtataaggcagagataacatccgcacagtaaagtggtgggaagtgtgactagaaagggtgacttcagggagattatgttggcaagcattttcacagtgtggtagtgacatctcagatatcagtggggcagtgagatttggcacagggtagaggcttggcatgggggtaagtcacaaacaatgagattttaagagttggaagatggagtacctctatttctccaatagtctgacaagaacatctactccatgatgttggtttcagttatctactggtgtgtaacaaaccatgccaaaaaatttatactaagggtacctttagaacagagaacatcacttgataataacaacttgggactttaaagtaatgcagaggtttggccgggcacagtggcgcacgcctgtaatcccaatactttgggaggccgaggcgggcagatcccctgaagtcaggagttcaagattagcctggccaacatggtgaaaccctgtctttactaaaaatacaaaaattagccaggcatggtggcacgcgcctgtagtcccacctacctgggaagctgaggcacgagaaacccttgaacccgggaggcggaggctgcattgagttgagatcgctctgctgcacttcagcccgggcaacagcgtgagtgagactctgcctcaataaacaaataaataaataaatagaagtaaagcagaggtttgaggcagactctctagataatgacagagggcttccgtgaactcaaagcatttctctaatagtggtctgcgtcacagcagagaccactggcattggaggccatcgaggcttttggagtattgggcaagggaggcacagctgaaggtcaagtttctttctttttttttttttttctgagatggagtctcgctctgtcactcaggctggagtgcagcagcgcgatctcagcttactgcacccccgcctcccgggttcaagattctcatgcctcagcctctcgagtagctgggactacaggtgcaggccaccatgcctggctaatttttctatttttagtaaagacagagtttcagtatgttggccaggctggtctcaaaatcctgacctcaggtgatccacctgttttggcctcccaaagtgctgggattacaggcatgagccaccgtgcctggccagaaagtcaagttttttaggaaaagagatgatcaacactgaaggccccgatagtggctatggagaagtgcaggtggaaccaaagtgagtcttagtagaagagaggactagaggtgagcatggtggctcatggtggacctggtattcccagtactttgggaggccaaggtgggaagatcatttgactacaggcatttgagaccagcctggacaagataccaagacccctgtctctgggaaaaaaaaaaaaaaaaaaaaaagatgagaaaacgagataaaagagatgccgccggatgagcagttggcagatcgtgatggcatcatgccacagtgactgttctatcccagcatggctgggtgcacctaaaaaatgaaagagcctggtcattgactgtattccttccatttgtaggcaaagaaatgaggttgcttggggaatgcgtgtctttccctccagagaagacattttcgctttgtaatttttccatccccagtgtctgccctttggtttgttgttcagaaaacaatttatgatttatttttctttgtgtctgagcctatgatttttttattgaattgagccattacaggccctgggttttacctgccacaatgatgaatttctattgtcactccctgatattgaccacttttagtgaagacatgcttcattggctcctagttttcttcactctgtaaagtatattttgttgtgatacgtaagacaagattgttgatgcatttcacagtttttaacctctttatgttttcagttcttggtgataatttttcacaaagttataggaaattactcaaagaatatgtctttagaaactttcgtttgaaattgtttttcatttggatacatatgtaaaagtcttttgttcgttttaatttttttttcttttaaaataaaaagagacaggtcttgctgtgttgcccaggctggtctcgaattcttgggctgaaaggatagtcccacctgggcctcctgaaattaaaattacaggcatgagccactgcacccggccaaaacagtcttattcaacatcaataatatattgaatcctatagaaacttcaaccttaggtggcctatctactttgaacttacacttgatatgcactgcagtacaaactgggagggagagggggaataggattgtagtctacaagagattgctaagaattagccaattttgctatgatgatttttttcacaaatgacttttttttttgaggcagagtcctgctctgttacccaggctggagagtgcagtggtgctcactgtgacctctgcctcctgggttcaaacaattctcttgcctcagcctcttgagtagctggaattacaggtgtgagccaccacacctggctaatttttttgtatttttagtagagacggggttttaccatgttggcctggctggtctccaactcctgacctcaggtaatctgcctccctgggcctcccaaagtgctgggactacaggtgtgaaccactgtgcccggccagaaatgacgtatttatccaatacttagacatgagttcctgattcctatattgttaacctaaatatttaaatggaaatttttgttcttgttctgctctgttttacatgaaataagctattgaaaagcagtggaacatgtcactacaaaagtttactaaattagtcttgaccattacaatctttgtattccactgacaaaagcagtggaataaaatttaaacaaaaaatagttgaccttaatgtgggcaaaaacccagttgattggttttatagctgatttattttctttgtaaaaccttcaggaactaaagtttagtctgaactcagtttgatggcagttttagattagtcttttttgtttgagacggagtttcactctgttgcccaggctggagtgcagttgtgtgatctctgcttactgcaacctccgcctcccaggttcaagagattctcctgcctcagtcttgcaagtagctgggattacaggcatgcgccaccacactcggctaattttgtatttttagtagagaccgggtttcgccaagttggtcagactgatgtcgaactcttgatccacccacctcggccttccaaagtgctgggatcaaaggtgtgaaccactgcgcctggccttagatcagtcttcattttgttgataatacagaaagctcatttagccttgattaagacaacgatcggttattcgtttgatattcgttaaagacttactgaggtttttgaatttttgtcctaaactgagaatctggtgactgaagagggcttacaattttatcttgaatcgcaacaatgacagagatttcaagtcacttctggaactgtgcctgataaacaatctctgcatgacagggaggaatgcaaagaatgcttaagtattcagggaagtaggtcatgttaaagtattacatttgtcagagaaagtttctcaagcagtccctgtgatcttcagaacccagcttgttcttcgcccagaatgctttagttgtaggcaaatttgggggctgaattaacttcccagccgctaggagggctggactgaaagtcacagattcagcacatgtgcctgcacccttgtcaacaaaaatgaagttacagttataggcaggtgactggaaaaacagtagatgggattgataaatgtttttgttttttttttgagacggagtttcgctcttgttgcccaggctggagtgcagtggcacgatctcggctcacggcaacctctgcctcccgggttcaagcagttctcctgcctcagcctcctgagtagctgggattacaggcatgcaccaccacgccggctgattttgtatttttagtagagacgaggcttctccatgttgagggtggtctcgaactcctgacatcaggtgatccacctgcctcggcttcccaaagtgctgggattacaggcgtgagccaccgcgcctggctgggattgataaatgttgtttctttattgtgggatcctggaataaaaattgtttagagtcaggcgtagtggctcatgcctgtaatcccagtgctttgagaagccgaggcaggagggtcactcaagcccaggagttaaacaccagcctggccaacatactgggaccctgcctctacaagaaattagccaagcatggtggcatgtgcctatagtcccagctactcaggaggctgaggtgggaggattgcttgagccagggaggtctgggctacagtgagtcgtggttgaaccactgcactccagcctggatgacaggttatccaaaaacaaaacaaaaaaattatttaaagagcaaaaagcaagcgctaatggacaattgatgtgtaaataaatttaggaagaagggaaaaccagagagagccttttaactgaacttgaacttggggtctttctttgctgccagtgttcagcactgcaggggacccagctgagcatgtacccagccatttgtggacttaaacatgctcatgtaccaggttttgccctgaattgcatccaagtgctggacaagaggcaccaatccgacagtgctcagagatactgagtaccaggaaaggtggcatagagaaatttgtgctgagtctttgcagaatggagatgcacgagagaaagaaccactgaataatgaggcaggaaggaacctcagcctgttggaagaaatactgattgaaaaatagtctaggaaaagttgagttaaagcttggattttccagactgcagaactttccagaacccttaatatgttaatattattaattattaatcttcaaaaggggaaatggaatgtgcatctttacccaaatacagtttggaaaggccaggctagagaagagagcacaattagaatagcaattcagaaggctttagtagtattttgtggctctgctgtggagaattttgaacagtagggtgtgacttctgcatttattatgatctgcaatataaagccaataattacctaactttatattctaatctgggactgagaaaataatcttaagatattaaagaaaattttctcttctttaggaaggggaaagggtggaatttcattttcttcctataaagatgattgtattttttatatatgtgtgtgtgtgtatatacacatgtataaattttattttattttattttttatttcttttttagatgaagtctcactctgtcacccagcctggagtgcagtgacgcgatctcggctcactgcaacctccacctcccaggttcaagagattctcctgcctcatcctttcaagtatctggaactacaggcgtgtgccaccatgcctgcctaatttttgtatttttagtagagacgggttttaccatattggccaggctcgtctcaaactcctgacttcaggtgatctgcctgcctcggcctcccaacgtgttgggattacaggcgtgagccaccgcgcccggcctatatatatatataaactttaaattaaccaaatatagagagattcttattctttaatctttggttaaatggaaagatatgaaatatgccacaactttttaaaaaataatttcgcttttattttagattcaggggatgcatgtgcaggtttgttagctaggtatatagtgtggtgctgaggtttggggtacaattgatcccatcccccaggtgctgagcgtagtacctaataggtagtttttcaactcttgccccctccctctctcccttgtctagtagttcccagtgtctactgttgccatctttctgtccacgagcacttaatgtttagctcctatttatttattcatttatttgtattttatttttgagacagtcttgctctgtcgcccaggctggagtgcagcggcgtgatctcaactcactgaaacctctgcctcccaggttcaagcgattctcctgcctcagcctcctgagtagctgggattacagttgtgcaccaccacgcctggctaatttttgtatttttagtagagacagggtttcactatgttggccagactggtcttgaactcctgacctcaagcgatccacccaccccagcttcccaaaatgctgagattataggcgtgagccactgcacccagcctagctcccacttacaagtgataacatgcagtatttgtttttctgttcctggcttaattcgcataggataatggcctccagctgcatccatgttgctgcaaaggacatgattttattcttttttatggctgcatgtcacaacttttaaatttacagtatgtgggaagtgccttagattatcctgatgaaagatttcatatttttaatctccttattaagttacatctgtctagacttgctgatactttggggattgggtggaagagaaagaggagtagaaaatgaggataagtaaaatttttttgcattgagcacactttggatggatttcattgttcaaataattctgataatttgcattagatttagtttttattttttggtctccagtaacaactgtttgtagaactaatttctatggcacgtaattgcatgtggagctaaccctcctggggcaagccacttatgcctacaaactctcccttaaccatattttctggggccagagacaattggactactgtggagtgaaaagctgtagattattgtgtcctcaaactctctgccgctcctgcaatgaatactggaggtattgtaactgtatgtgaacttgaacgaagatcaggggaaggtcacacagagccttcttgaatggagttgcaaattcttcctctggcaaatacaagtaaagggaaatgtcacgagtttgttgctttttatggtcatgaagagggaaaaatccccaaagcttgtgattcctttgctgtgagctgaccagctggcttttttcagcattggagaagaacttgagaaggacactgatttattttttccttgagtctgatcactgacagtctcatagaaaagcaaataactatattctgagactgtaactaaactaaacttttaagaaggttgtttctttgtaaaacctaaaaatcaacatagggctattcttgtaagattacttttggccacataaagaggaagagctcattctactgattcctgcttcttaataaatatctactaaactatatgtattttattttattaatttatttatttgagacagggtcttgctctgttgcccaggctggagtgcagtggcactatcttggctcctgggttcaagtgatcctcctgcctcaacctcctgagtagctgggcttacaggtgtgtgctgctacaccagctaatttttgtatttttagtagagacagggtttcaccatgttagtcaggctggtcttgaactcctgacctcaagtgatctgcccacctcagcctccccaagtgctgaattataggtatgagccactgtgcccagcctgtgtgtgtgtgtgtgtgtgtgtttatatacacactatatatatatgtatatatacacataatgtatctatatatgtgtgtgtgtatatatatatatttatacaaaataaatatatgtgtgtatatatatatattggagacggagtcttgctctgtcacccaggctggagtgcagtggcacaatcttggctcactgcaacctccacctcctgggttcaagcaattcttgtgcctcagcttcccaagtagctgggattacaggcgcctgccaccacgccccgttaattttttgaatttttagtagagatggggtttcaccatgttggctgggctgatctcaaattcctgacctcaggtaatccacccaccttggccttccaaagtgctgggattacaggtgtgagccacggcgcccggcctatattttttaaaataacatattttcctaggtactccttcttttaaaaaatagcatatatatttatatatgtatatatatatgtgtgtgtatatatgtgtatatatatacacacatatatacatgtatatatatatatacacacacatatacatgtatatatatatacacacacacacacacacacacacacacacacacgtttaatatgcccacttattggccctttttttccttttttttttttttttgagattggagtctcactctgttgcccaggctggagtgcagtggcactgtcaagactcattgcaacctccacctgccaggttcaagctattcttgtgcctcatcctcgagttcctgggactacagttgcatgccaccatgcccagctaatttttgtttttttagtagacatggggtttcagcatgttgcccaggctggtcttgaactcctggcctcaagtgatccacctgcctcagcctcccaaagcgccgggattacaggcatgagccactgcacccagccgacccttttcttcaatgtaactttctctttttttttttccttgcacaaagcattaacaatgtgaatgaaggacatgggattggatgagccaatttggggcattccacctgtgtctgagggttcctaacacagttgttttactgtgtatttttgtgttaattacaaggttgaaacttgtagagaatcaactaataaagaatcaggtgcatatagaaatataaacatacagtctcttttcttactgtcagttcgctaacgtttattgggtttgagtgcttattaggtaccaagcagttgtttttgggcacttacacatgctattccctatgttaccaacagtttatgacttttgtgaggtgactggtatcattcccgtttttaaaatgagccagtagagtggaaatttaactaggagttggagcttttgattcgatcgctcttgagttcaatgctagaggtctcactcctgtttgggcagctctcagacttggagctcatgggtatgatgagatcactgcagtgtgacaggggccttggctatgctgccgaataggagatgtctctcattattaacttctgggatgtcagacagctcctaagatccctgtgcactctgccttcctaggtatttcaggatgtattactaagatctgctgtcaagtaaatggtgaatgatgatctaataaggccagccccttgtttcagaccctgtcctcacttctcccagcccgtcatggtttagaggtggctaatgccaggctgtaagagctctttgagtttggatgcagatcgtacgtctgaaacgagaattgatactgcacatttttctctttattttgggtgcagtgactcatgcctgtaatcccagcactttgggaggcccccagtgggcggatcacctgaggtcaggagttcgagaccaacctagccaatatgtgaaacctgtctctactaaaaatacaaaaattagctgagtgtggtggtgcgcacctgtagtcccagctgctcgggaggctgacacaggagaatcgcttgaaccggggaggtggaggttgcagtgagccgagatcgtgccactgcaccctggagccctgtgactcaggaccctctgtttatattcctccatacttttcctaaactctttttcttccagcatgcacctgtgcattcccttatccttcactcctcaggttgcatcttgagggttggcatctaaaaaccaatggtttggccggcttcagtggctcatgcttgtaatcccagcactctgggagaccagcgtgggtgggtcacctgaggtcaggagttcgaggccagcctggttaacatggcgaaaccccatctctactaaaaattagctgggcgtggtggtgggcgcctgcaatctcaggaggctgaggcaggagaatcgtttgaaccgggaggcagaggttgcagtgatccgagattgtgccactgcactacagcctggatgacagaatgagactccatctaaaaaaaaacccataaaataaaataaaaaccaatggtttggctgggcacagtggctcactcctgtaatcccagcactttgggaggcagaggcgggtggatcaactgaggtcgggagttcgagaccacgcaaaaatacaacccgtctctaaaaaatacaaaccccgtctttaaaatacaaaaattagccgagcattatggcgggtgcctgtaagcccagctgcttaggaggctgagtcaggagaatcacttgaacccgggaggtggaggttgcagtgagccgtgatcatgccattgcactccagcctgtcgacagagccagactccatctcaaaaacaaacaagaacaacagtggtttttattattttatttatttatttatttatttatttatttatttatttatgagatggagtttcactcttgttccccagggtggagtgcaatggcgtgagctcggctcactgcaacctcctgttaagatagcaatttagcctgttaagataataatttaaaaaactcacatgggagcaaagtaatagcaaatgaatgactagtgaataaattaatgcaagtgggtggctgagttgttatttttaaaaattttttttgatacagagactcactctgtcagccaggctggagtggaatggcgagatcttgaaccgcctcccaggttcaagagattctccttcctcagcctcccgagtagctgggattataggcatgtgccaccatgcccggctaattttttgtatttttagtagagatggggtttctccatgttggtcacactggtctcaggtgatccacccgcctcaggtgatccacccgcctcggcctcccaaagtgctgggataacaggcatgagccactgcgcccggcccaaaacaatggtttttagatgttttcttgctggtctgctacacgttcttcttctgttcagtcagtgcatgtagtaataaataaaagctctgctcattgcttttgtttattttaagtactttttcacgtagtgcggtgtcatggcctcagataaatgtctacataatgcagtcaactttcccacaccttgggtgtcctctaagaaatgcagactacagaatcttgatcatatttatatatgattgtcctttggctctaaatttatcccattatcaggttggcttttattttgggaattctgtctgcatcagaaacatggctaaatgacttcaacttcaagttcaaacacttgaagttcaaaaacttcaagttcaaacacttcatttgttggcattttcatttttagcaagtgaatatctggcatgaattaactaaagtttagaagatctttgtttttcttcttccctccccacccccaaaaagaagaaaattcctaaagctttttgtaatttttatcacaaaataatagacttagtacagggagcatcatgctgaagccttccttaggactgtttcaccagtgaagaccatctcacaggcctgcttggtccctcctgctgttcttttttcaaagctaagagagacattctacaacttcaaatctaaggttttctgggtctcaattcccttatactccagagttcaagcacattttctttgcctgcatgtaaaaggtagttgattagctgaagttaagttaacctttggatttctttccttttcgggggttattttgttttttatagatgggtgtcactcttgcccaggctggagtgcagtagtgcaatcctagcttactgcagcctcaatctcctgatctcaagcaatcctcccacctcagcctcctgagtagctgggactatgggcatgtaccaccatgcctggctaatttatacattttttgagagatagggtcttgctatgttgcccaggctggcctccaactcttgggctcaagcaatccccctgccttggcctcccaaaatgctgggattacaggcatgagtcaccacttctgggccttaatttttctctttgactctcactatgattttgtgagagtctaggtaacttagtggcaggagaattaccacttaacttcctgaaagctttgcttttccactaactcagaactcttcctctaactctgtatccatgcaaaactggttgttgaaacatccattcaacagataataataaattccttcttcagttcacattcttcatttttactcactatactctcttgagagattttcttttcttttcttttttatttttatttttttgagtttcactctgttgcccaggctggagtgcaatggcgtgatctctgctcactgcaacttccgcctcctgggttcaagcaattttcctgtctcagcctcctgagtaactgtgattacaggcatccgcacccacacctggctaatttttgtatttttagtagagacagggtttcaccatgttggccaggctagtctcgaactcctgacctcaggtgatcctcctgcctcagcctcccaaagtgctgggattacaggcatgagccaacacgcccagctcttgagagatcttaccgatgttcttggcttccattacatctatgtgctgatgaatcccaaacctctgcatctctccacctaggatgcctctacttcattgtcttgcccctttaagctgagcccacccagctcaaatctacactgtctgttctcatccctgtcaatgcactctccagcttggggcaggtggagggggcactgtttcatgaggaaagctaatggtatgcagaagggattgaataaaagaaaggaagagaatggagaacatccgcttggctggggctcaatatccaagcatgccaagatgaaagtggagcagggtgcggccttgggaaggagacgtgaatgaactgctgacattccttgaggacaagaggccaaagcctgctggctctaaaactagtatgtttaaagcaaattattagttttgctcaaagtgccactgacatcataaaagaataagatatacctggccaagaccccacctcttaaaaaaaaaaaaaaaaaaaagcttgggcatagtggctcacacctgtaatcccagcactttgggaggccgaggtgggtggatcacctgaggtcaggagtttgagaccagcttgaccaacatggagaaaccccgtctctactaaaaatagaaaaattagccaggtgtggtggcaggcatctgtaatcccagctactcaggaggctgaggcaggagaatcgcttgaacccgggaggcagaggttgcagtgagccaagatcgtatcactgaactccagcctgggtgagagtgtgagacttcatctcaaaaaaaaaaaaaaagaattaaagataaatagtatgatgtaaaaattcatattagaggtacatttttaggtaatatatctgtaatgtttttgacaaaaataaattaatttagcttcaaacatctcattcatttgcaaaggatgattttgttgaaagcttaaatctgtgggaaaataatttttgtctaaaagtttatgttggccgggcgcagtggctctcgcttgtaatcccagcactttcggaggctgaggtgggcagatcacctgaggtcaggagttcaagagcagcctgaccaactggtgaaaccctttcttgacaaaaagacaaaaaattagccgggcatgatggtgggtgcctataatcccagctactcgagaggctgagacgggagaattgcttgaacccaggaggtggaggttgcagtgagccaagatcacgccattgcactccagcctgggcaacagagcgagactccgtctcaaaaaaaaaaaaaaagtttatatcttagggacaaagttaaatttatacatgtaaatcaagcctcttttttttttttttgcaatagctttactgagatactgtaactcacataccatatagtttacccctttaaagtgtacaggtcagtgggttttagtaatcaaagcattcttagttgaaaagtgttattgaacaactggaagcagatatttgttaactggtctgacttatgttcatatgactgcttaaaacttttcctttgcaggaattcagctagcccattctaaaaatggtccaaaaatcagaatgtaggaagggaactgctattgctctttgaactttaaatagtcactgtagggatatagtgacccaggaaatcaattagctaaactgacttcaatccagtagatttaaaacataacagaagaaaaccaacttgaaaaaagaaaataaacatacagtattatacctttagggaaaaaggaccacttagtttaaattcaatattttaaaagtcaagaataataatgcttgttaaaaatctaacagtacatgcaaaggtatataaaagctgctctttgtcctttcccatccatccctcatcagtctgtcaccagaggaaccatagttaatgatgattataataaccttcctgggcttcagtggattactcaacaactgtgtgagaaaagaaattggtgatcgttaggagtcagtgtgggttcactaaggatgagcccaacaatgacatttatgtaatattcttttcgttcttcctttagttggtctttttgttgttgttttcaggttcctggactccaggatttgggggactggactgatgatggtgattctgcatttcaccaaagtgatttgacaaaattgagtcattcagcagctctgtctaaatgtgggctgatcaaaatatctggaataaatgtaattgatcatcctggtcagagctgtctgctgtaaaactctccttggccttgccagggttaattctttatcaacttgcatgagaagtgaagacggacatctcaaagtgacaaatgatttaaaaagttaaaagttaggatagatagctgatgctggatcacatatttttctcttctttcttttttaaattttttgatctttacttcaattatcttctgtcattgcttatttctttcactactcctatttaaatatttttcaaacttagatatggtgccagcattttggtataaagaggaaagacagtgttagctctcagtgcagcagagcagtcagacttgaagatggcgtaaggaggaaggcactggatctgtggaaggacagaggagggaggagtctaggtagaatagaagaaaaacaccctgatgaaatgcatcaattcctgtgcattttagaagatcgaattataaagcaatttggcaacatgtctcaccatataagtgttcatatcctttgctccagtgctgctaattctggaaattcaacaaataaataacacaggggaaggaaaactgtattccataaaatgtttgttacaaatgtttgccatagccttgtcgaagatgttgaaagatcagttcagtgaatcatgtatggtacatatacctgatcattgtcattcaggggcacaggagaaattttagctactaggagaaatgtttatggctgtgaaatgggaaaatatgcaaaactgtattccacaatagtaattgtatttaaaaaacgcatgtatgtggctgaaggttgaaaggagatactcaggaggctgaggcaggagaatggcgtgaacccgggaggtggagcctgccgtgagccgagatcgcgccactgcaccagcctggcggacagagcgagactccatctcaaaaaaaaaaaaaaaaaaaaaaaaaaggagaacatgaaaatcacaaagtgttggaatgatagggttttagattgtttcatcttttcaaaactttcatttctctttcttgagattttgtaaaaaaaaaccagcagacagatcaacgggaaggaattgaggatgagggagaatatagcttataagtaggggagaaggttaaaaattagctgggagtttaattgattttatattcactgtaatctcaactgtgagaaggtggttaatatagagcattttgaatagactcttatgccatattaatagaaataacaccatactgttgtttgcaccagtcagcatctatttggactattgtacttaattgacatagtcacattttaatgtcaggcattgctgcattaaagtcagacatgtagattttggaccttaaaagactcattcagttttcagctgtttgagagacagttgtcaaagcatcagtagacacatcacagtgtggaagagtccacagaatgccaaaccctggccaacagagagagggtggggtgtggagtagggctattgggtggttttcagagcaccaatccatttcctctgacgatttttgcaaagacagtcatagatatgtagaacaaacaacaagattttgtgtctatagttattatttaccatttctgatccctgttttcaggacctattacatttctagaatgtagccataaaaagacaccatcgctatgtatcactatggttaatgaaggcttttcataggcaaaaaatagcagggataatggcaggaagttacagtgtgaaaggttccatggaaggtggatgtggtttcttcaccggatttttccattgccgggagacagacatcgttcctcaggcacccaaacctgtctctctcggcgtttgctgatagagtgggctgaatggtcatcgtccttgtgccctcttcagttgccctgactcctatgcatgctccttgagtgtcaccttcctacctgacagatgccatacccttccatccccaactcccattttatcttttccttctaagctggatctaggaaccctcacgggacccacaagtaaccgttattaaaacagtgtgactgctgggtggggtggctcatgcctgtaatcccagcacttcgggaagcgaaggcaggcggatcacctgaggtcgggagttcgagaccagcctgaccaacatggagatgtatttttgtatttctactagaaatacaaaattagccaggcgtggtggcacgtgcctgtaatcccagctacttgggaggctgaggcagaagaattgcttgaacccgggaggcagaggttgcggtgagctgagatcacgccattgcactccagcctgagcaacaagagtgaaactccgtctcaaaacaaacaaacaaaaaaatagtgtgactatatgttctcaaatatatgtatttaaggcaaaaataacacttggcagctatataaaactagatttagcatgaatctgttctttttgcttacaagggaagataagacttctaaccaaatacccatattatatggaaacttccaattctatgtaacgtttccattttggaaaagacttgtggttttttgtttgtttgagtttttttaaattctttaagacagattctcactgtgtcacccacactggagtgcagcagcctgatctcagttcactgcaacctctgcctcctgggttcaagtgattctcctgcctcagcctcctgagttagttgggactacaggcatgtgccaccatgcccagctaatttttgtattttttgtagagacggggtttcaccatgatggccaggctgatctgggactcctgtcctcaagcgatccacccgccttggcttcccaaatttctgggattacaggcatgagccaccgtgctcggcctgttttttttttttttttttttttttttttttttttaatcaacatctaaacccttactttaatattacagagggaaagttgaaaattgggcttaaaccaggtgtgagaaacatttaatatctaatgattaaatctcatggtcaagatgaaagatgttcagtcttaggtgaaatctttctcacaaaagttttctgtggacagttgaatgtagacagtacaagtggcttttttaaaattttgaggcaggtctttttgaagacagctgtagcccattagtaacggtcccattcaaggatggatgataatcccaaaatgtcagtggcattttcagtttttttgtgtgtatttcaattttatatttttttctaaaattttttattattcagtgcagaatttttctcaatagcattttagacttgtttgtcatcctgtttgtcttctccaaatttagtggaaaaggaacttctttctttcatagaacttgccaagacatctggggaggatttcataattaaagaatgtattttatttcctttaggaatcaacagcacttgaatctgatttgccatgacacttcagtgttgctcaactcaagaggcattgtagttccattgtagttcttgtttatgattaataggaaatgaatactctggagcagatacatttaccccaggaagatatctctggatcactttgcctccgagcactcttcctctgagatattttcctagtctcaattgctggaaaagtattaattcttccaggtttttcagataactttgttaagataataattcacgtactgtacaattcaccatttaaagagtacaactcagtggtttttagcatgtttacagagttgcataactgtcatgatcttcgaacattttcactccccaaagaaaccccatacccagtagccgtcactctgcatttcccactcccctcattcccagtaaccacagagccaaatctgtctctctatggatttgcctattttggacattttgtatcaatggaatcatacaatatgtggccttttgtgtctggctttcatttattatggtgtttgcaagattcatccatgttatagcgtacatcagtacttcctgttttgttgttgttgttgtttgagacagtctcgctcttgttgcccaggctggagtgcagtggcgagatcttggctcactgcaacctccgcctcctgggttcaagtgattctcctgcctcagcctcccgagtagctgggattacaggcatgcaccaccacgctgggctaattttttgtatttttagtagagatggaatttctccatgttggtcaggctggtcttgaactcgcaacctcaggtgatctgcccgcctcggcctcccaaagtgctgggattacaggcgtgagcctctgagcccagctggttttttaaactgctgtataatattccgttgtatggatatatcctacgttttatttatccatgcagcagttgatagacattggcattggggttgcttccaccttttggctgtcatgaataatattgctatgaacactaatgtacaattctttgcctgaacgtaaatgttttcatttctcttgggtatttatctagaaatgaaattgctgtatgttaaccctttgtttaacctcttgaggaactggcagacttttccaaagcagctgcaccattttaaattctaaccagcagtgtttgagggttccaatttctctatatccttggtaacacttgttatctgcccttttggttagagacatcctagtgagtgtgaagtggcatctcactgtggttttgatgtgcatttccctgatagctaattgtgtggatcccttttgcttttagtgaatgaaatatctggtagtctcgtatgccaaactaaagctaaaaattaaaaatgacttctgaaatgaatgtgtatatgacagacatcatgatgaatccaagtgagcattatgcactcgtagcaatcgaagcagacttctctggcttctgaataacagttcttagagttctaatttagtatttggatagagttactgcttctagtttggggagttagttgctaaaataataaaatgtctccatggtagggaggggtgatggtgaggaggtttgctggtggttggttaagtatgtttcccaccaaatatgccgaagcagtttcttctgttagttacaggtcagaatctttttgccatctttgctttctttctcctgtttgcatcctttttgttgttgctgaacttttttagagtaagttttagatatcagacacttcactcccagatagttcagcatcgtctcctgggaatatatccctacattcttctgcttacccccagtgccattatcacaacgaagaaacttttttttttttttttgagaggttctcattctgtcgcccaggctacagtaaaatggaatgatctcagctcactgcagcctctgcctgccagtctcatgtgatcctcccacctcagcctccggagtagctgggactacaggcctgtgccaccaagtccagctaatttttgtattttttgtagagatggggtctcactatattgcccagactggtcttgaactcctgaggtcaagcaatccgcccacctcggcctcccaaagtgctgggattacatgtgcgagccactacacgcccccagcccacaactgaaaaactttaacattaattgattttatttatttgtgtatttttgagacagagtctcagctctgtcgcccaggctggagtgcagtggtgcgatttcggctcactgcaacctctgcctcccgggttcaagtgattctcatgtctcagcctcctgagtagctgtgattacaggcgcttgccaccacgcccagctaatttttgtatttttagtagagacggggttttaccatgttggccaggttggtctcgaactcctgactgcaaatgatccacccacctcggcctcccaaagtgctggggttacaggcgtgagccaccacacccagcccaacgttaatttaatgatatcatctaagatagagttcgtattcaaacttcctctgttaaccttaaatatattttatacctgctttaaaaattgggtcctggccaggcatggtggctcatgctgtaatccctgcgctgtgggaggctgaggtgggatgatcacttgaggtgaggagtccaagactagcctgggcaacgtaatgagacttcagctctataaaaataaaatacaagaaattagcccagtgtggtggtgcaggcctgtagtcctagctacttaggaggactaggtggaaggatcccttgagccaaggagtttgaagctgcagtgagctatgattgcatcactgcactccagcctgagtgacacagtgagaccctgtttcaaaaaaaaaaaaaaacaaaaaaaacagtggggtccagcatataaccaaattgcatttggtcatgtttcttttctagtttcttaaactagaatactccctttgcctttctgtttttcgtactccctttgccttcctgtttttcatgagatgatagatagatagatagatagatagatagatagatagatagatagagatggagtctcactctgtctcccaggctggagtgcagttgtatgatctcggctcactgcaacctcggctcactgcaacctctgcctcctgggtttgagtgattttcctgcctcagcctccccagtagctgggattacaggcatgtgctgccacgccctgttcatttttgtatttttagtagagacagggttttaccatgccaggctggtctcaaactcctggcctcaagtgatccacccgccttggcctcccaaagtgctgggattacaggtgtaaggcaccgcacccaacccatgagatttatttttataaagagcccaggccagttgtcttatgtagtggatttgtcagatttatctatgattagattcaggctggacattgttttatttttgagacagagtcttgctctggctggagtgcagtggtgcaatctcaactcactgcaagctccgcttcccgggttcacaccattcttctgcctcagcctcctgagtagctgggactataggcgcctgccaccacacctggctaattttttgtatttttagtagagatggggtttcaccgtggtagccaggatggtctggatctcctgaccttgtgatccgcctgcctcggcctcccaaagtgctgagattataggcgtgagccaccgcgccccgcccaggctggacattcttagcaagaataccacttaggtgatgctgtcgtgatggtgcggtgatagtgagtctttactgttgtatcacaccagcaatcacagacaatgcctgtccctcctgttattgctgatactgagtttgactgttagatgctagtaagggctgagtttccctgtggggtactatggtagtttcataccggtgattccattgccagtatattcacatccagtgatgactctcgcgtaaatcactgtgaaatggtgactttctcatctgttattcttttctatatttctccatctggcattcttccatataggtgagctttttccttttaccctcatctctccctttgttttcccttaaaagttaaacatcttttttccaacaatgaagttattgaacgtatttccaacttttatgtcaaacttaaggaaagagacctccagcaggccagttcaaagactcttttggtagacatatttaatggaaaaagaatggctaggtggttacttttagactagttaaaagaatgaggccagttgggcgcagtggctcacgcctgtaatcccagcactttgggaggctgaggcgggtggatcatgaggtcaggagttcaagaccagcctgaccaacatggtgaaaactccgtctctactaaaaatatgaaaattagccgggtatggtggcgtgcgcctgtaatcccagctactcgggaaactgaggcaggagactcgcatgaacccaggaggtggaggttgcagtgagccgagattgcaccactgcactccagcctgggcgacagagcaagactctgtctcaaaaacaaaaacaaaaaagaatgaggtcaaaatggtttccctcagttctttttttttttttgagacaggatcttgctcttttgcccagggtggagggcagtggcgcaatctcggctcactgcaacctctgcctcttgggcttaggcaatcctgtcacctcagcctcccaagtagctgggactacaggggcaggggcatgccactacgccctgctgatttttgtattctttttgtagagatgggttctaccattttgcccatgctggtctggaactcctgggctcaagcaatccacctgccttggtcttccaaagtgctgggactacaggcgtgagccactgcacccggcctaccttcagttcttgaagatcacctgggggtgtggtgatggtggaggaggtgggggggttgggtagtagggaagtggtttaaaattatagatcatgatttcgttaaagtgtatcagaaacattttgttgggaatgttttcctgaagaaagtcatgaattaaatcatgcaaaaaagttctgtccttgagaaggtagggatctttaagcattgtaagtatggaaattagaaattatagaaagatttaaaaatataacaaaaaatagaagttcctatttaacacaaccattatcacttttgtgtgttcttagaaaaaaggagtgtttgtgagttgggggcatctcacaattttataggcagtttctaacttcaaaggcatttttgagaaaacctcaaggtcatagaaacagtagtataaaaatggaggtaagaatttctaattgtcactgggctaggtaactcattcctgtaatcccagcactttgggaggccgaggcagatggatcacttgagctgaggagttggagaccagcctcggcaacatgggtgaaaccccacctctacaaaaaatataaaaattaaccaggcctgatggcacattcctgaagtcccagctacttgggaggctgaggcgggaggatcgattgagcctgggaggtcgaggctgcagtgagccgtgatcgcgccactgcacttcagcctgggtgacagagcaagaccctgtctcaaaaaaaaaatttttttttaattgtaatttttctcacaaacatgtttgacccatatgtgataacgtggtgacactggttgtactccccaaccactgtttctgttccccagcaaggggatctaaaccgtttttcttcccagctcttgcttgctgtgtctggaaaacacatttgaaaggcgagaggtttgcattcgagagaggctggggcttgatggtgtccctggagtttaaaaggctgaggtttccaatgctatttgctttcgggatgttgagccctcagagtaacagatgccctaaaattgtacattttccatctagaaaaggggaaaaaaaatctgtagaagaatggattatgaaaaacaaatctaccctccaagaaggtggtcaacaaaacagcgtgactgagaccttcactcagaaattccacgatagcagacgtcacctttctcatgttcgtattttgttgtagaagacatttgggtgaatcattgacagtctttttttatcagaatactttaatacattttacattgatttaggaatttggatgttaaaaatgagaaatcttttacgatggcatgatcactggaaggagtaaggttttttgggattattttcctaccatctgttgtcagcaggaccacctgcgtatcattttccttccatcaaatgtatgacttagccgccaagtggtgcctttgtattttccactccagtgtgggattgcagaaaggctgtttttatgcttatttttgttgaatggttttatgctgatgaaatcaattgaatacctcgttgatctggaaagttgttcttatcatctggacatccagactggttccatttaattggttagcatttatctttgcagaaagaaaatcgctggtaaataaaaattagactgaacataattattaatagatgtcaccactaagcatttgtttgccttggtctaacagttgttggttaacacattgatcagattggagttttgtgtgtaaacatacttttggtgtagttttgagcctaaggagaccttgaaatgcaattttcagtgtagaacaaaaaatcttgtacttaaataaaaaatctttccatgttcctgaacaccctttaaaaaaaaatcttgaataaaatttaaatgtagcaaagctaaaattgtgtaaaagttcattttaatagcaaggtgtcctggtggttatagtcactgattgcaagtgcttgctaatagagccaggaatgagtggcaaatttagattccttcctccaggaatttgcttcatgtttgaaagtgattaagacattttcatagctgccagtacattcagttgcatcagacatttgctctacccatcaaaacatgtctgtagtttttgcttagggctgtaatggaattgagaaaggatggctaattagagtaactttgcttagtcaacggtctggctgttgaagggatttggttcctccagtgctgaccagccttgcagtcactgcagagcaatctcccagtggacggagcctccctgagcctcgcacaaagagaagccagcgcagctgggagtggctccaggagcacaaaacactaggggatccaagacttgaagaaacttatgtatttattatttatttatttgcctgttccccctagcaagtcactgattgtgctttatcacgatcgtatgcttttatgaatgctttagatcacccattgatgcctctgtccctttttcttgatttatctgtttagtagtaagaatacaaggggacttgtcctctaagtctatcttttatggaatggtatggaaggattgagtttttcttggcagtttgaggtggaattctttgtgtatgcatctccacgggcacataatcaattgaagcaatttaagtcaaatcttgctcttggtcatttagttaacaagaaaacaaacaaacctaaaaacaaatacaacaacctgtgcaatcttgaagataccgaagaaaatgaataggaatccatcctttcctaggtgtcattacttctgcagctgtttaaaggtgggtttctacacactggggctccagatgtccaccgtagcagatggagagattgagcaaatgtctgaaaatggctattaattaatgaggttgcaagatacttttgtcagttatgaatgtcacgtagactgggatgctttagtaagcaatatgtatgctcttgatttaaaagacagcctggattttatcttttgggggagaggagtactcgtatgataaccacacctatagacaaaaatcctggttcctgtctctactcctctttaagaagtgttttttaagtgcaaaatggatggtaaggcgtattgtttctaaacatctagatgtttccaataggagaactttgtagaactgaaataatttgaaacaatacatgctaaattcctttacctcaaaatttggtgcttggtaaatgatagatgtttaatagatatttattgaatgagttaactattagggcttacaaaatgatcaggtttaaacctgcaagcagactcttgcctcctattttgtattttctttggtaatcttttattttaacaggaatataaatcccattttttatttagttttttcttttgttcttcaacaaatataaaagacactttcaatgtgaataagaatataatcaggaacaaattttaagagtaatatgtggattttgtaaggatttactcttcaactgtattggttcttctggtgctgatgtttttcctaatgttaaatacagcattaatcattgaaatacgtaagacatgttacgtcttcccttttcagatccttaggcaatagctaataggtttatgtgtgtgtgtgtgtgtgtgtgtgtgtgtctgtctgtttatttttttctacctttgtcttactattgtggaagggaaataatagaatttgtcctcttttatattttatttaaaatctacaatgatgaaaatgtatcacttaaggtagtaggtaaaaagtttatggattaattttgtattaactttctttgaggtctataatttattaatgtggatggatttacaatgaaggggaattcagatgttgtgttttttttggttttttgtttgtttgttttgttttgttttttgagacggagtctcactctgtcactcaggttggagtaaagtggtgcgatctcggctcactgcaggcttcgcctcctgggttcaagcgattatcctgccttagcctcccaagtagctgggattgcaggcgcccaccaccatgcccagctaatttttgtgtctttagtagagacagggttttgccatgttggccagactggtctcgaactccttacctcaggtgatcctccctccttggcctaccaaagggctgggattacaggcttgagccaccgcacctggctgtgtcatgtgtttttatcaaagaagaatcatagcatcgtaaatccagttggaggtcagtttctgggaagttctgttctttgactactgttgtattggagatcactttctctctgagatgatgttattggtactgcaattaatgaacggtagtgtctagttttttttttttgagacagagtctcgctctgtcacccaggctggagtgcagtggcgcgatctccgctcactgcaagctctgcctcccgggttcacgccattctcctgcctcagcctcccgagtagctgggagtacaggcacctgccaccatgcccggctaattttttgtatttttagtagagacagggtttcaccgtgttagccaggatggtctcgatctcctgaccttgtgatccgcctgccccggcctcccaaagtgctgggattacaggcatgagccaccgcgcccggcggtagtatctagttcttaacttagcatagaacaatggtttttaaagtgttcttcattaaaacttacttcatttctgttttctaaaattcctaaaataaattgttcaataagcagttatagtggatttgaaatagagaacacacctggagtgtcattactgcctacactgcttgagtggcctggagggctcacacccagaacctgagtcggacttacttaggaagacattctctgttgttttagtgttttaaaagattgtattccctggtctcatcaaaatgttatctttttttaagaaagtagggatagagaaggaatttctctggcatggtttctaatcctaacaaggtctgtgatgcttggcaagtaacattctttcaggatttggttctcgtcagtgtcatggaagggactgttttaggtgatcttgaagaacagctcttcaggttttaaatttttgtgtgtgtgtgattaacttaagaatggtgagtgtatttatatacaactctccttgacttaggaaaaaatgtacagcagtttttaatatgtatgcaagaagaaacgagaaatatacgataaaggataaaggtgggaaaaatctgaccatggagaaggcattctataacattttaaaaatttactttctctctgtttcttttaaaattgacccttaacactgctcggtgaggcatttaaataatagaaacgggctggagacaataagcaagcaaaagccggcgaggtggcaggcgcctgtagtcctagctactggggggaggctgaagtgggaggattgcttgagcccaggaggttgagtctgcagtgagctaacgattgcaccactgcactccatcctgggtgatggagtgagacctggtctctttaaaaaagtaaataaataagcaagtgaaatcaaacttgaaaaaattttaaataaatatctttttttaagcataaaagtggtatattgtcattgtgcaaatgccaccatataagaaaaaagttccttcattccctcttgtcttctgagatttttcttacatacacaaacaaacatatcctttcggttgttgttttttttttttaaatatgcatatagataatactgttgcgtaacttgcctttttcactcaataggaaatcataagcaccttttggttcagtatacacagatctggctcactgcttaatggctatatgttcagtgacatggatatactctatatttttaaccagtctctttactgattgacatttaagttgattctgatgatctcctattacaagtaatgctgaaatgaacatcctttcatatataatataattttgatatataaaatgaaaattatgtataatatacatattcatttatgcttgtgcaaatatttctataggactaattcctggatgaaagggaatgccccacccttccacccttttctatatgataaatttctgacacatttacttgttaaccaaggaatgacttaagtttcaaaatatgcttaatgcattcagctttcaatagctcacagcacacactgtatataaaaatatggaacgctttacaaatttgggtctcatctttgagtaggggccatgtatcgtttccattttagtgtctgtgctgccaaaccaaacgagcgctcttttcttttctttctttttctttttcattttctttttttttttttttttgagaaaggaccttcctcttgttgcccaggctggagggacacaatcacacctcactgtaaccccaaagtctgggctcaagcgaccctcccacttcagccccccgagtagctaggactacagttgtaggccatcacgcccagctcttttctttttgaaaatattgtaatattagatactttacggaatactcacaatgccccattttggcaatcatatttcacaaacctttgacttttgactgagttgcagttagcttgaaacactcgcgttttgctttcacttagagaattaccatttcttatgtgtaattctaaagatatatacagttaacaaggtcatgtttaaatttaccagtaaacacattggcagcttctttccattctgcaggaagtggctgtgtttctgtgctttcatcctgttatttccttagggtaaacatctaggcttcatgcaaagtagaaggggcatgtgcgtggtgttcaggatgtggatttgaatccccaactcagccacttacattagataagtgacttaacttgcgagcctccctctacaaactggatgaaggttgctaaagaatatgtttttacaagttgtgctaattttaatgctactgagaacaaatgagtgctcagatttggccacgtcagtgatattggtagtgttactttgacaggtgaaggatggtgttttaagtttgccttgacttttgcatttctgtaacgtatgggaagagataactgtaattctgtaggtctatgtattggttcgctattttaatttcaggttatgagcagatttagtgcccactttatcttttgaggtcttcttatatgcttcagatctcatggttgatacttcacatttgcaagaatttctcctacacatagggaatagcctcccaaatcctaactcaacccattgtattttgatgatgctatatagaattttaagtcttggaattggggcattctatgtgaggctaggacccaatttcctgcggcttcattcttttctccacacacgtttgttttatttatttgtttattgagacaaggtcttgctctgtcacccaggctggagtgcagtggtgctcactgcagccttgacttcctgggctcaggagatcttcctgcctcagccttctgagtagctaggaatacaggcctacaccataccctcccttccccaacacccagctaattttaaattttgatgtagggatgaggtctccctgtgttgcccaagcttgtcaaacacctggcttcaagagatcctcccaccttggcctcccaaagcactgggtttataggcgtgacccaccaagtgcagtctggcatgacctcccatgccagaatgtgtgatgcaggagcgggctgtcctcttccccctcctgttcccgctctcagctgcccatacatctatttttattttttctgagatggagtcttgctctgtcgcccaggctggaatgcagtggtgctatctcggctcactgcaccctccgcctcccaggttcgagcgggaggcagaggttgcagtgagccgagtagtagctgcctcagcctcctgaatagctgggactacaggcgcgtgccaccacgcccagctaatttttgtatttttagtagagacagggttttgccatgttggccaggctggtcttgatttcctgacctcaggtgatccacccacctcggcctcccaaagtgctgggattacaggtgtgagccaccgtgcccagcctgcccatacatcttaagggacctccagctcacgcatgggggttttccagcccacatgcccaaccttcaccaaaacaaatgtgctgtagccctttggtctagaggtgcccagggaagaggcttgcataggttctgagaattccaaatcttgggcccccaggacaggtggatgttaatttcaggaaggtttgcccttttggttgctgcgggggaaggatgtagccagaggagggccagaatggggctctccgcagtgaggggctctgcctgggtctgatggtgttactgctcacagggattctttgaagcagctgctgattccccgacttctcttgtctattggttgaataatgttttccctgctgtctacctatcaggttattcattcctgattactgtcaatgttcaggctggtcaaacttgaaatcattaactatataaagtgtattatgtataaagtgctagatttgtaagaaagttgctatcttcatcttcatggagtttagtttttatcttggctaagctcttgctaatttcccacagtatagcctgcactcatgttatgaaaaaatttagatgactgttgaagagtattcaggatttctttcttacttctcggcccaggactgagcctttatgaaagtgggtagcaggagattttagaaaagtggaggcccttgtataaggaggctgggctccatttaatgacggtgaggaggcacactttaggaactaaaggagaccagcatgacagattgagcgttaaggtagaactaaacaagaggcactcaaaggcagggagatcagctcttaggatattgcattaaatcaaccatgaaatgctaaagcttgaactagggcagaaatcaagcaatgggtacagacagcattgaacacaaaagaaatggtaggatttgagggagcatgaggatgaccaagatgcagaaaagcccaagatggtctccaggtttctaggcttttccaacgaggatgctaattctttgcctgaaaaagagtattatcaagtaaagacatggtctcactgttgacccagaaaatagagggacagggtaacaaaagcagtgatttgttttctgtaatactaatggctgacactgactagtgcttactgtgtcaggtgctgtctgtcctacgcgcttggtacacttgtgatagacacttataaatccccattgtaccaatgaggaagcaggcacctagaggtgaaggaaccttacaggtagggcctcttctcaaggcgaggcattctgatcagagaatgcctaagagagggagagacagagacagaattcagtataaagacagaaagcccactgttaaaagcaatgtcaggtgtttttctgagagctcagaagctgtcactgacataaccaaacctcaaatccgggagtcattctttttccgttggcaagtcccgcaggcctcatctccaaagacatttcacatcgacccattctgtccacagggccttccctggcttcatttctcccctgaatggacacagcagcagccttcctgcctccagcttgctctccttcagctcctctctgcaggcagattgctggtttgggggtttttagggtttgtctgtggtcaatttatatctgataaagcgagcaagtcttaagcgtatagcttggtgagttcttacaaggtgaacgcacgagtaaccctctcccaggtcaggttggagaacctcgccagtgccccagaagcctcccttgcatctcctcctggttattgctccattacattctgacttctgtctgcacagatcagtgtcacacatcgttcaccaggtatgcagtgatctttgaaacctgcacgttgagtcatgtcgttaccagaactcctggcatcacttccacattgcactctttgccattgcctgacatgagataaataagaatgcatggctgggtgtggtggctaacacctgtaatcccggcactttgggaagccgaggtggaaggatcgcttgagcccaggagtttgagaccagcctgggcaacatggcgaaaccctgtctctacaaaaaatacaaaaaaattagctgggtgtggcagtgtgcgcctgtagtcccagctacttggggggctgaggctggagtattgcttgagcctgagaggtcagagctgcagtgagccataactgagctactgcactccagtctgggcaacagagcaagaccctgtctcaaacaaaaccgaaaccaaaaacaaagaatgaacacatgtcgatgtcttatttctctcttccctgccattggtactttttgcctattcagatccagctcaaaactcaactttttctggtacactttctcttatcaacagaactgaaagagacccctccctgttagtactatgtgtcttagtactctgtctttgatgtgtggcacttccttttgacttgacgcatccagatgacataggaacccatcacagggattaatcaaatgttgactaacgcatggggacccagggtggaaccaaagcttttgcaaaatgatgaacattcagaggctttggagagtgaacttggaggtcaacaaagagaatgaaatgcaagatgcagtatgagcatgtggtgggtctggactgcaagattcaggcactttattttaggaatagttaatgtgaagaacatgatttatgaacgacagagtggggagtgtattgagaccaagtaagactaatgctccattgtgaaaacttacatatcaaagcaaatatattgtcccctctgtccccagaagcaataactggaaacagttttagaggacataacctaattggtataaaaacttttcactctcagaactatttttcccattgtcataggagtggataccaaataatgttttcctgtcttggcagtgattcacattactgagtttgctattgaactattttttccttgccaggaagtacacatcagagagctgcatttcactgtgtgtgtgtgtgtgtgtgtgtgtgtgtgtgtgtatctatttcaatctactgattaccaaagagcttataattcttaatggagagtttgtggaaaagatgaaaaaaggatttttttaaagaacaataaccagaaagtttgagacaattgagtattatagcaaagtcctttcttgcggtgacttctctggttgtaatgtcttgggttaaaaaaaaaaatcaatttcatgcaaaaaaggggggaggattatgtaaacaaaaacaaaaaaatttaaagtatcacagtctatcatttgggtgagttgtggaggggaaaagaagtcatttgtacagtttgatgaagaaataaatgtattttctagtttctaagataatctgtgtatgctctaaacttaaagcacatcatttcctgtaagtcagtatttggttcaaaagtgcaaaggctttatgattgatcatctacatctatcacatgattatcttctggaggtgataatttttttttttttttgagacggaattttgcgcttatcacccaggctggagtgaaatggcgcaatctccgttctctgcaaccttcgcctcctgagttcaagcgattcttctgcctcagcctcccaagtagctgagattacaggggcaccaccatgcctgggtaatttttttgtatttttagtagggacgaggtttcaccatgttggccaggctggtcttgaactcctggcctcaggtgatccacctgctttggcctcccaaagtgctgggattacagccatggaggtgataatttttttaaaagattaaggcaacagcaatttgagagtgagtcattgatgggacacttgtttagggaaagccctttttcctgcagaagcaaacttgcttcaggaatggcatcaggctgaaagcattttctttgcatttcaaataaagttggcaagaaagctggcacctgtctgctccatttctgtgctgttactacacacatacgttctactttgcttgctgtcaaggttcaagatcagtaacagcagggagggggcatttcccagaagcccacacgacttcatgaggaagcgccaaccctcgctggatggggcgtcggcttgcattcttcggaaacagaaaacaaaacaaagaaactctccctttctagtcactcacatgtgaatattggagactgtttcactagcagttatagtctatacttcttgaaatcatttagtttgcttacagatcttgaaccaagtggttaaggaatgaatcctttccattgaggtatccgttatctattattatttatttaagcgcatatgaaccaaacgagccactttgtactctgtctttccaggcgtcaaagcagggtaagttgcccctcttgactgagtcccgaatgtggtctgagtcagagaaggttagagctcagagctcgagagagttcaggtcttttacaaaacaaaacaagtcaggtgagaaccaaagctactgctgttgacttgaccaaggtcccacagttgttggggtggcagcgatggggtaagcatattttctttttctttctttttttttttttgagacggagtctcgctctgttgcccaggctggagtgcagtggcgtgatctcggctcactgctcacctctgcctcccgggttcacaccattctcctgcctcagcctcccgagaagctgggactacaggcgcccgccaccatgcccggctaattttttatatttttagtagagatggggtttcaccgtgttatccaggatggtctcgatctcctgaccttgtgatccacccgcctcggcctcccagagtgctgggattacaggtgtgaaccaccacgcccggtctattttcttttttttattttgatttcattttatttttctgagacggggtgttgctctgttgcccaggctggagtacagtggcacaatcatggctcactgtggcctcaacttccttggtctcaggtgatcctcccaccttagcctcctgagtagctgggaccacagacacaagtcagcacgcccagccaatttttgcattttttgtagagttgggatttcaccatgttgctcaggctagtgtctaactcttggactccagcgatctgcccacctcggccttggaaagtgctaggattacaggcgtgagccatcaggcccggccatgtttacttattaatattttaaagaattatgaggaatgcttttacaccgttggtcggagtataaattagtcaaccattgtggaagacagtgtggcgattcctcaaggatctagaaccagaaataccatttgatccagcaatcctgttactgggtatatacccaaaggattataaatcattctactataaagacacatgcatacgtatgtttattgcagcactgttcacaatagcaaagacttggaaccaacccaaatgcccatcaatgatagactggataaaggaaatgtggcacatatacaccacggaatactatgcagccataagaaaggacgagttcatgtcctttgcagggacatggataaagctggaaaccatcattctcagcaaactaacacaggaacagaaaaccaaacaccacatgttctcactcatacgtaggagttgaacaaggagaacacctggacacagggaggggaacatcacacaccggggcctgttggggagtggggggctaggggagggatggcattaggagaaatacctaatgtagttgacgggttgatgggtgcagcaaatcaccatggcacgtgtatacctctctaacaaacctgcgtgttctggacatgtatcccagaacttaaagtatttaaaaaaaaaaaaagaattatggctgggtgcagtggcccatgctggtaatcccaacactttggaaagccgaggtgggtggatcacttgaggtcaggagtttgaaaccagcctggacaacatggagaaaccctgactctacgaaaaatacaaaaaaattagctgggcatggtggcaggcacctgtaattttagctactcaggaggctgagaggcaggttgaaccccgggaggcggaggctacagtgagctgagatcgcgccgctgtactccagcctgggggacagagcaagacatcgtctcaaaagaaagaaagaaagaaaaagagtcacgagcacattggttaaatggactttccaaacaataggtgctaaaataaaattgatagagttatagtgaaggattacagagagcccctgaagtatttaattaatattttgtgggatttggggtacagctgaactgcctgtcactcttcccactcccaccctacccccgttcagaagtcacaactcatgcttttggaggacagagtgaatttctcccaaattactgtcttctgcctcctaaatcaggaccacatttttcaggtgtgcttatttggggaacgaggcctggtctgtgttccgctgtattgctgatgaagctaaaaattaagggattaatggcatcgctagatgcgccctgtagcggctggcagctctaaaagctcttctgacagctataacttatgatttataaatgaggttaatggattcctgttagaatggaaaatgcacttgtgtaagatcacttattcaagccgtaatcagtacctactgcaagtgctttctcctgaggcttgtattttttgctggaggatttttgtttttagtagatattgctggacataggtttttcttttctttttaaaatttgcaacaaatcccaaatcaccagaattgctgaaaacatgctgtgagagatgaatgtcaagttcacagtcactgcccttctccgacagaaccaacaccagccagccctcgagcgcagacggggaaattcaaactgatactctccacccctaatgttgagagagatggttatgcagcttcaaggtcctctgcaaattcaccatacttggatagactgtgaatgtatttttaattaggcactgatttttagagcattgggttatgtagtagtgaatattctgaccagcctgcatgtttcagaagcagaagtatgaaaaaatagatttggtagcaaacaccaaccagccaaacaaaaaagcaaaaagccaaaaacccatcttgtggttgatgtggtttccatagggctttgcctctcgtacatagtcacttcttaagaaacactctccctttttttctcagtagagtaaggtcttgataagaaggttgcaagatgtgcaatataactgttttattgagtaattttgttaaaccaggaaaataagaaagaaaagaaactagagctgttatttgtctttcttagaatgtcttgatcaatacattctaggctggcctgtaagaaaaagaagcacagggattttgaatagagacactgtcaccaggttaactttgtaaagggagggtggtgggctttcccagatgtactttcccttgtgaggttttagcttggctcttagctcattcaaagcaaagactgagagatgtttaatttgcaaatccttcaggtgtggaacttggattgtaattctttcctccttgggtaacatgatgactagcatggttatggctggcattttgcttttgttgtgttttgatacactttcgtgtttagaaggtaacgcatccgatgggacgaggcatctgaacaagatggtttggaagcttccttttgagactggagaaatgtgtggactaacacaaatgtgttcttagaatagtcatcatttctttgtgggaaacattattctggcacctattaatgcttatagggactagaattgttgaattccttctccactgaattcaggtagcttgattggggccattttggaggataggaaaactgggcagtgtctggaaaggccaacatcttcactgcacaccctacagggagggtgggtggaagttcccacagtggcatcagttggacaccatgacgagctcagtcccaggtgactgagacagacagaatggagaagcactcaccgttatctcattctcctagcacatccctcacccaactacagtctttctccacttagacatccatgccactgggtgttaccccaaaaatctgaagccaagcagattgacccctgacaatgaggccctgaagttcagttacgactccttgaagacctcttacctctcacaggccagcttcctctcccatccccctcactgatggttcccagccttcaccagattcttttttttttttttgagatggagtttcactcttgttgcccaggctggagtgcagtggcatgatcttggctcactgcaacctctgcctcccaggttcaagcgattcttctgcctcagtctcccgagtagctgggattacaggcatgcgccaccatgccaggctaattttgtattttatttttagtagagacggggtttctccatgttggtcaggctggtcttgaactcctgacctcagatgatccgcccgcctcggcctaccgaagtgctgggattacaggcgtgagccaccttgcccagcctggattcttgtttttccttctcaccctctcccctactaaatccccttctcttcctcagaagttagtccttctaggttctccctgtaaccttacctgcatagaaactccccctctctgcacataaacggagctgctttctgatttactttccttttgagagctggtctccagttgctgcagatcacctcatccagtgtccccttcaccacctgtcaggttcccttggtcagtatcatgcctctgagacagcagctgcccattggaatcacctgggggagccttggaaactactaatatgtgggtcctttcccagagattctgacttaattgggttaggatataaccacaacaacagccccacaaaagtattacccctcgttctataggctcagagggtgagaaatttgcccacatgtctcacagctgatgagtggcttagctgagatttcctttcatgggtgagcttgcagattgtgctctttctgttgactgtcctgggctatgccagatccagagaagcacggcaggatcattaccagctaagaaggggtcttaccattgcctgccccttaggaatcagttgccctaggcgaagtccctgttttcctccaagcagactgataaacactggctgtgctcaagcagcagcagggctggattcgcgtcacttactttggtatgcaggaggctgcttgtattccgtggcgcagggagctaagcacacacgtcagagaaagccatttcaatttatcattttaattttgctattaagcatccacggaccctaaatggattctccacaatggcatctgcaagtccattatcagctaaatgtttaatgagttttttaagtaaccgatggatgccacagtgtataggaaactttcttgagtttttttcacatataaggaggcatttctcgaagtcacttgggatggcttaacatagctcatccctgccagctgacttgtggcctctttcccttccttccatgtgcagtgccttctatcttgaatgctgcagccagcagaggttctggcagtggaaccctctgcctagtgggcttcagaaaggagcctgtgaggcagagacatttcaattgaaaagcagtttagaattcagcctccatttgctaattcccatagatgctcgtcagcaaacacaggacagttgtttgtggatttgaaatttgctactttttcattctgtatcttacattttggtgattgtgctacaaatatttggagttgaacataataggataatcactgttgattcttggctaaatcacattatcttaggccatctttgcaaatcaagtgcattctactgaaaaggagacaagcaattttgcttgttctttttctctttcagtcgaatggagcatggacttagaattgaagttgcaatggggtgggcaatacattctaactgggtttttagttaaaaatcagcaatcagtttaagcaatctggttcaaaggcagtatagctacaaatttgcagacagtgtgtagtacagttgtccttcagtatcttagacgaattggttccaggaccctcccacccctgttggtaccaaaatacaaggatgctcaagtcccacagtttgccctctggatccaggggttcccaacctcagattcaaccaaccaaggattgaaaagatagtttttgccggatgaggaactgcagatacggaaggctgactgtatttcatttcaacaggggtctcgattatcctcctcattgaatggtaatatgttacctgttttggcaaagtttggagtaaacttctgtctccacctccctgtattgcagctgtcagcatggtgaagagcctgcaaggcgtgttgatgtgtgctgcctagggctgcctaacacaaaccaaacaaacatcccttctcaggatgggagaagagctttttatgagaccttcttctgtcttcctcttgcccgtctctgcctttgcccccataagcaagtgacagttgtgtagtgtttagccactacgtatttctcatatctgtcttcatggtggagcttctgatactcctatcttagggacacacctttgattagaagaagtaatattagcctctaaaattttttgaactttaaaatcaagaccttacttgggataacgctggtttcctcctctgttgaaattgtttatctcttggactcagaaactatttagcctttctgtggcacacagtggatttcaaaacatttggtattatcagatttctaagcaaggatgtgatgtaattattttactaccaaatgaggattcttttgagagaagcagccacttaacgtgagagtaattgcttgaatatgaagtggtgtgtaggaattgagtgagaactgagatcttgacttgcacgtatgctgtagataaaacctactatgaatttgctggtgcagggccacagaaaaaactagtcatgagaattgccagaattgtcagaaatgtgttttgagatgatttatattcattattctaactcttcacaataacattttgcttattttgcaattggaatttgtggaggtccaagaagtcaagatggtaattaatttgcccaggacagctggtaggtgcatcagctcagagcagcgggtggtggggaacttgtcttagacattcacgatgcaggtcatgacactggactataaagctgtagctctaggggtctgtattctgtgctctgtaacttgacatgatctgggacccaaagttaaataactaatcaagagaagtcaggtgcttttttgttaaacacggaactccagtattcctctgaagcttaaggagagagtaagtaacatggtattgggcttgttccctgtccttaacacaagaattcttggaattgccggattacatattcttctcccctgagaggacacccagtgcaagcatggctcacatgcctaaggtctgtgttagatagatcatatcatggatccagcataattaagtagagatgcattttcttggtttaagttaccttaggggaaaaaaagaataaaattcttcaggttcaaccttggagttcttcttctttttttttttttgaggcgaggtcttgctctgttgccgggctggagcacaggggcgcaatctcgactcaccgcaacctcctcctcccaggttcaagcaattctcctgcctcagcctcccgagtagctgggactacaggcgagtgccaccatgcccagctaatttttgtatttttagtagagacggggtttcaccatgttggccaggatggtctggagctcttgacctcatgatccacccgcctcggcctcccaaagtgctgggattacaggcgtgagccaccatgttcagcctggagttctttcctgattctatgaggctgtgagtagtggttcttaaccaggaatgttatcaccaccacctcaggggaggtgcacatttcttgatatggggggtcggggttgggggcaccagggatgccccatgtcctgtaattactgtccacagtgtccacacaggaagataccggttgtatcagagacttggtctaggattcacaggtttttcttccagttggatttaatgagcttctctctgtcctaagacccaaatgctgtggggtttgccaacattacaaggtaggcatttcacagaacggaattctggcaggccatcttcatgcagtgaattgctgtcattggtaggtggtgctttttattgcccccatctccagcagagatcttataaattccctttgcctgaaatcagcatggttgatctcccacctaaccagatttagagtgctttgttttctttaacatactttcccagagaactcgggagttttaatacttttaaaaacaactataactttttataaagtagggaatacttgactgaagtgttgtgtgttaaaacatactgcatgcatccgtggtgtctttagttatggggaatgttagtagatgtgactcagagagggttccttgaggaactcattttagaaaatgcagtgatttcctccttagtggttcagaatgcacattaaagagtctttaaattctaagtaaatctgcttaactctgtctgcgtcagagtttcccaagctaacctggagcacagaacacttctgagataatgcgtggtatgttggtgttgatacacgcagtatactcatgctctcagagaccggtttgataaatgccgatctttgagaatttagaggcctaatttgtagacaacattcctgataaaatgagttcacctgtagtggccagtcctttggggtttccataagcaatgtgagatacattattttctaataagacatccaacaatttgaatattaatgttcaatggaattaattttgcatgctaaaagccaactgatgattttagtggatctctcttaacaatcattctttctcatgtctaaagatgagtttgggttatttctcctgaaattatggttaactaactttcatgaattttactgaaaatgatgagaaacagaaaaatctgggatttgtagacagtggcgagaaactctctgtctagtatttatacccctcaccaagcagcactcctgggccctcaagctctgctgctgtgcagaaaccgttccagccgccttccttaaatagcaagcactgccatttcaaacacaagataaaattaatattggcattctggaaattagcatttttgcactaggattaaattaaattagttaaacgaatgtgacagcatgacaaagctggtctaaccaagccaatcaggtattgaaagtggataaatgttgctgttgggtgaatagctcctactcggcagttggtgggatgatgtagcgtaggctgtaaaccccatcttggaataaagacctgcaggataaagtgcagtaggacacgtggggttcagacagctgggccctgttttcgtcctgtggagctggagggaaggggccacagggactctgggtgatggtgaggagatgttcacccccttttctgagtccttcagatgaactcagtcgagcttaaagtgatgtcaccaagcagtaagggaacttttttggcttgttggttttgtttgctgaatatatggatggaaagaaatatcatgaaatttataacgagcagtggctttatttaaagatcagagacttcatagcatctgtaggttaagacctgggacctgctgccaccctcaagaggatctgctgcctcttccctgaggaaaactggcagcaggaagagagctctggaggccaatttctcagagataagggcttcttatttttagagatcactacaatcatgcccaccccgggatgcatcctcttctcaatttcatgtggttggagagagcttttgactctatgctttgataatagctctgaaacccgataagcagttcattttctctcttttaaaaaccttgctagttaaaaggcctcctcatatttttcttttgcagattgccttaaatctttttttaaattcatggaatataaatgtatactcctgattgccttagcagtgcttactatatatcttgagataattaaaaatcacatcagccaggtgcggtggctcatgcctgaaatcccaacaccttaggaggctgaggtgggcggatcacctgaggtcaggagcttgagactagcctggccaatgtggcgaaaccacatctttactaaaaatacaaaaattagccgagtgtggtggcacatgcctgtaatcccagctactcaggaggctgaaacgggagaatctctggaccccgggaggtggaggttgcagtgagccgagatcacgccactgcactctagcctgcactctagcctgcagctgagatgcagcatcctcaggctgaacttcttggaaagcatgactgtcggggaaggaatggagagactaaagaatttgatccagttccctcacaaaaattagggctattgttcatctaaacttctcataaatctggatcaccagtggaataatccatttctgcatttagcctccgtcttattttcagcctacttctagaaatttaaatatacattggaaaatatattgtatgcctaggttgaaataaaagggtttttttttttttttttgccagtctggattgctgtttgaagtattcaattttagagtgaatacaccaagagctacagctattgacttgtatgaaataaatcatcagtcttaatgatagctctttgagttacattgatgggtgggctcactgatacacaccacacaactctgggtgtatgtgtatgtgtgtgtgtgttgtgggggcaggatcacttgccctcgcaacctgaggatctgaaccaaccaggaacctcaggaaaaaaagggctgctatgggctgggcgcagtggctcacacctgtaatcccagcactttgggaggccgaggcgggtggatcacgaggtcaggagtttgagaccagcctgaccaacatgatgaaaccgtctctactaaaaatacaaaaattagccgggtgtggtggtgcgcacctgtaatcccagctactcaggaggctgaggcaggagaatcgcttgaacccaggagatggaagttgcagtgagccaagatcgtgccactgtactccagcctggaggacagagcatgagttcgtctcaaaaaaaaaaaaaaaaaaggctactgtgtcttcttttctcttcctgtgtgcaagtctgtgatttcaaggctatggccatgttacgtgtagccgtacccatgtcttgaggtgcagccccgtgtgaatgtgtgtcctgggatgtagtgagatgtgtcgcctctaccgagctgtttctaattttgttggattcccttttcatttcacatctcagactcaagccaaatgctgcctcctttgaaaccctccttaacagaaacatgaggaccatttataaaaggtgaccgtagtgtgagataaggggtggaaagtactgggatagcacgtggaccttgatttgatcaaatggaccaagtctcataaaatggctgctgagtgcttttctatttagaaagagaatttcccccaatacggtttcatttgaatctcacacaatccaaaaacagagatagtattagtctcagtttgtaactgggaagatgagctcagagtaaagttccatagctgagaggagcttggactctaaccaagacgttgtatgtgctgtgctgtcttctgtttcccccatgctttctatagtttaaaaaagaaaagaaaagaaaaatcacaggcggccctcgtccatttagatctttatataaaccacctttacccgctttgtcctgcccagtcctagaaaatcagaaggattagatgcctttgccatttgccaggtgttattgttgagtgcagagcaggaaggacacaggtaataactcccagagctttcattttagagaagaacgcaggcatggaacaagtaattcccaagaccacaattattgagaacaaatagtataacaaagacagctaaaatttatgttaatagttgacttattaagaacttaatatgttcctggtgatgtttccaatattctttgaggtatataaaaatgaattcttggccaggcgaggtggctcacacctgtaatcccaacactttgggaagccaatgcgggtggatcacttaaggtcaggagttcgagaccaacctgaccaacatggtgaaaccccgtctctactaaaaatacaaaaaaattagccaggcgtggtggcacttgactgtgatcccaactacttgggaggctgaggcaggagaatcacttgaacccaggaggcggaggttgcagtgagccgagatggcaccactatgctgcagcctgggcaacagagtgagactccatctcaaaaaaaaaaaacaagagagaaaaatgaaaaaatttttttctttttaaaagccagtcaagtttagcagtgtagggttgtataccgactttagtaacactgatgttaatttctgataacccactaccatcggaccagcctaaaaatgaattcttaactccattttacagagaatggggaagatatgagggaggtaagaaatgtgctcaaggtcgtgaaagtaacttccttaaggcggaagcaaatgtatatgaaacacacttgtgaaatgggtacataatgcataggatacatgtgttctctgtcaggagcctgtagtggcctgctgtagaactgtgatatgcttggctccgtcccgttcaatgtttttgatgaatggcttagctgaggacattaatatgttatttacatttggagatgatataaacagaggagttaaagctccagcagtgtggcctgttggcctagatgatcttaaaagatttatgaaccctggcaagcaaggttattaacatgcttgaagcctaagaatctatgagttttagggttcaatgtattttcacttctacagtgataaagtgagtaaaaaggaaaccgtgtctgttctcccaatttccctctaagaggataaaaccaaacaacaacaatgccatagaggtaaccattattaaagatttggtacatattgttccagactttaaaaaaaatgcttacacaaacattgactccttttctctctcccttttcctcttcctctccctctttgtcagtgggttatttttgtttagtttggttttaaacacataaaagaatcattctcagcaacttgcttcttttcccccttaagccagggacatcttcacacatgagtgtgtctaaatctacctcatagcttttgatgttgtctattgcatgaacatttcataatttaactactcccctctactgatagacatttaagggttttttttttttttgctattatgaagtatttattacttatttatttttcctttgtagagactgggtttcagtttgttgcccaggctggtctcaaactcctggcttaaagccatcctcctgcctcagcctcccaaagtgctggaattataggcatgaggcaccacgcccaaccctattataagttattatgtgttgcacctcataaatatgtaatgccatatctattagaatggcatggtgtagctaatgggtttgcgtatttaaaattctatccctatttccaaattgccttccagggatattgtttactgatttgtactctggtttttattttttttgtttgacatttttaaagatttactttcaaaacactttctattagaatgaaggagaaaacacaatgaagaggtttctttacaagttttgtcgtgggatttaaaattccttccagataatctttaagtctgatgatttgatcatttgtgggtgtgtcctggttatattggcttctggttccttcccacgaaggccacttacaggtttgcttcttggtcatactgcccggggtgggacgaattgcccctttggagcctcgtctactgtgtgaactgcaggagtgctgggccacttgcacccggtcgtccaatgaggatgtagatctgggagtatcacttctgcagtgaaaagggttgctttggttggcttacctcctctgcccctggcatcctgacagctgtcaagggctcatcatttcacaacttcattaaacagcctggtactcctgtttcttactctgcaaaggaggtccctagcacgttgtggactcctgtggagaaggaagtggatggagaagtctcctagtttttctgtggtgccttggctaccacttggacattcttggttgttgttcttacagaaatgagaggaaaacactgttgctggaaacatttgaggtttttagggtcttttttttttttaacagcttgtttagttgtaatgtggtaatacttcatgggaataaactctggctgacccactcaaaggatataagcttgaaaacatttagggttttgatttgttcaaaggaggcatttgtgctttttgaagcacaaatccagtgggaaaataggttttctggtgcttaccatgtttaagtgtaaggagcgtgtctttcaagtctagttctcatctcaaaagaaataactatttataaaactaagttcagggtggagggataaagctatgcgaggaagcttcggagtggaaaaagtgaaatatacatttcctccttctttcttgtttggtaacagttaagtcccagtattactttcctccctgaaatgggtggtcctcgaatcccatctggctccaatgaatcccatctggttccaccgcctcctgtcccatgtgccactatgttgtgtctgcatctttcagggtctctctgggcagagctgtgtgtaaatcctgtcttctgtggccatttgagttgcagacaggagagactgattgaagttaagcaaggtgcgtgtttattaataaagaaatgtacccacaatgtatgaaaccatcaggtcataaaataacacgtgttccccattattttttaagtgaatgcttgtgcctgtatatatacacacgtagaaaacacagaaaagacttaaatgaatgtaggtttgatttcctctatttgaggtgactttaacttattgataactctcagaagtccgtgaatttttaacaacggtatgacttatttagacggtttggggatggaagaaaaaacaaaaacacttttgatttggagtgaaataaagggaattatccatctttaacaacacgtgggatttgcaaaagtgtggacatgtctgaatgtgacaatctgactaggaatgaagtcccattttgtgcggatgttggtgcctcataggctctgaaagctcacctgagacatcacccttgaggtcaaagcttgggtaccctggcgggacgcaagctattcacatagtaaaatagactcaaaactcaggttcagtaacgtcactgtcataaatcgttttctaccgaagttaataatgtatctacggcctttctcaagtagggacagttaccctgtggttactgaaaattagtatctcataatgtattcattatcatacttaggatgtaaggatgtgtagcatttgacctcagtttttaagggtccttctttttatcatctaatgtactttgctatgtgtgtgtaacatctcttttttttttctttttttttttttaagagacggagtctccctctgttgcccaggctggagtgcgtgatctcagctcgctgcaacctccgcctcccaggttcaagtgattctcctgcctcagcttccctagtagctgggattataggcgcacaccaccacacttggctaattttttgcatttttagtagagacggggtttcaccatgttagccaggatggtctcgatctcctgccctcatgatctgcctgcctcggcctcccaaagtgctgggattaaaggcatgagccactgcgcctggtgtaacatctcttttttaaatgatgtttttatttggagacgagggtctctctatgttgtccaggctggcctcaaacttttgggctcaagcaatcctcctgcctcagtctcctaagtgctgggactacagcgcacgtcacagtgcccggctcagtaacatttctaaaagagtagacggaaatttgtgcctgtgtgctatagtcttcatgtttaaagagactcagtttggctccaactaaagataccttggattgggcaattcacagaggattataagaattttttcaataattttaggtacttggtagaaccctaaactctatagaacttcagagttctggttcctaaataagaggcacaattgaccgaagtttattgcattgaaattgaggtattaagatggcttttttatgttccctgtttagtttgccatatcatgaaactgtgtatgtcaacagtttctaggtttaagattcactgggttaccatgtagcccacgataatatgtgattcctgctttcctcccccaacttttcttcctgttactaatcaaatctaagtcctgtgtacatactcaatgatatttagttagaatactctgacatttggctgggcgcagtggctcatgcctgtaatcccagcactttgggaggctgaggcgggcggatcagctgagatcaggagttggagaccagcctggccaacacgaaatcccgtctctactaaaaatacaaaaattagctgggcgcagtggcaggcacctgtaatcccagctactcgggaggctgaggcagaagaatcacttgaacccaaaaggcggatgttgcagtgagccaagatcatgccattggactacctgggggacaagagcgaaaatccatctcaaaaataaaaataaaaaaaagaaatactctgacatttttgcagatgggctttgtggagacacactgcccccttctccattccctaccccctgcttttgtctttaggtttcatttaaaatgcccatctttcatattttggtaagagaagactttaagtggaaatgtaatctgagtattctgtttaataaatggactcagcatgggcattttgaagccaacaatcccatctgtagtgtaagtattaaactacagtggtattatttcaggaggaagctcatgcagttgaaggacagccttgctgggagccgagaacagccaggtgaaatcaatttagcacaacttaaggcttctggattgcgtgtcttgaacccactgtcccttcagcgttcagggtctaagtcagtggtgagtccagagtcattcattggcctggaagcaggatggaatgatgtcagatggagtgcagagttgagattgctttgtagcatgcaggtctgtaccagaccttttccagaccggttccagacctggaataccctttaagtcattttataattgtgtgtagtaacaggaccttcaaagcatggcacgtatctttgtaattgtgtgtagtaacaggaccttcaaaacatggcacctatctttataattgtgtgtagtaacaggaccttcaaaacatggcacctatctttatgttgagagcctcaaacagaaaaacgctggaaatagttggtggcaagagttggcttcgggccatgatgcccccattcctgagctgtgtgacctggggcaagacaaccccaccccaccagaattgctttgagtcccggtgtcattattataaaatggaaataatagcagctgcctatgttggttttaagataaatgagatatctgtatatataacattgctgtatattacattgttgaaacatttaggttcctaatggttattgtttctattggcttaaaatttttttacctatattctcaggattaaaaatacgaccaagagcaagccgggcacagtggctcacacctgtaatcctagcactttgggaggcagaggtgggtggatcacttgaggtcaggagtctgagaccagcctggccaacatggcaaaccacgtctctactaaaaatacaaaaattagccaggcatggtggtgcacgcctgtaatccctgctatgtgggaggctgaggcaggaagatcacttgaacctgggaactggaggttgcagtgaaccgagatcacgccactgcacttcagcctgggtgaaacagtgacactccatctcaaaaaaaaaaaaaaaaaaaaaaaaaaaaaaaggattatatgaccaagggcatgcctacatgcctgctgattttgtgggttttttcatttttgttttttgtttttctcgctccgtcacccaggctggagtgctgtggctcaatctctgctcgctgtaacctccacctcccacatccacctccaggttcaagtgattctccttctgcagcctcccaggtagctgggactacaggcatgcaccaccatgcctggctaatttttttgtattattagtagagacggggtttcactatgttggccaggctggtcttgaactcctcgtgatctgcccgcctcggcctcccaaagtgctgggattacaaacatgagccaccacgcccggccatgcctgctgattttgaaactgatgccatcagttgcacagggcatcctatggggaggattgcaaatgaccattgtagtaatatttttaaggaaaaaacaatgacccaaatggacatgttatatgtgtcttgtttgcttgctgggctctgggagcactggccttcgcgccaagcggcctcccttctctgcaccccgtttatccttttcttacacagcccttgcctgtggaaatgagatctcagctttaccattgcttcctcagagaagtcctggacacccccagcctcagtcagggctgtttttttttttttttttaaaacctacttgattcattctcaagggctctgtttattgttatttgttctatgtatgcctccttcatgacagtttccacagctgcagtttagtaattatttgtttaaaagtctgccttctgacttgttcagtcaattatgcttaacctgcatctaatcacaaggaaacattatttattattttaaagtaaaaaagaggtttttaagtctgccttccatagtaatttgtaagctcaaagctctgggaaacacatctgattttttcatggttatatttgaaataggtctggaaaggtgaatgtatgtatctggtgttccaatgaatgaattaatgagtggatgaatggctgatgggcacacttacccagatacaaggccctatctgcttgtaaggtagctggatctttcagacaaatataagacttaactcttcattgtttttgaacttccttttctctgtatttcttctttcactggtttgtattctggaagttaatgccttgtttctgacttggtcatgaggactgaaattaagtttctatggctttgtcttttccatagctcctacagaagaatggtcagctgtccaccatcaatggcgtagctgagcaagatgagctcagcctccaggagggtgacctaaatggccagaaaggagccctgaacggtcaaggagccctaaacagccaggaggaagaagaagtcattgtcacagagggtaagccgcccctccaggaactggaaggcacacagcacttgcaacaaactttggactcagcagaaaatactctgtcatactgcctggtggtggattggtgttaacagcaaaaacaatcaattggttacaaaaggaagtatttatctgaccatttggataccccctatacttagaccttgaagttatgtttcctttttcttatctggaacttgatgctttttaaattattgttgctttgtcccaactgcttgtctggagttgaatgtgaattcttgttggaaacagaagtcatggttgctttaaaagagtcattatctctccctctagagaggagcctgctatacttgtacaactctttctgataggcgcattgcaaggcacgtacccctctttgcttaaactatgatgtgctgcgtgttttatagctcttgagcctagagatcttcgaggaatggttattgaagagtgaccgtttggacacagtattgggatttgatttttacccatatagggggtgaggaaccgtatcttgaggtcagaattgagagcatgtggcccagtaagtctcttgtgaaaagcgaaaggctgcatgttgaagaaggaccttgagctcgttgttccatttaattataaataaagggataaccaataactgctatcaaatatatgtaaaatgatgattcggcatacggtaaattgattcgtgtaatatgaataagagagacaaatgaagggaaaagtcctttcacaggagattcaacatcgcctcacttagatgagattcttcaaacatgtggaacctgtttttcttcttgtttgatgcccccacagagctgcttcaagcagggagctgcttttgaagttggtgggaatacttatctgtatatagcaccacaggcacaatataaagttagaaatatacacagtctcacaggcggagtatttgcatgacctagtgtgagagtttcaaataattttcacccaaatgattggaatggacccaactcaaattcccaagtccaaagctttgtctttcccatgttaacttttgaatcaagtcaagcaccagcaacatgtgagcttactatgaccaagtctgtaaggttaagacaaggcaacttggtgactaccaaatgaattgtgcaagggatgagagctgcagggttcaggtggagcagtcacttgaggtgagaggggagattagggggaggctggatttagatgtgtgtaaacaaggaatgtcagcaaaagtgaggagaataataacagccaacactttatgtgcttttattatagggcccagagaggtgccttttgtgcgttatcacctttaatagttacagcaaccctatgaagtaggtgatattgttcccaagatgcaaatccagatcagcagattccaaaaccacttaaccactgtgctctcactgtgccgggcaggttcggaggctggtgtgttggaacagcctagcccctgcaaagagtttttattgaagggtgtagaatgaaagcccagaagggaaaaggggccagataacagggccctgaaagcagagtggagtttagaaagtatttagtggacaacgtgtgatcactgaactatgccaccaaaggggtgccggaggcttcttgtctgacttaggtgatctgtaggatgtataagaggagggagggatggggcagggacacagtttttttcatagaatcccaaatagcctggaaattcttttttaatctgtggcatgtttactggaggtcttaaggttatcttaccatagtccagatgtgatttcttttacatttcagccacgtgggtaaacactgattttcacagtgagtgattcagtccctcccctgtgactattccatcgtctccctgaggtgacctaggcttctgaccatggcctcggaggtctgagcaaatatcaaatcccccatgcaggaagggtggtgatttttattttttattttttgagatggtgtctcagtctcactctgtcgcccaggctggagtgcagtggcttgagctcggcttactgcaacatctgcctccccgcgcacatcccccgcctccggctccagtgattctcctgcctcagcctcctgagtagctgggacgtgccaccacacctggctaatttttgtatttttagtagaaatggggtttcaccatgttggccaggctggtttcgaacttctgacctcaagtgatatgcctgcctcagtcccccaaagtggtgggattacaggtgtgagccgccacgcccagctgtggaagagtggtaattactatacattttttgttattgttgttgtttgtttattttgagacagggtcttgctgtatcacccaggctagagtgcagtggcatgatttcggctcactgcaacctctgtcttccaggttcaagtgattctcctgcctcagactcctgagtagctgggactacaggtgcctgccatcatgcccagctaacttttgtattttcagtagagacaaggtttcaccatgttggccagtatggtcttgaactcctgacctcaagtgatccgcccgcctcagcctcccagagtgctggaattacagacgtgagccaccgtgaccagccaattaatataccttgtccttcccaagatcttgaaaaggccttgacctctaggaaaaaagaactagatgtgcctccataccatagcccagggctacagaggctacccaccagaggtgtttctggaggccttacttttggggtgagcttttgctgttttaggtccaactgctattctcttggtttattaggttctctgtggcaacttggcatactccttctgtttttttctttctctatttttttctgcctggcagatgataattaatagcctgacaatgtaaatacagacagaatcttcgtgttaacttattaaacagcatttttccgtgcttttgacatcagtgacagctcatggttaggtttttgtttagttttgttttgagacggagtcttgctctgtcacccaagctggagtacagtggcgtgatcttggctcactgcagtttccatctcccgggttcaagcaattgtcctgccttagcctctcaggtatctgggattacaggcatgcaccaccacgcctggctaatttttgtatttttagtagagatggggtttcaccatgctggccaggctggtctcgaactcctgacctcaggtgatccgcctgcctcggcctcccaaagtgctgggattacaggcttgagtcaccgtgcccggctcgctcatgattaggctttatggttgcttccagaaatcagaattctatatgacagtttgctgtaggatagacaaaggcataatttggcatgtgacactgacctgtaggatttgggacacctttgtttctaccactgtccacttaaataagaagagaactgacccattttggtccctgggaggactggcccacagtggaatttggtcctgctgtagataaaatagcaagatcaactgatgggagaaaataatgaacaagggccattcctactggagggtttttactttacagtggcagacaaagctagaggtgaaattttttttcccattttgattcacttgctctttctaaaactggaaatactggtagttcagaaccaaccctcctcctataatgaaaacagaattctgcttctttgtaaactttcttaaatgttagaaagaaggaaccgcatataaatattgtctaaactctacagcagggtctgatatatgtagatttggggagggggcttgattatgtcatttggtggacttctataagagcatacacaatgaggcatggacacaaacatttatttataatgaaaataaacacaactaattaccttagccttggcgagcagtccctttcttctgagctttgggattttcagtttatacaaacagcttatatagaaatgcaactgggcttcctctccctaactaaaaagtgctgtcatgctgtgctgttcccagcattcacagagactgcacaagtgccattggtttggggcaaatctgcttctaccgaaaagatgaaaaaaaaaaaaagaaaaagaaaagctccctttccgcaacccaaattatcaatcgttttatagtctatggcttgtacggtcttctctttgttaaaaacccaaacaagagcctgggtgcagtggctcacacctgtaatcccagcactttggggggccgaggcgagtggatcacctcaggccaggaggtccagaccagcctggccaacatggtgaaaccccgtctctactaaaaatacaaaaaattagctgggcgtggatggcagatgcctgatatcccagctactcatgaggctgaggcaggagaatcgcttgaacccggaggcggagggtgcagtgagctgagatcacgccactgcactccagcctgggcaacaagagcgaaactccatctcaaaaaaaaaacaaaaacaaaacagaaacccaaacaggaatgatttttaaaacattgtatcttgggctgagaccaattttagatttaaaagttttgcaggctgggggcggtggctcacgcctgtaatcacagcccttggggaggtcgaggctggggtccaggattttgagatcagccaacgtggcgaaaccctgtctctatattttttttaacttttggtaattagaacaactttgaaatttaaacgtgaaattcaatcttagtatctgttaggcagatgatttttttttccccgaacagttgaggaaaatcagttactcaaaaagcaacaccttatttattttgataatagcatatttgattttgaaataaagtgtctgcaaaactcattgccatatacaagtaatccagtgattatctcaggtcttcatccatttgaattaatcacttacaatgcagttatttgttttctttttgagatttgcgtctctgcagagtacgtacagcaaacattttaaagcatgtgaaaaccagcttttctccaaccttcacaggtcacatttgtttctgtgagcaaacagacaatggcaatcttttccttagctttagaaagttttttttttaaagaggcccttgctctgtcacccaggtcagagtgcagtagtgcaatcatggttcgacgtagcctcaaacttctgggcacatgtgatcctcctggctcagccttcccagtagttaagactagaggcatgtgccactgcgccagatagttctttaaaatgcttttgtagaaacaggttcttgccatgttgcccaggctggtctcaaattcttggcttcaagcttccttccacgtcagcctcccaaagtcttgggactacagaagtgagccaccacagccagccttaagtaatttctgttcacacctcttgtgtacccagagttgaggatatttacaccagcagcaatggagcaggaagcagctgggtgctctgaccttggcatttgccactctggggctagctgctttaaaactgtcagccagtgaccagatgaaccaggccttgttacactaatcagataacggtatagaggcggctcccggtgtgtgcacgtggaccgccactgtgacaccagctgtgatcacaccccccacccccggggaaaaatgagaaacaaaaaccctcaaaatgctgtcacttaaagcagaagtctttgaggggatgtatttcttaacgttttacaggattccacttttctacatctgagtattttcccccagatatagtaacaaatacaacactttagagaatttcatttttctaatggcgcttaatgtcatcgtctgcttttattaaatttgccatttgaacccaccagctcctggtgtacagttcctctgggaaacagaaaggccgaaagattaccgccagataatcccagccctccctaaagatcttgttaccttacagaaaatccattctgagttaaaagtcgttcttctttgctttgaacatttaataactttatctgtatagtaggcaccctaagacctgctctgagcctcttcaaagatgactcccccaccccatacctgtttcctctgcaagaggctgctttctctgcccagaaggaatatttttatgatttgattccttttctatttcagttttcaaattgtgacatcattggtatcttgttagaagtgcctgtcacccacattacagccctccactcctcctttccttttctctacaccagttgttaacatctggcatttgacatctgtctctcacccacactttggctaaaatataagaatcaagcccaggtgcggtgacttacaacggtaatcccagcactttgggaggccgaggagggcggatcacttgagcccaggagttcgagaccaatctgggaagcatagtgagacccttgtctctacgaacgtttaaaaaaattagctggacgtggtggtgcacgcctgtattcctagttgcttgggaggctaaggtgggaggatcgcttgacttgagcccaggagtttgaggctgcagtgagccatgattgcaccactgtaccagcctgggcaacagattgagaccctgtctcaaaaaataaaataaaatataagaatcatgaggacggccgggcacggtggctcacgcctgtaatccccacactttgggaggccgaggtgggcggatcacgaggtcaggagatccagaccatccaggctaacacggtgaaactccgtctctactaaaaatacaaaaaaattagccgggcgtggtggcgggcgcctgtagtcccagccacttgggaggctgaagcaggagaatcgcttgaatccgggagctggaggttgtagtaagccgagatcgtgccactgcactccagcctaggctacaagagggagactctgtctccaaaaaaaaaaaaaaaaaagaatcatgagggcagagttttcttgggatggggattcggagggtggtccatggcaggagatggggtgaggggggctgtttagttcagtgctgaatcctctgagcctggaccagtagctggaacagaggtagcgctcagcaaatatatgaataaatgaagacacagttttcagttggagttcacagtattacatttataatcatctaggtgaggaggagctgttggctttaactctgtatcaattcatttcctgcttaaagactgcggctttgtacattttatccaaggctctctttcctttgttgcatcagcactgacaaagccagaccctttccaggatcgcaccatgctgggttctcacaggtgcttgctgttggttagccaggtgttgcctggaaacatgaaataggaccctgacctgcacgtgattaaatgtggattcctagtaacgctatcaaacacaagtgcccaatagataaagagaggggtccccttgcacacactttggtatttcaaatacaatattattgcatgacattttctcaagctgtatcctgttttgtaatgttttgaagactggagggaacacacacaaaataggccttgaacttaggtaaaagtactatgctatgcgatttctgggaactggttttaattcattctcctgctctgcagcaattgtttttagtgtggctgcactgaaattacttatgtcattgacaaatttctggtccaaatatttcactgccttcatccttaaagaaacagagatttattttcctgtaatcagcagtcaagatgtttttctctgaactatattcaagtctgacagtgcagtgaactttttttccttctgacttaacaaaaggagtgaggaagaaggacagcaagacttctgttcaccctttctccccttcgtaaatcaactaattctagggcgctagacacggctaagactgctttaattactactttttgcgtgatcttgatttgaatacatttctttatctcattgcaagtcagttttcatctatgaaatgagcatccccacccatctccgaaattctgtggctaatatcaatatgactagttatatgggtactaaaaatgaaatagtggattagctaatgaagacacccaagcgacctgaagcaggcagcaatccacttggtaattccgttatgcctttttataaaaatacttttatggcttttctaatttttttttttttttcggagacagagtctccgaactctcccaggctgaagtacagtggtgcagtctcagctcactgcaacctctgcctcctgggttcaagcaattctcatgcctcaggctcctgagtagctggaattacaggcgtgcaccaccacgcccagctaatttttgtattttagtagagatggggttttgccatgttgaccatggctggtctcaaactcgtaacctcaagtcatccacccacttcagcctcccaagtgctgggattacaggcatgagccaccgcacccggcctctaatctgatcttaaaagccattttctatatttgaagttttaatttaattaaacaaaaagttcaaggggggaattttattcaaaaatatcttgaaacataatcctcttggtgtcaaagaataagataaatcccttcacaaatgtggccactaaacgtcatcctctcatccccccatatgtgttctgctgaatgactggcggtcaggactatgtaatagggattggttatagccagggatgggggaaagaagttggtaaatgccatagctgcttgccctaaagattttcagtcagccttggagatgttacctataaatctctatagttcggaggccactcaagtccactttcaaattgggtccatgttctggcccatttgagaaggagccaggcaagtcagcctgtaggcttgcccaagtaacagtctaagaattaggcccttttctgctgggcacagtggctcacgcctgtaatcccagcactttgggaggctgaggtgggtggatcacaaggtcaggagttcgagaccagcctgggcaacatagtgaaaccccgtcctactaaaaatacaaaaattagcccggcatggtggcatgcagctgtagtcccagctattcgggaggctgaggcaggagaatcgcttgaacccggtaggcgagggttgcaatgagccgagatcacaccattgcactccaccctgggcaacagagtgagactctgtctcaagaaaaaaaaaaaaaaagatttaggcccttttccttgaagggactgaggtggtccacaaggagtggctctctgattgtaactaagccactaatggagacatgcaattattttagctgtgtcttagtccgttcaggctgttgtaacaaaataccttagaccaggtaatttataagcaacagaaatttattacttatagttctggaggctgggaagtcccagatcaaggcaccaacagaatcagagtcttgtgaggtcccactttctctggatggtgccacctatgtgttctcatgtggcagaagggcagaggggacaaacaaacacccttaagcctcttatatgagggcactaatcccattcatgagtgctccatcctgaggctgatcacctcccaaaggccccaccctctaatatcatcaccttggtgattaggtttcaacatatgaaattttttgtggggagggacacaaacattcagactgtagtggctgttttatttatggaatgaaaatcttttaggcattttctcaaggactgactcaccttgagtgtaaaacaatttcagtgtcacctaatttatagtaacttttacatgattaaggcaatgatatagtctagagcatgatgtccctgtattatagtgtattggtccattctcacactgttataaagaactgcccaagactgggtagtttataaaggaaagaggtttaattgactcacagttctgcaggggcggggaggcctcaggaaacttaacaataatggcggaaggggaagcaaacacatccttcttcacatggcagcaggaaggagaagtggcgagcaaaagggggaagaaccccttataaaaccaccagatctcatgagaactcactcactatcatgagaacagcatgagggtaactgcccccatgattaaatttcctcccactgagttcctcccattaaacatggggattatgggaactacaagtcaagatgagatttgggtggggacacagacaaaccatatcatatagaaaaggatgctttgataatgtctgaagatatattctctgggcttaaaattcaacaactgtttagcctgttaatcaagatttattcctgcatatcatgcttcgaattgttttcaaattgctctttacttcaagtatcagtatagcctgatatcaggtagttttcctccgacctctagtgttaaccagtgcatgcattagtcattcaggtgaaaagtgctatgtgctagattgaattaattgagtgaactggttgctttcatgtgtcttaacatggacgtgcaatatttagaccaaccgcaggcataaggtcattatccccctgtattaatttgctaaggttgtcatgacaaaatactcgactggtggttcaaacaacagaaatttattttctcacagttctggaggctggaggtccgagatcttggtgttgcaggtttggttcctcctgaggcctctctcttttgctcgcagacggccgccttctcactgtatcgtcacatggtctttcctctgtgcacatgcacattcctggtctcttggtgtgtccaaatttcctgttcttataatttttttgagacacggtatcgctctgtcacccaggctggagtgcagtggcgcgatctcggctcgctgcaacctccacctctgggtttcaagcaattctcctgcctcagcctcctgagtagctgggattacaggcttgcaccaccacacctggctaatttttgtatttttagtagagacggggttctactcttcaccatgttggccaggatggtctcgaactcctgacctcaagtgatcagcccgccttggcctctcaaagtgctgggattacaggcgtgagccaccacacccggccaggactcctgttcttattagggcccaggctaatggcctcattttaacttagtcacttcgttaaaggccctgtctccaaatgcagtaactttctcaagtactgggagttaggacttcaaatgtgaattttgtgggggacacagttcagctcataacaccgcctccatgagtgatccactggaaattcacatttgggaacagagaaatgttagtagaagggagctttgaggctctgaaccaggagcctacccctgtgcaggaggctcttctgcttaaccacttgaaggtttgcggagttttctccataaaaggaagccatttattcctctggagctaaaatatgcctccctccaactgctcttctctgttcccagggctgccttgtggaactacagagaataaactcacctcctttttccacatggcagccctctaagtatttgaaaacatttatcatgtctttcctttaatcttttcttctctaggcaaaacatctcccgagaaaataacctgtctcacattaaaagaaaaactccagggcttatatatatttcagacaggaatgtgcttgatggaagcttgccaaacatcactgggtttcaatttcagtatccccagttttaagaaccatttctttctcagactctttaaaacatgagaacaacttagtttgctttaagccaaatattatatactgaaagaattgactggaggacatgagtcattgatactgaagtatgtgactgctggtataagggaatcccttacctcaaggatgttgcaaaatgagctgaagtcaaataaagtgaagaaaacatcaatatatgttgacatggattcctaaccctggaatgatcagtcacccttctggtacttcactcaacaagatgattagcatacagccttacacaaagcagtagctagagattagagcaagagaattcctgctttccagataactgttagctgtaaataaagtggcagattgatagtgtccaaccaaatagtcagggagcagagccaaggtttgctctcaagcagcctcctgccaagccctgtgacctcaccgtgtaagcttagcattatggactgaaggtttgtgtccccctaaacgtacatgtcgaaatcctaactctaaggtgatgtggtatttggagggaaagcctttgtgaggtacttaggtcatgagggtggagccctcatgaatgggattagtgtccttccctttcaccatgtgaggttacagggagcagtctgcagtccagaagaatccaggactaccagatcccaaccacactggcctcctgatctctgactttcagcctgcaggattgtggaaaataaaagtgttccttgtttataagccacctggtttatatggtgcttttatagcagcccaaatggactaggacaatgaacaaaaagtatgatgtcttctcatgcttgtcaaaatcctggtcctaagtattcccctaatcaagtccatttctgttgagtatgttcaaataccttaggattctttgtcagtgttatcttgatagatgtctggccattggaatctgatgctgtttcgagtcttcatcccttatgtagctcatggactccttttggtcttcagttttctgaatatcttgtaatgaggactctccacgtgaatccgtttccattcaatgtgcggggttctttgagctctttcggtctagaaactcatacacttggctggatgcagtggctcatgcctgtaattccagtgctctgggaggccaaggtgggaggatcacttgagcccaggggtttgagactagcctgggcaacacagcaagaccccgtctctacaaaaaaataaaaataaaaaaattatctaggtgtggtgttgcatgcctgtagttccagctactccagaggctcaggcaggagaatcgcttgagcccaggaggttgaggttacaatgaatctcaccatttacactgtagcctgggtgacagagtgagaccctgtctctaagaaaagaaaagaaaaattcatgtacctcatttctgggaaatttttttacatatatctataccttttcatttggtctatttcatagagttgcctaggtaaagaaataaatatatgtggactcaaggagagaaataatatttattctacatcacttttattatttgagtttttaatgtttattttcccgttgctttttaaagtgattttaaaattctcttttagtgtttctgttgtatcataacaattcctttgaggaactattcttcagagtatttatcttggattttgaatagcaataaccatgtctatacaaacatgtccagttcaactggaccataaaactcaattagttgatatttatctatgtgcatagcatgcagcagagagcctgcccatcctgtagataacctgacagtgtcatttagattcagggtgtgtatagatagatagatacagacagatatctatctatacacaccctgaatctaaaagacaggtgtctgtctatctatctatctatctatctatctatctatctatctatctactatctataactatctagatatagatatatctctatatagatatatatatatagatatagatatatatatctatatagagatatatctcctcttttacagttatccaatttggagctgtatttcactcaactttaaattatcttggagcatttcaaaggaataacaggaggtgaggtcaccccactgattgccagggttgacttggctgatcgggctggctaggcgggtgtccccttcctccctcaccactccatgggcgtccctcccgaagctgcacacttggttgaagaggatgaccatccctgatagaggaggactggtcttcggtcaagggtgtacaagtagctgcgctcccctgctagaacctccaaacacgcgctcaaggtccatttaaaggaataacagtggcatcgattctctgttctatttcatctgtccttttccagcaagaagaaaagagaccctactggtttttggcttcttttcctccaagggcgatgccaggttaaagagaaaatgagaggagaggaggccagggagggttgaatttagtgtgcaagtccattcttccattccgtgacactcatatttgggttaaatacctaagcatccttggaggaagttggagagcctaatattggttttaattctgagtgtagtggtccctgtcccctccctttcaggaaaaatagaggaaagtagcctgctttattgcagccatctgtccactggtcccgcctccagactgcccactccgaggcctctcccgttctcttcctgtgtcactgcttggttttttgtttttgttttttatagagatgggatcttgctgtgttgcccaggctggtctcgcactcctggcctcaagcaatcctcccatctcggcctccccaagtgctgggattacaggcatgagccacctcgcccggcctgtgtcactactttgtgctgtcacactgtggaccactgtttccatgttttaatcctctccacatgtggctttgctgccactttctccctcattgcccctaatccctgtccattcccagggtcctttttcagattcctcttcctcagggttccaggccattcttatttcatggacatcattccgttcgggtgatcccacagattcgcactgcatctttcatcttgtgggcaccgtgactttggactcctccctcaccttcgtcactactgcatccatctgttttgttgcttcagtctcttcctcccgtcatcacagcctggttgccttttctaaatcacagtcaaattcggtgccaccatcccctgcctcaagcctccaatggctccctatagtcttcagaaccagcagcacaaagttcttttttaaagaaacaaaccagcttttgtgagctgtaattcacatactatgcagttgacccatttaaagtacacagttcagtggtttttgctatattcacagagttgtataaccacccccacaatcaactgtgggacattttcttttctttctttcttttttttttttgagagggagtcttgctctgttgcccaggctggagtgcaatgacgcgatctcagctcactgcaaccttcacctcctgggttcaagtgattctcatgcctcagcctcccgagtagctgggattacaggcgtgcgccacaatgtctggctaaattttgtatttttaatagagatgggatttcaccatgttgaccaggctggtcttgaactcctgacctcaagtgatctgcccgcctcggcctcccaaagtgttgggattataggtgtgagccaccacacctggccaggacattttcattacctcataaagaaactccatcctggttagctgtcactccctctcccgccaaaacccccagtcttaggtaaccactaactactttatgtctatggattcgcctcttgtagacatttcaaataaatggaattaaaccgtgtatgctctttggtgactagcttctttcacttaaagttttttcaatattcatctatgttatggcatgtttcagtactttatttcttattactttttattactaacccatttccattaaacaagctcaattttatttatccctgcatgagctgatagatatttaggttgcttccacttttggctactaggaatattatgctgtaatgaacattgatggacaagtttttctgtgggtgtgtatttccattgctcttggttatatgtctaggagaattgctgggtcatataataaatttatgtttaacattctgaggaactaccagcctattttccaaagtggctgtaccattttaccttcccaatagcgatgtgtgagggttccaccttctccattccttgttattgtggtcttccttgccccccgccacctgcccctgttttttaaaccaggcacatcagctttatgtttttttttttttttttttttttttgacacagtctcactttgtcgcccaggctggagtgcagtggtgcgataccatcttactgcaacctccacccctctgggttcaagcaattcttgtgcttcagcctcctgagtagctgggattacaggcgcccgccaccacgcccggctaatttttgtatttttagtagagacggggtttcatcatgttggccaggctggtctcgaactcctgatctcgtgatctgcccacctcagcctcccaaagtgctgggatcacaggtgtgagccaccgcgcccaacctgttgtcttttttcttttttattatagtcatcctagtgggtgtgaggtggttttgatttgcatttttctaagggctaataacgttggacgtattttcatgtgctcattggtcatttgtatattttctttagagaaatggctactcagattctttgctcacttttaatggataatttgttacaaagtctttaacatgtcattcaagaccctttataaatatttttagtttcatctccagtgttgtcttccccgccaagcccccaactcccggacctccctaagtaaactccgaacctcatagctgtgaggaacccactcatgattgcccaaatgtcctgctcttggcatctctgcctctgcccatgctcgtctgtccctatggaccgccttcctttgtgccccaggtagggagtgtcccctcatcccttcagagaccagctccaaggctacctcagaggtgagccaaactagagctgcccactcccgccactgggcgtgtccaccacccactcccgccactgggcgtgtccaccacccactcctgccactgggtgtgtgcaccatccatgactgagctcccgaggccagggatagtatctcatttagatccctgggtgttttgcgtaataaatatggagcaacaacttggtaaatatttgttgagtgaaccattctgatttgggaaaacacgttttctatcatccatctatgtattatacagcaaaatgtttcctataattcttgctttgggtggtgatgtcttcctctaaaaatcctaatttaacaaaaacagagaatggaaatgataaaagaaagtctcctgcattggacagtgaccttaggtctcatctttactcctgcttttatcctaattgatgacttttctttgtaaatgcagacacacagaggctcgctgggcagctgggccgtgcaccctgtccttgatcattcttagaggtagagatcaaaggagacccattggctgagagagtctacaacttgccacatgatctattgctctgccttgtgattttaattgcctctttaagaatatcaaatcaggccggacgcagtggctcatgcctgtagtcccagcgctttgggaggccgaggcgggtggatcacctgaggtcaggagttcaagaccagcctggccaacacggtgaaaccccgtctccactaaaaatacaaaaattagccgagcatggtggcatgcgcctgtaatcccagctacttttgggaggctgaggcaggagaatcacttgaacccgggggtcagaggttgcaatgagccgagatcgcgtcattgcaccccagcctgggtgacaagagcgagactccatctcaaaaaaaaaaaaaatcaaatcagatgtgttagcgtcttcatgaatgtcataaaaagaaatgtttcagtgccaaaactgaacagcagtacagtgacctttgaaaatgttgtttagggtattaaatgtgtaactagtgacattttgtgtgtttttctttttcttcctatccagctcagtggaatagctgttgcttgtcccagtgttagaatttggactgatagaaaggagaggagctggagattcattctgctctgcaagggcagactcgatttcagaagtggcaccagatgatagccttgtgttgtccccaaccactggtgctgagaaatgatgcagaaccaagccctcagatcccagatcacccacggctcctgggacatctctggggaagggacttattaatgtagaccctgatgcaacatcccaagtcgtctttatccatgatttgcacagccaggacactctggggctgggattgggaggagaggaatggccaagttgccctgcccccttggctctgtggactccagaaggatggtcagtaccagcagcatttcacacacaccagcctcattattaaaattggagcaatttgtgaaatagagttgagacttctctagagaaaaaaggttgggaagcagctcagtggctgggtctgggagtcagcttccaggcaatatctcactgagtcaggacaaggcccatcattccctgttcccgccaggccgggtatttgccaggatgtgaaacggaagccaggcttttggagaggctgaagctgatttttgtaacaaggtctggttaccagcaaggaagcggttttcacgttgctcactctgggcccgagtgtggtgcatcgcgccccctggtgcccaaaaagtgcaactacgtgccatgccagccagctctcctggacttccatttttccctgattctcctgttcctcgcccacccttctctttgctgtgcccactgtggtctacgccgaggctcccctccctcctccctgccccaagcaataatgaacaagatcttcattctctgaagagaagtgcaatagtaaaactttcctttttgtttgtgtaggggaagagctggtgttaatgggtcaggcaggcaaggcatgaagtgataaatagggaaaggatgaaagaagggaacaaacccaggggacctaacggacccaccctaacaaaaaattggagtacaaaaaaagtgtattaaaattgtgagaccacaccaactcattcgtcactcgtgtctttacaaagaacaaacctgaagcttcaatgagaaagaattgaagtattctagggctgcctgaaatcttctgaacttttaacataggctttgatttccgagttgtgtgcttgcatgttagagatatgatagtgtctaaaaattggaacatggcatagtttgatctaaaaagttagctaacttctgccatttagaaaaagaccccatgctcaagtctgcttttgaaaagttgccttggtcaagtgttgaagacagcacttgttagaaggaacaagttcacttctgagagcccttctcaaagagtttaggaaacagcactactgagagttgccagtcttcagagcagtgcaacgtgtgtgtatgcgtaagacacagatggtgaaaatatcaaatgctacagatgccaagaagggaggtgttggcaccacaccaacctttaaacaaacataaggatgcagaatgcagtctttaaaatggagggagaatttactgtctgtgtggctatttccttgaaatgacttaaaaagctgagatacagaagtattagtaaatcggtgccaggaatgaagtaaccgtttagatccaatgcgccggctccagcatcgaactcatgcccagcaccctttaaaccctcccgggactctgcagaacccgctgaccactcacagagcccagctcgggggagggctttaaggtgaagcacgtgaccccctgcttgtgcggcccgggcggggaagtttgcgctcccgaagtcctggagctcagcaagggaggggccagcgccagcccgcgtgtgggtggctgggtgggggcgtgggtgggggtccgcctataattatctggggaaatgcatccgcgctctgcttttcgctgcggcagctccgagggcacctccggttctcccccatcctccgggagtgtctgggcgctcagtccgctctgatcccgccgaaaccacctgcggttggcaggcaggagactaggcgtctgccggggagggcagggacccgctaagctgatctcctgtacagtagtgctacttaaaatatgctggggaccatcaccatcacaggtaaggcacaagccaggtcgcttttgtcctccctggacggcaggcacggggcacgaaaaggggctttcttccgttgaatgagcgtttggtggggagcccgggaggtcagtggcgggaccgttattggcatttatttctctccgtgtactgagtttttcttcagaagaacattctcccttgggctcagcaagaatcagacaacctcagtgtttcatttttggctgagctggaatcttcttgactgtgcctatgggagacctttagtatattttgttcggggttgtacccttccccttagggagagagggatgtggagaggaacaacagcagccgactgaatagaaatatgtcagatttgtgtgaatttgaaaataagctgtgaaagcttaatctcttgccgtagtcatagacagaatacattcctcttctgggcaaattacaagtgtttgcattttgacttgtttactaggaactttgaataaaggtacacttggtggtttaggggactaacatttaagctctgctttaagtggtggttttaataaagccatagttattataaaatcggtggctaggaagcaacactatttaggcaacaaatagtaaaaaaaaaaaaaaaaagaaaaaaagaaaaaagtatgtttctttagcttactttctaggaatctggccgtgagtatgaattataatatttactgcctacttctagcaaataacttacacgcatcaaacttttagaatgctcttacagctcctctaacttgacatttgatagtcttatgccattgtactgtggcctaacctgcgtattttctcttcctgtcatcaagaaaattaaattccgtttgtgaatttaactttataggaacaggacttctttattctttaaatatttgagatcattgctgccaaatctttttttttgtttgtttgttttttgtttgttttttgagatggagtcttgctctttcgccagactgaagtgcaatggtgtgatcttggcttactgcaacctccacctcctgggttcaagcgattctcctgcctcagcctcccgagtagctggggttacaggcacgtgccaccacgcccagataatttttgtatttttagtagagccggggtttcaccaagttggccaggatggtctcgatctcttgaccttgtgatctgcccgccttggtctcccaaagtgctaggattatagacgtgagccaccgcacctggcctacattttttttttttttttaatcaactgtagaatttctaggacttaaaattttctcaatgcaactgctcctgcaaagccatgcgctccagtggaatttacaagaatgtgaaagttcagcaatactaaaattatctctcacttcctatagattagcttgtttactttgagatttccttaaaattcgacccccaagttgacttggctaacctttctaccatttactcagcttgaaagtttatgccatatctcgaaactattaataaatagactgtacaaaatgaaaaaaatttaaaacacaaaaatctccattttttcccccagatcattaacttttctatgaatgaaatatgcaaatgtgtattgtagggagtcacagctggggtggtgcttctgagatcatgacttttttctgagtactttttgggtacaatatgatttttattatattcactattcaattagtcgcatactgagattcctatggtaaaaggaggtggtctaaagttttagcagtaattaaaggttaataaactgggagcacttgagggggcttgtaatagttggctcagataatcccaatggagtgataaatgaatggaaatagtgggaaggactaacttttaaggcaaaatcaggtaattggctctattgctttctaaatttacttttcttacaatgtgggtgtggaggatatggcaaaattttgcactttttcctggtaagaagaaagtgcacagaaaatcttaactccaaaaatttaccagcaagaaatcttacgtagtggaaaaagtaaaaatgaaagggagtttcagctgtcatttggtttttgctccgcaagttattctgatggggaagattcataatcatcatctttaaatagttgctcagaatcttgaaaagccatgagagctttaaaaattgacagtaacaaccgggcgcggtggctcacgcctgtaatcccaggactttgggaggccgaggtgggcggatcacgaggtcaggagatcgagaccatcctggctaacacggtgaaaccccgtctctagtaaaaatacaaaaaaattagccgggtgtggtggcgggtgcctgtagtcccagctacttgggaggctgaggcaggagaatggcgtgaactcgggaggcagagcttgcagtgagccgagatcgcgcctctgcactccagcctgggcgacagagcgagactccatctcaaaaaaaaaaaaaaaattgacagtaaggtggccgggcgcggcggctcacgcctgtgattccagcactttgggaggcggaggcgggcggatcacgaggtcaggagtacaagactagcctgaccaacatggtgaaaccccgtctctactaaaaatacaaaaattagctggacgtggtagtgtgcacctgtgatcccagctactcgggaggctgaggcaggagaattgcttgaacctgggaggcagaggttgcagtgagtcaagattgtgccactgcactccagcctgggtgacagagcaagactccgtctcaaaaaaaaaaaaaaaaattaaattgacagtaaggtttaatgaaatcttaaaggtctttgcatctttgggattattcacttaaatactatagaaggttattgtagttatctttagtactatgttattttaggaggcctgtgtttaaattttacaattcattaacaggactgatggcattttgtaggaactacttaggaacaagtttgcatttctgaaagtaaggaaaagctgtcacttaatactattatccccctcccccctgccacacacacaacccagtttacacaaaccactaaaatgaatgcagtggaaattgaattatgaaatgattgcttattcacattacatactgttgccattcttggggtctctttctctcacatctcatttgcaataagttagctttgagacaagaaataagtgatgtgacacgatgatcatccccttccccactcaactgtaaatggcgtgccagcataaaaatgcctttttttttgagatgaagtctcactctgtcacccaggctggagtgcagtggcgcgatctcagctcactgcaacctccacctcccgggttcaagcagttctccctgcctcagcctcccaagcagctgggattacaggcacctgccaccacgccccgctaatgtttgtatttttagtagagacgaggtttcgccatgttggccaggctggtcttgaactcctgacctcaggtgatccacccgcctcagcctcccaaagtggtgtgagccaccacgcccggccaaaaaaatgctttttgaattaagcaagtatcttttcgcttttctctaacacccacattactgaaactgataatattgatacattgcaaactgtgaagtatcatgagaaacagggacattattctttaaagtagaaactggggaagaatcaatcctccaacgttcatgttagttctagattatttataatgcactttccgatgcaaataatttttacaagagaaaaaaataccttgcacatgggtgtttcacatctgctatggagacagattccttgtcaagagactttggagacacgaaattgatactttcacaactgctggattaataactaccacttcctgagtgcctagtctggcaggtgttgttcagcactttgtggacattatcatgtattcctcacaataatcctgcaaaaagtggttctgtaaccccatttctatcataaaagtaagtttctcatgatttgataattacccaaggtttcacagctagaaagagcataactgtagagtaccttgcaaaagacctctttctcgttgtgaagatgctaatacttgtttagtgacccacattcttacatgcctgcccagatgtttaagggatcgtgaaacatcaatatcaagaccagggattgggactgggcacggtggcttatgcctgtaatcccagcactttgggaggccaaggcaggtggatcgcttgagtccaggagtttgagaccagcatggtcaacgtaggggagacctcctctctacaacaaattaaagatttagctgtgcatggtggcacatgcctgtagtcccagtcacttgggaagctgaggtaggagaatcacttgcaccactgaattccagcctgagcaacagagcaagaccctgtccctaccccaccccccaaaaaacacaccaggtccaatgatgatgtcacctatatgctccagtatgggatccttgcttttatgaatttgcatatatctccgcttggaggttttctggttaatgagctttagaacaagggagattgggtgtgtagcctataagggatggacttagaatgcagagaattcctggaaaaattccaggacaatgctacgaatcttgggggaaagataactagttccagatgttactgtaagccgtcctgatgtgcctggggatggggagcactggtgattctcagcctgaaaaatgaacatgtcgtttctgcagtatcgtacttctttttctcaaccaaaaatgatggtgctggtgtcactgaaacctgatagctaagttttggataaaaacattaatattttgtagtatataatcaacatattcctttaaagtttttttttcttttaagcctctaaaagaaaacaatttataatttatctcttaatcgctaagtatttggaaaagtgagaaaaaaaagatgatgctccaggttttgaacacacgggctgtctctacattatatggagcttgcggatggggaacacatagccagcagggaccactgtagcttagcccttcttgggatcatggagcgtttgcagctttggggacggggagattatggagattttcgaaaggaaaatgtgtatttgcacatacacgttatagacctggagactgattttataaatcgggattcacagaacatttatctggagataaacccaggttaatagcaggtaacaacacctcagtgtgaaacacttcagtaattcttggcccaagtgaggtttttgtacatgaaatgatttcaagttttgatttcttactacatcactaaagatgtaacttttcatatattttcacatttatttgactccgttaatattccataggacttttttttttaaccttgaaggggcttgttatgacaaagctgtttaaaatattaaaaagcacctagtttgttattattgaataagtgttataattttttttataatgttgtaattgagaatagtttatactcttaaaaatagggtgagaggtgttcagtccaggaagtatctcctctatttcactttccacacttattattaaggataactttcatttatcttagaaaaacataaagcaaaagcctacccaaggtctcgcttggcagtgataacttcaagttatttttccttccggaatgttgtagcatgaagtagcttcatccatatccagcctttatttttactgcatctttttaaaagttttggccgggtgcggtggctcacgcctgtaatcccagcactttgggaggccgaggtgggtagatcacgaggtaaggagatcgagaccatcctggctaacatggtgaaaccccatctctactaaaaatacaaaaaattagccgggcgtggtggcaggcacctgtagtcccagctactcgggaggctgaggcaggagaatggcatgaacctgggaggtggagctggcagtaagccaagattgcaccaacgcactccagcctggacgacagagcgagactccgtctcaaaaaaaaaaaaaaaaagttttgttttggagtactagtagcacgatcatagctcactgcagcctggaactcctgggctcaacgatcctcctgtctcagcctcccaagtagctgggaccctactgagtagcacgtccagttctgggtctgtttttttttttttttttttttgagacagtctcgctctgttgccaggctgctggagtgcagtggcatgatctcagctcactgcagcctccgcctcccaggttcaaatgattctcctgcctcagcctcctgagtagctgggattacaggcgcccgccaccacatctggctaaatttttgtatttttagtagagatggggtttcaccgtgttagccaggatggtctcgatctcctgacctcgtgatccgcccgcctcggcctcccaaagtgctgggattacagacgtgagccaccgcgcccggcccagccctgcatcttatatgcactatatccatgcagagatccctccttcttgggtatattcagaaaattaagtgaatgaaagctttctctacatcttctttaaaattatcatatcttttccaagtaatgttttcagcatattgaccctgtctcacacaagcatgtgattaggtgtctccacccagaagaagggtatagaaatatttggtttctgtagtaatattctcttgagaaacaaggcatggatgatgttgtttcactaatggttgatgtcgaaagccctgtcaatacaagactgtatcacacatgggtatgtggcctgttggaaggattagtctttttcctgcgctttgaagtgtctacagggtgggaaaagaccagtgactagcaggacagtacgaagacggaggtgcctgtgaattcgggctccagaggcttctacgggggacacaccgaccactccctttaacattttggccatctttgtgacctagtgggatgctggaattgtttctggccgaacctcagcaccagtgagtacgtgagcaccacgactgggctttctgggcatgggagagacttgggcggatagcagcgtgtttaaaaatggcggggtcattcaatcacacatgagttaaaaaactatacattgtgtggaaaagaccactccaaaatcagaggaggttttaggggcaccaaaaagtacatccacatatcagtgatcccaaatcaaagatggagctttttggttttcctctttgtagccagtcggacaaatctaaggcagatgaaaattccataggagttttgaattaaaagaagcgccctaacggaaagctgtgatgaagggtggttgtgaatggattccactgtgccaggcctgcacgggttagcactggctgcctgtcctggaagccccctccattatttttagaggcctcttatcaatcactcccttcactcccagcagtgggagtgggttgagcctctggtctgagcctctcctgcctgccgcccccacatcttttaggctattttataatgcatttaacagcctcccgctgtgttcactaagctacagtctttaactcattcacaaccagcatgcagggagcatgtaaaaatactttctcaggccgggcgcagtggctcacgcctgtaatcccagcactttgggaggccgacatgagcggatcacctgaggtcaggagtttgagaccaatctggccaacatggcgaaactctgtttctactaaaaattagctgggcatggtggcgggcgcctgtggtcccagctactcgggaggctgaggcaggaaaattgcttgaacccgggaggtggaggctgcagtcgagatcgcaccactgcactctagcctgggcaacagagcaagactgtgacttcaaaaaaaaaaaaaaaaatgaaaggtttctgctcaccacaaactagaagggaatgatggtggtcttgtttgggactctttacctgcagcaagaacctgggaaatgtgggggtgattttggtgtgtcatgtacagttgggctggggaaagcgaaaaaagtgaagaagaggaggtgaggagggggaggtcagcacaggaagaagggtcctggccacctttgacccatacttggggtaaaggacctgcatctggccaggctctgtggcttatgtctgtaatcccagcactttgggaggctgaggtgggaggatcacttgaagccaggagttcaagaccagcctgggcaacatagccagttcctccatctctacaaaaacaaacacaaaacaaaaacagaaaagggatctgcatctttacatggtgcaaataaagaaaactagaagatagggagttaacttgagacatactattatgtgctccttttctccccttgaaatgttgatgcaggaagtcagggtggtaaaaaataggcacaatgtcacattcagcttcacaagatttgaaagtgcatctcagctgggagcggtggctcacgcctgtaatcccaacactttcagaggccgaggcaggtggatcacctgaggtcaggagttcgagaccagcctggccaacatggctaaaccccatctctactaaagatagaaatatttagcggggcgtggtggtgagtgcctgtagtcccagctactcaggaggctgaggcaggagaatcgctggaaccctggaggcagaggctgcagagagctgacatcatgccactgtactccagcctgggcgacagagcaagactccgtctcaaaaaaataaaaaagagtgcatctcaactttttttttttttctttgagacggagtcttgctctgtcgcccaggctggagtgcagtggcgcgatctcggctcacggcaagctccgcctcccgggttcacgccattctcctgcctcagcctcccgagtagctgggactacaggcgcccgccaccatgttcggctgattttttgtatttttttagtagagacggggtttctccgtggtagccaggatggtcttgatctcctgacctcgtgatctgcccgcctcggcctcctagagtgctgggattacaggcgtgaaccgccgcgcccggccttcaacattttgtattggcgattttcagtgacttctggtcctgaaaatcaagagctttctggttcagcagagctgaaagctgttcaatactgccctcttctgtccaaaactcattcaggcatttggacaatgattttatactcgggaatgtttttgacaaagcgtgatggtgaaaattggacattatctaaccatggggacagaaaaacaaattgtgcagccattaggtcttagttttgaagactttattcagaaaacaacacaaatagtgattatctggatgttgtacttatgaaaaattttccctattctctgtattttaaagtcttctacaatttatactgattatgtttggaattggcaaaaagtaaaataagtcgttctattctgaagaaaacaagcaaaaatattaaagtttttgttatttttatagaaagccaactgatacttcatcctcataaccagccttagtgtcctcacctataatgtaagtgacttatgttataggtgaggacactaagaacagagattttcattttatttttatttttactgttgtttgtttgtttgtttttgagatggagactcactctgtcacctgtgcagtggcacgatctccactcattgccacctccacctcgaaagttcaagcaatcctcctgcctcagcctctcaagtagctgggattataagatgcaccaccacgcccagctaacttttgtatttttagtagagacggggtttgactgtgttgcccaaagctggtctcagactcctgaccccaaagcgatcctcctgcctcggcctcccaaagtgctgggattacagccccgtgagccactgcacctggccttatttttcgtttagattcaggggatacatatataggtttgttacctggatatattgcataatggtgaggtttgggctctagtgtacccgtcaccggagtggtgaacattgtactcaatactatttttcaactctcacttcccttccaccctccctcccttttagagtacccagtgtctattatttccatctttatgtccctgtgtactcattggttagctaccatttatgagaatatgcagcattttactttctgtttctgagttattttacttaggataatggcctccagatccttccatgttgctgcaaaggacatgatttccttctttttcatggctgcatagtattccatggtgtatatggaccacattttctttatccagtcaaactttgatggacacttgggttggttccatgactttgctagtgtgaatagtgctgcaagaaacatacaagtgcaggcatctttttgataaactgattttatctctcttgggtagatgccaaataatgggattgctgtgtggaatggtagttctgttttttgttccttgagaaatctccatattgttttctatagctctcttactaatttacattcccactggcaatgtataaatattcccttttctccacatctgtgcgaacatctgttgttttttgactttttaataatagctattttggctaggcacagtggctcacatctataatcccagcactttgggaggctgaggcaggtggatcacctgaagtcagcagttcaagaccaacatggccaacatggtgaaaccccgtctctactaaaaatataaaaattagccaggcgcggtggcatgtggctgtaatcctagctactcgggaggctgagacagaattgcttgaacccaggaggtggaggttgcagtggaactgagatcacaccactgcactccagcctgggcgacagagcgagactctgtctcaaaataaataaataataaatagccattctgactggtgcaagattgtggttttaatttgcatttctctgataattagtgatgctgagaatgtttttgtatgtttctttgccgtttgtatgtcttcttttgagaaatgtctaagaacagagattttgcccaaggacccggtgctagtaagtggtacagctaaaatttaaacaccagtctgtccccagaacttctgctctttaattttcttcccctctgcctgaattttttttctctctttggtgggggaaagttaagtcgttttcttgttgtttaatacgtagataaaatttatattatggtatgtaatgtgaagcaaatatcggatagcctcctctaaaatcaggttgggtaaatcatcactctatattttgttgttttctataatttttagtagttacctgcaattccgagtgcattcttccaagtgattttttaaaaaaaataacttcaggccaggtccggtggctcacacctgtaatcccagcactttgagaggccaaggtgggtagatcacctgaggtcaggagttcgagaccagtctctacagtttagtagagatgtggaaaccccgtctctactaaaaatacaaaaaattagccgggcgtcgcggcgggcgcctgtaatcccagctacttgggaggctaggacagaagaatcgcttgaacccaggaggcggaggttgcagtgagccgagatcgcgccattgcactccaggctgggcaataagagtttccgtctcgaaaaaaaaaaaaaaagaaagaaagaaagataactgtaaacatacagaaagttggaaaactaaaatgaatacagagaacacccataccctttactcagattcacctatcccaaatagtgggatattgtcaacattttccctcgcttgctatatttactttctttttgttgggaaaacaaaacaaacatcagtccacgggtttctgttataagtcatgtaggtatgagatatattaataaattcactggagaaggctgggcacagtggctcacacctgtaatcccagcactttgggagactgaggcggattgctttgagctcaggagttcaaggccagccatggcaaaatccctgtgtctactaaaaatacaaaaactagccaggagttggtggctcacacctgtagtcccagctactcgggaggctgaggctggagaatcgcttgagccctggaagcggaggctgcagtgagccaagatgacgccatggtactcctgcttgggcgatagagggacaccttgtctcaaaaaattagggaagcatttgaaagtaagttatatacatcatggtcctttactcctaaatatttcagtgtgtattctccaagaatagggatattccctttcataaccacagtacagttattgacagttatcaatatcatacatttacgttattacagaacttttctataatctgcttctaattttgtcagctaatctaattatgtccattttaaagcattcctctttgcattacaatatccaccctagggtcagagattttgtgttgtcgtgtctttttagcttcttttaatctggaagacttctatagcttttgtcttttagactttgatatgttcaaagtataagttccctccccgtttctactcattccttatttgatgtttcttttgcctatatcaatttaggttaggttactcattttttttttttttccccgagatggagtcttgctctgttgcccaggatggagtgtagtggcgtgatctgggtttactgcaacctccgcctcccgggtttaagcgattctcccacctcagcttcctgagtagctgggactacaggcacccaccaccacgcccggctaatttttgtgtttagagactgggtttcaccatattggccaggctggtctcgaactcctgactccaggtgatccgtctaccttgcactcccaaagtgctgggattacaggcgtgagccgctgcacccggccataggttactcattctaagccagaatcctgcagaggtgatgttgtgtccttctcagggtattgcacgcggtgtccatctgtcccttgtaggctgatgttaaggtgttttccaatttctccactgtagaattgggcttttctccctccctttcaacaataagcatgtaaatatcctctcctctcctccatttagcactttagcacccattgattcttgctttatccagctttcactttgatggatgctcgggccgatcttttgaatcactatctgtgagtgggtgggtaggatttatgcactcttttcaaaacgatgcatgactgtaactgtgaataaactctgcctttcacactgaaatagaattcaaattgctgtccacattagacataaagcagtttttccatctaagtgtaggagttgacatatcgaaatacttgttcttgccataagtggcgcttatgaactataaaaagttgtaatgatttatggaaaataagaatgtttatgctttaaaagtgtatgaaattgacttttctttcaaaaagacaaactgtgtattttgctcctttagtgccttcactctaagcactacccagccagcctttggccctcctgagataccacacacctatatgacgttggtcaagtcatatgaccgtttttaaaaagactgtttttaagagcagtttcaggttcacagcaaaattgagtggagagttcggagaattcccatgtgtcccttgccccaacgtctgcatagcctcccccaacccttatcaacattccccaccagaatgggtcatttgttacaatcaatgaacctgcactgacacatggttatcacccaaagtccatagtttacattagggctcactcttggtggtgtacattctgtggatttgggccaatacataatgatgtgtacccaccattacagtgtcatgcaaaatggcttcactgccataaaaatcatctgtgcttcatgtattcatcccttcctcccccaacccctggcagccactgctctttttactgtctccaaagttttgtctttttcagaatgtcatatagttggaatcatacattgtgtatcttcctcagagcgtcttcttttgcttagctatatacatttaagttccctccgtgtattttcatggcctgataactaatttttctttttttttttcttttttgagacagagtctcgctctgttgcccaggctggagtgcagtggcgcgatctcagctcactgcgagccccgtctcccgggttcaagcaattctctgcctcagcctcccgagtagctgggattacaggtgcccaccacaatgcccggctaatttttgtttgtttgtttgttttagtagagacggggtttcaccatcttggccaggctggtcttgaactcatgatctcatgatccacccacctcggcctcccaaagtgctgggttacagtcatgagccaccgcgcccagcggtggtttttttttttttttttagtgctgaatagtattatgttgtctggatataccatactttatccactcacttattgaaggacatctgattgcttccaagttttggcaattatgcataaagttgctgtaaacatctgtgtgcagatgttttgtgtggacataaattttcaactcatttgggtgaataccaaggagcatgattgccagatcatatggtaagagtatgttcagtatgaaaacaaaccgcagactgtcctcccaagtggctgtccatttgcgttctcacagatgactatttttgaagtcccagttggagggagcaggtgagctccaccttctagcccataaggctctgtaagtgatggctttgtgatgggaacttgactgatagcctcatgggcgaatgtgatgggaacttgactgatagcctcatgggcgaatactcaagaacttaaagctctttacaaccaagccaaacccacgagcaggttccaccatgccttggccattgccagacaaaaccccattgtgtttttgcttgattttcgtcctgtgacactgacatttcaggccaggctagttgttttgcagaacgtccttcattgtggattcatctgattgtttcctcgtgattagatgccgttaaacattttgatcagcagagctgcaaagatgaattcttgtccttctgagtgcctcacatcaggaagcgcgatgacatctgttccattatcgaggataagtctgatcacttggttaaagtggtgcctgccagatttctccattgtcgaggtcctttttgtttgtttttgtttcttttttttcttttttttttttttgacacagtcttgccctgtctcccaggctggaatgcagtggcacgatctcggctcactgcaacctccgcctccctggttcaaccgattctcctgcctcagcctcccgagtagctgggattacagacatgtgccaccacgcccggctaatttgtttgtatttttagtagagatgaggtttcaccatgttggccaggctggtctctaactcctgatctcaggtgatccgcccgctttggcctcccaaagtgctgggattacaggcgtgagccaccgcgccaggcctcgaggccctttttcttttaaattaagtgtcagggaagttcagcggcggcttggcagttggttagcaggatggttttcggcctcagcaggcttgggtttgaagagaccccactggggcggtccgcaggacccccgggggtttcctgggaggtcgagggctggcgccgggcgcggggaggctgcgtcttttgtgatgttcgcggctggcttcccgggcccaggctttcgcgagctatggcagccggcaggggcgcgctgggcctcacgggcggctgttgggctgcccctgccggcgggctgcgcgcgccatgccctggtggagtaaactctgcagtgagtagcacgtgcacccaagcggcagttcgccccgcagcgatggcggacacggaatcccgagggccaccaactgtcccttaggaccggcccgagatgggtgtgtgtgggttttccagcctccttccttcccgtcccaggcttgggaaagcctctctactggccaaggcgcgcagggacaggtcgggaagggcctgcgcccgtggcatcccagcccaggctgtagagccgcccgctgcccttgatcttgccccagcccccagccctagaaaggaaaggcctcgttctgggtcccgtgacaggtgccaaaacgctctgcgccagcagcctacctccccgaagactctggcttgaaaggggagtcggggggttggaatggacatggctgtggctgcggtcagctggggaggtgggcggcagggcaggtcgaggatgacccaggcctcaaaaagtcaccaggatttagcgaagttgccctcactgtaaggcctggaggccggcaaagtgtgggacgcagaacagaatggaacaggcctcaacacttgggctgcgccatggggagtgtgaagcccagtgatggggcaggctggaaagtacggtctaggcttcaatgcgggttccaagcccagtgggtggccacacgatcgcatgtgttttggggtcaggatctcaacagcgcgggtacagatataggtacctgccagactaggtaggttagaagactattctctaggccctaaagccattaggagtccacagcctgttgatgtgatagaagcggtattttaggaggctttgcttagcaggtaccttgtatggagtgagtagattgccccagcacagagggtacgtggaggccgaaatcaggctgaagcacaaagcatggaggcgcccgaagattgttctgacaattgtagctcttaggattacttatgttaaaagagactgcagactagttgaccagctacaacttaaaatttttctatatacattttattatgtgttcaactcataactcacttactctatataaagagagcatttgattattgttaagctgtactgaactatcaatagctgttcagtaacagctaccttagatactgatggcagtcgcccaggctggagtgcagtagtgtgatctcggctcactgcaacctccacctcccgggttcaagtgattctcctgcctcagcctcccaagtagctgagactacaggcatgcgccaccatgcacgactgatttttgtatttttagtagagatggggtttcaccactttggccagcgtggtcttgaactcctgacctcaagtaaaccgcctgcctcagcctcccaaagtgctgggattacaggtgtgagccatagtgcccggcccaatagctgttttgttctgcctgctggcagctggttcacgaacctttatctccctagttttgactataaacatgtcggccctttcagaatgaagcagaagtgtttccaatggaaacacagatttaagagtggagggaaaatagtgagggggaaatggttgtgtgacaccagctttctactcctatattagcaacatgtctctgcattttctgattccagggaggttgatgagtgtttgtttttaatcacatgcttgctggcaggatatgtaatttatgtttgtattctgtactagtgaaatcatactagaatagagtttgttactggaatttttcttttttctctagtatatttccaattattttatccaactttttcaaaaggaaagtcacatctcttaaatggcattagaagtgtttgcaaaaagttcttttgtgaccgccaggcacggtggctcacgcctgtaatcacagcactttgggaggctgaggcaggcggatcacctgaggtcaggagtttgaaaccagcctggccaacatggtgaaaccttatctgtacaaaaaatacaaaaattagccgagcgtggtggcagccacctgtaatcccagctacttgggaagctgaggcaggagaatcgcttgaacccaggaggcggaggttgcagtgagctgagatcgagccactgcactccagcgtgggtgacagagcgaagactggttcaaaaaaagaaaaaaagaaaaaagaaatagttcatggaaatacacttaaggaagcctttggatttaactataaacaaattcatcacagtgtcagtttataataggaacaaatagaaacttaaagcattttcttatttcagaatactatacatgctttaaaaaataatgggaagagtgtatatatctaaaatgtagaagtagtttaaatcgtcgatgtctggactttctctttgaatatttgcttcaaagtttaatatgagtgtttaatttttccttattgtttgttaagtctaatgttggtcacaaatgtgtattttataaagagaaaagggaaatcctttaggaatgcgcctcagatcaaaataatgagattcttgggtttttcttgaaatcttcttcgctatctgaaatgtttagttctcagaggtaaaactaaaatgttttgttttaaatgctatcttagatactgatggcagaaaaaatgagccttgctgattatcgaagctgttacagatggtgagtctatggcatcaccactgaagcaaaggcccttattgagtctctgaagaataagaggcccagataacctattcatctatgaatatccaaaaaatctagcaatatttgaaaagaaaaaaagaactttagcataacttagagaataacaaggtacaaggacaaaaaaaaactctaggtcacactcttgccctgacttggttgggtacctcaggcagttttgttgttgttgttgttgtctgttcatttgttttttgagtcagtctcgctcggtcacccaggctggagtgcaatggcatgatcttggctcactgcaacctctgcctcccatgttcaagagattctcctgcctcagcctcccgagtagctagggctacaggcacccgccactacgcctggctggtttttgtatttttagtagagacggggtttcaccatgttggccagcctgctctcaaactcctgaccttaaatgatccacctgcctggacctcccaaagtgctggcattacagggatgagccacctcgcccagcctagttttttatttaactttctggggttcagtttcaaaataaaaccaaataagtagtatgatggcaatttgtagacatagatttgtaatatttcataaataagaaaattaaattgttttcagagtaataagattatataattggaaggaatgtatggatttggggaagcattctatatttctaaatatttctgcatttcaagtatttattgctgtgttctaagtcttgttgtatgtactagttataattttttttttgggggggacagagtcttgctgtgtcacccaggctggagtgcagtggtgcgatctcagctcactgcaacctccacctcccggcttcacaccattctccttcctcagtctcctgagtagctgggattacaggcgcctgccaccacgcctggctaattttttgtatttttagtagagacggggtttcaccgtgttagccaggatggtctcgatctcctgaccttgtgatccgcccgcctcagcctcccagagtgctgggattacaggcgtgagccaccgcgcctggctagttataattattaaccttcaatttgtgcttaaaacattaagtatattttttcaggttttgttaagatctttttggtgtccattttaattgacctgtttagtacaaaaatcgatatatgtcctatatagaaaattagaggctgggggcagtggctcacacctgtaatcccagcactttgggaggctgaggtgggcggatcacctgaggccaggagttctcgagaccagcctggccaacatggtgaaaccccatctctactaaaaatacaaacatcagccaggtgtggtgacacatgccactagtcccagctactcgggaggctgaggcaggagaatcgcttgaacccgggaggtggaggttgcagtgagcccagatcacatcactgcagcctgggtgacagagtgagactctgtcttaaaaaaaaaaaaaagaaaagaaaaaagaaaattcagacaagcaaaactaaaataaatgacattcgcatcccccagagatcatatgtgaaggatgtgtgtgtatatgtgtgtgtgtgtgtgtgtgtgtgtgtgtgtgtgtgtgagagagagagagagagagagagagagagagaaaggagagacagttgtttttaagccagaatgaggtcattgtatatactgtttggtaacctgctttttgcagtcaaatctctacccttttatgtcaattaaaattcatctcatctaatcccaaatctcatactcagtattttccaagaagacccaaaaatgtccttttgctgtttttccctaacaaatatccaattcaggatcatgccaggtacctctggttgttgtgttccttaaatctcttaatttaacacaatacatctccctcctacttccccccattaaatcacattgacttgacttttcccctcagtgattttaaaattacaaacccggaaaaatatagtaaacacttatatacacttgacctattcgccatttatggaaagccacatcatccgccccaccacccactaagctatttggaagttacttgcagacaatccttttgtgtttctgctggattttcatccttctgtgacattgacatttcaggccaggctagttgttttgcagaatgcccttcgctgtggatttgtctggttgtgtcgttgtgattagataccattaaaccttttggtcaggaatgccacgtagatgaattcttgtccttctcagtgcttcacaccaggaagcgcgatggcatctgtcccattattgaggatgttaaatgtgatcacttggttaaggtggtgcctgtcagatttctccattgccaaggtcatttttttgaaattaagtaatgtgtatgttggtattctgaatgtacgtttcctgacagccttttacccgatggttttagcagtttatgatacttgactgaatgagttattacaatggtgtctgtaaattgtgattttctaaatctaaaattctaacaataatgactttgaggatcaaagtggaagttatatctatatttattgacatttcttttttccttaaagaagcgctcccttctcctcatttaccttttttagtatcactctcgattcatggattctttttttattcaatgtgttgtaacccatcaatgtcatcattctctttctttttctttttcacatcagacgagtaatgtgccatcgtggtgacaatgcacacattgcacatgaacacccaatcgtcactctcataaaatacaaaggatccattattcttttctatgcttcaaagtttgggcattgggagccccttcaagccagttcttgtgtccttttgacacctccatcagcttttgagcatctcctttctgttacaacaaaatattcttcatacgtcctctgacccagcctggaatttctccaaagagctctggtcccttttggggacctgttgaggtcggacttagttaccacatagaatgtccccttctttagatttgtgtagatacttgtttgttctttagcttgttcctcaaaccctatatttcctgttaagtgggaagttacatctaaaacttgatggattcttgtttaaaatatgggtgtgatgtgggattccatcttacattgcaacagaagatgcactacctcgttgactcactcttagaggtgccgtgactacttatgtggaactaattttttgatagttaagtttgtcaactttccctttaacaagcaacagaaagagcagataattctctttgaacctgaatttttgaaggtcattggaaagaagtagacattaatctattaagatttgcaaatctctgtaagatctcactttatccttgaattgcctcgcattaaagaaagtattaattggtcatatttttaaaatatttaattttcactgggtgcagtggctcacgcctgtaatcccagcactttgggaggccgaggtgggtggatcactagaggtcaggagctcaagaccagcctggccagcatggtgaaacccctcccatactaaaaatacaaaaattgactgggcgtgttggctcacgcctgtaatcccagcactttgggaggcagaggtgggtggatcacgaggtcagaagatcgagaccattctggctaacacggtgaaaccccgtctctatactaaaaatacaaaaaaaaaaaaattagcctccctactcgggaggctgagacaggagaatggcgtgaacccaggaggcggagcttgcagtgagccacgatcgtgcctctgcactccagcctgggtgacagagtgagactccatctcaaaaaaaacaaacaaaaaaaacaaattagctgggcatggtgacagacgcctgtaatcccagctaatcaggaggctgaggtgggagaatcacttgaacctaggacagaggttgcagtgaaccgagatcgtgccactgtgctccagcctgggcgacagagtgagactctgtctcaaaaaaaaaaaaaaaaaaagttaattttcttgggctaggcactatagctcacacttgtaatcccactgctttgagaagctgagacaggagggtcacttgagcccagcagttggagagcagcctggacaacatagtgagatctcatctctacagaaaataaaaaacttagctggacatggtggcatgtgcctgtagtcccagctactcgggatgctgaggtgggaggattccttgagcctgggaggttgaggctgcagtgagccgagaccacaccactgccctccagccggggcaagagagtgaggccctgtcggagaaaaacaattttcttgtattgtaatcaccttttctcttctccccacccccccgcccctttttgttaatagttggacagagagactctgaagatgtgagcaaaagagactccgataaagagatggctactaagtcagcggttgttcacgacatcacagatgatgggcaggaggagacacccgaaataatcgaacagattccttcttcagaaagcaatttagaagagctaacacaacccactgagtcccaggctaatgatattggatttaagaaggtgtttaagtttgttggctttaaattcactgtgaaaaaggataagacagagaagcctgacactgtccagctactcactgtgaagaaagatgaaggggagggagcagcaggggctggcgaccacaaggaccccagccttggggctggagaagcagcatccaaagaaagcgaacccaaacaatctacagagaaacccgaagagaccctgaagcgtgagcaaagccacgcagaaatttctcccccagccgaatctggccaagcagtggaggaatgcaaagaggaaggagaagagaaacaagaaaaagaacctagcaagtctgcagaatctccgactagtcccgtgaccagtgaaacaggatcaaccttcaaaaaattcttcactcaaggttgggccggctggcgcaaaaagaccagtttcaggaagccgaaggaggatgaagtggaagcttcagagaagaaaaaggaacaagagccagaaaaagtagacacagaagaagacggaaaggcagaggttgcctccgagaaactgaccgcctccgagcaagcccacccacaggagccggcagaaagtgcccacgagccccggttatcagctgaatatgagaaagttgagctgccctcagaggagcaagtcagtggctcgcagggaccttctgaagagaaacctgctccgttggcgacagaagtgtttgatgagaaaatagaagtccaccaagaagaggttgtggccgaagtccacgtcagcaccgtggaggagagaaccgaagagcagaaaacggaggtggaagaaacagcagggtctgtgccagctgaagaattggttgaaatggatgcagaacctcaggaagctgaacctgccaaggagctggtgaagctcaaagaaacgtgtgtttccggagaggaccctacacagggagctgacctcagtcctgatgagaaggtgctgtccaaaccccccgaaggcgttgtgagtgaggtggaaatgctgtcatcacaggagagaatgaaggtgcagggaagtccactaaagaagctttttaccagcactggcttaaaaaagctttctggaaagaaacagaaagggaaaagaggaggaggagacgaggaatcaggggagcacactcaggttccagccgattctccggacagccaggaggagcaaaagggcgagagctctgcctcatcccctgaggagcccgaggagatcacgtgtctggaaaagggcttagccgaggtgcagcaggatggggaagctgaagaaggagctacttccgatggagagaaaaaaagagaaggtgtcactccctgggcatcattcaaaaagatggtgacgcccaagaagcgtgttagacggccttcggaaagtgataaagaagatgagctggacaaggtcaagagcgctaccttgtcttccaccgagagcacagcctctgaaatgcaagaagaaatgaaagggagcgtggaagagccaaagccggaagaaccaaagcgcaaggtggatacctcagtatcttgggaagctttaatttgtgtgggatcatccaagaaaagagcaaggagagggtcctcttctgatgaggaagggggaccaaaagcaatgggaggagaccaccagaaagctgatgaggccggaaaagacaaagagacggggacagacgggatccttgctggttcccaagaacatgatccagggcagggaagttcctccccggagcaagctggaagccctaccgaaggggagggcgtttccacctgggagtcatttaaaaggttagtcacgccaagaaaaaaatcaaagtccaagctggaagagaaaagcgaagactccatagctgggtctggtgtagaacattccactccagacactgaacccggtaaagaagaatcctgggtctcaatcaagaagtttattcctggacgaaggaagaaaaggccagatgggaaacaagaacaagcccctgttgaagacgcagggccaacaggggccaacgaagatgactctgatgtcccggccgtggtccctctgtctgagtatgatgctgtagaaagggagaaaatggaggcacagcaagcccaaaaaagcgcagagcagcccgagcagaaggcagccactgaggtgtccaaggagctcagcgagagtcaggttcatatgatggcagcagctgtcgctgacgggacgagggcagctaccattattgaagaaaggtctccttcttggatatctgcttcagtgacagaacctcttgaacaagtagaagctgaagccgcactgttaactgaggaggtattggaaagagaagtaattgcagaagaagaaccccccacggttactgaacctctgccagagaacagagaggcccggggcgacacggtcgttagtgaggcggaattgacccccgaagctgtgacagctgcagaaactgcagggccattgggtgccgaagaaggaaccgaagcatctgctgctgaagagaccacagaaatggtgtcagcagtctcccagttaaccgactccccagacaccacagaggaggccactccggtgcaggaggtggaaggtggcgtacctgacatagaagagcaagagaggcggactcaagaggtcctccaggcagtggcagaaaaagtgaaagaggaatcccagctgcctggcaccggtgggccagaagatgtgcttcagcctgtgcagagagcagaggcagaaagaccagaagagcaggctgaagcgtcgggtctgaagaaagagacggatgtagtgttgaaagtagatgctcaggaggcaaaaactgagccttttacacaagggaaggtggtggggcagaccaccccagaaagctttgaaaaagctcctcaagtcacagagagcatagagtccagtgagcttgtaaccacttgtcaagccgaaaccttagctggggtaaaatcacaggagatggtgatggaacaggctatcccccctgactcggtggaaacccctacagacagtgagactgatggaagcacccccgtagccgactttgacgcaccaggcacaacccagaaagacgagattgtggaaatccatgaggagaatgaggtcgcatctggtacccagtcagggggcacagaagcagaggcagttcctgcacagaaagagaggcctccagcaccttccagttttgtgttccaggaagaaactaaagaacaatcaaagatggaagacactctagagcatacagataaagaggtgtcagtggaaactgtatccattctgtcaaagactgaggggactcaagaggctgaccagtatgctgatgagaaaaccaaagacgtaccatttttcgaaggacttgaggggtctatagacacaggcataacagtcagtcgggaaaaggtcactgaagttgcccttaaaggtgaagggacagaagaagctgaatgtaaaaaggatgatgctcttgaactgcagagtcacgctaagtctcctccatcccccgtggagagagagatggtagttcaagtcgaaagggagaaaacagaagcagagccaacccatgtgaatgaagagaagcttgagcacgaaacagctgttaccgtatctgaagaggtcagtaagcagctcctccagacagtgaatgtgcccatcatagatggggcaaaggaagtcagcagtttggaaggaagccctcctccctgcctaggtcaagaggaggcagtatgcaccaaaattcaagttcagagctctgaggcatcattcactctaacagcggctgcagaggaggaaaaggtcttaggagaaactgccaacattttagaaacaggtgaaacgttggagcctgcaggtgcacatttagttctggaagagaaatcctctgaaaaaaatgaagactttgccgctcatccaggggaagatgctgtgcccacagggcccgactgtcaggcaaaatcgacaccagtgatagtatctgctactaccaagaaaggcttaagttccgacctggaaggagagaaaaccacatcactgaagtggaagtcagatgaagtcgatgagcaggttgcttgccaggaggtcaaagtgagtgtagcaattgaggatttagagcctgaaaatgggattttggaacttgagaccaaaagcagtaaacttgtccaaaacatcatccagacagccgttgaccagtttgtacgtacagaagaaacagccaccgaaatgttgacgtctgagttacagacacaagctcacgtgataaaagctgacagccaggacgctggacaggaaacggagaaagaaggagaggaacctcaggcctctgcacaggatgaaacaccaattacttcagccaaagaggagtcagagtcaaccgcagtgggacaagcacattctgatatttccaaagacatgagtgaagcctcagaaaagaccatgactgttgaggtagaaggttccactgtaaatgatcagcagctggaagaggtcgtcctcccatctgaggaagagggaggtggagctggaacaaagtctgtgccagaagatgatggtcatgccttgttagcagaaagaatagagaagtcactagttgaaccgaaagaagatgaaaaaggtgatgatgttgatgaccctgaaaaccagaactcagccctggctgatactgatgcctcaggaggcttaaccaaagagtccccagatacaaatggaccaaaacaaaaagagaaggaggatgcccaggaagtagaattgcaggaaggaaaagtgcacagtgaatcagataaagcgatcacaccccaagcacaggaggagttacagaaacaagagagagaatctgcaaagtcagaacttacagaatcttaaaacatcatgcaggtaagcttccttgtcttctaagataatttttctcttttatgccaatagatggcaaatttgttacataaggaatcgggagcaaataattaatgccttcgtgtagaaccttcagttgaggaaaataactatcaactagattcaaagatctaggatagtttcatggtttttggtgattgaaatgccatttagtcttatcgatgttatgaaaagaacgacttcgttttacctcctaatgtgactgctttagaataaaataaaacggcatgtgtgtgtgcacatgtgcgtgtttgacccaaaggcataagaaatacattgtgttcactcaactatcttgttgagtttttttaaaaataactagtgctccaatggctgggcgtggtgcctcacgactccgtctcaaaaaaaaaaaacaaacaaaaaaaactagtgcccccaaatgggctaatattaaactgcctgaaatatagctgatgatagctctttcagaaaaaatggattttttttcccctagcagtagtaacaagtatttttaaaaattttccagcgcatataatgaccgaccctcactgtgttagttacttgcagttgctagtaactccccatctttgtggtttttgttttgttttgttttgttttcttgagacggagtctcgctctgtcatccaggctggaatgcagtggcgcgatctcggctcactgcaagctccgcctcccaggttcacgccattctcctgcctcagcctcccgagtagctgggactacaggtgcccgccaccatacccagctaattttttgtatttttagtagagatgggttttcaccgtgttagccaggaggtctcgatctcctgacctcgtgatccgcccgccttggcctcccaaagtgctgggattacaggtgtgagccaccacgcccagccctatctttgttttgttttttgagagagccttgctgtgtcacccaggctggaatgccgtggtgcaatcatggattgctgcaaccttgacttcctgggctaaagcaaatcgcctgcctctgcctctgtctcctgaatagctgctgggaccacaggcacatgtcattactccgagctaattgttaaatttttttgcagacaggggtcttgctatgttgcccaggctggtctcaaactcctggcctcaagaaatcctcctgcctcaccctcccaaagtgctaggattacagtcgtgagccactgtgctcaacccatcttcgttttcttttgttttgttttgtttttgagacagagtctcactctgtcaccccgactggagtgcagtggcgcaatctcagctcactgcaacctcagtctcccaggttcaagcgatcctcctgcctcagcctcctgagtagctgggattacagataacacaccaccatgcccagcttagttttgtatttttagtagagacggagtttcccccaggatggtcttgaactcctgacctcaagtgatctgcccgcctcggcctcctaaagtgctgggattacaggcatgagccaccgcacccagccctatctttgttttttgtttgtttgtttgtttttgagacagaatctcgctctgtcgccaggctggagtgcagtggcacaatctcagcttactgcaacctccacctcctgggttcaagcgattctcctgcctcagcctcccgaatagcagggactataggtgcatgccaccatgcccagcttatttttgtatttttagtggagacagggtttcaacatgttggccaggatggtctcgatctctttacctcatgatctgccctcctcagcttcacaaagtgctgggattacaggcatgaggcaccgcgcccggccccatctttgtttttttaatggagttaaactatggtattattaggtcactttgacaactatcctgttgttaataaatgagagagaaaaaggagattttatttacgctgattcttcctcctcctacagttaaactcattgtctgtttggaagaccagaatgtgaagacaagtagtagaagaaaatgaatgctgctgctgagactgaagaccagtatttcagaactttgagaattggagagcaggcacatcaactgatctcatttctagagagcccctgacaatcctgaggcttcatcaggagctagagccatttaacatttcctctttccaagaccaacctacaattttcccttgataaccatataaattctgatttaaggtcctaaattcttaacctggaactggagttggcaatacctagttctgcttctgaaactggagtatcattctttacatatttatatgtatgttttaagtagtcctcctgtatctattgtatatttttttcttaatgtttaaggaaatgtgcaggatactacatgctttttgtatcacacagtatatgatggggcatgtgccatagtgcaggcttggggagctttaagcctcagttatataacccacgaaaaacagagcctcctagatgtaacattcctgatcaaggtacaattctttaaaattcactaatgattgaggtccatatttagtggtactctgaaattggtcactttcctattacacggagtgtgctaaaactaaaaagcattttgaaacatacagaatgttctattgtcattgggaaatttttctttctaacccagtggaggttagaaagaagttatattctggtagcaaattaactttacatcctttttcctacttgttatggttgtttggaccgataagtgtgcttaatcctgaggcaaagtagtgaatatgttttatatgttatgaagaaaagaattgttgtaagtttttgattctactcttatatgctggactgcattcacacatggcatgaaataagtcaggttctttacaaatggtattttgatagatactggattgtgtttgtgccatatttgtgccattcttttaagaacaatgttgcaacacattcatttggataagttgtgatttgacgactgatttaaataaaatatttgcttcacttagatttgctggttttattagataccaggaagcctgggacatatgtgtaccacattagaattctaaagataatgattgataagctagaactttctgatgtagtcattacatgaaaccccttgtcactggtttgtgtgttcagaggaagccatggccgagatagctttcctgaaataaaccagtagcttttcagattgacgttcttgctacaattgtaccatctggtaattcctgaaaatgtcaatttttttgtgttaatatttttggtttcaaacaataacaaatgtctctagaaagaaattttaagaaagcttaattaatagtaaaaatgcctttcctgaaataatcttggaaaattttttaaatgtcaaaatgatgagtcatgctaatacattgagggtttgtttttttgtttgtttgtttgtttgtttttgagacagagtttcgctcttgttgcccaggctggagtgcaatggcacgatctcagctcaccgcaacctccacctcccggattccagcgattctcctgcctcagcctacattaagggttttgtcagacaattgtcacacgaagaatagtgtcacttatctactcttgacacacagaactggcctggcatatagctttccagattttactcaaacttggtactccagtttgaaaatttaaattttgactgctgattagctggaaagcctagttttaatggaaagaaagtttgcttttaaaactgaaagtagtttctttttgctaacaaatctaacttcatacataattggccatattagtaaaacacctcatgatagcagtgtatatatagtcttgtttgtagttggaagtcatcttttaggagttattctcaaatatatataatagctacccatgcatcattattaaaatccccaaattcaaaaaacctctgatatatatatataatttttttttttttttttttttggccaactgagattgaaatccaagtgctggtttctagttctgaacatcaactaaagagttttggaaatgacagcaatttataacaagttcatattgacttcctctctatggcaggaagacattctgtgctgttttgaacagattaaagatttgtgtagtttgtgggaaattgacgtttttgtttaaattccacccgcgtttgtcttttcctaccacctgtggccaggtgctcgctggccatcacagttgcgattccatgagtagctgctttatgactgctttttgtactatctggatgtgcccagagttacttctgtacaagctctgtatctatgtccgttgagaacattattttaacaagaagaacaccaacagtagcatgaaatataatactgttttataattctaaagctgctgttaatttatgaagtacataataatctaatgtaaactgcagaagtcagagcaagtgcctacattttgttatttttggcattactacagagccatgtacaatagaaagcaatgcaagacttgtaaactctcaccacttcttgtaatatcaaatgttccccctcaggttattttgcttatggtacccatgagttgcctctctctgtacatagataaattgttccaatattttcctttgatgtttggaactacagatagtcaagggctggaaattttagttttcaatataagcttccagcttagcaattacctctagtcgaagacaatatttgattcctagttctgtttggggcaaattttcatttatctaaataaaatgcaatctaattaaatgccatggattttctttctgt

SEQ ID NO: 51 - DNA, 17995 bp, Homo sapiens
agtacagtataaaacttcacagtgccaataccatgaagaggagctcagacagctcttaccacatgatacaagagccggctggtggaagagtggggaccagaaaggtaatgctttttaactcttacttctgagctctttacacattcaaagataggaaagctaggaggaattttacaactaattggcatttccaatgtgcattgtgatgtgtacctttttatattattcaggcaggttaatacagcttttaatagtcctagagcatgcaaatagattatatgtttatacaagccactcagcacatatatacaagtacatatgccaaagagaaagctatttttaagagttacattcgcaaacagtaaattcagggaacacacacatactcagatgcagagagaatccaaatattgataagttgcacttatctaaatgctgctattaggactcctgagttgtttagagccattaaacttttggttgtatttcagactttcttgtaaaacttaattgaactgcaaaacattttgggtactgtatatgtgactccaaataggtggatgatgttaagtattatagcacaaagattttttataaaaccattgtaacacaaatgtcccctgcctcccccattctctttcaccatccccgtaaaaaatatgaggctttttaggcaatgttgacaaagttttaacaataatggtggagtaattgatgtttctggagctgaaaccccaaaggtgttaggttacttgtaacagaaaaagtcttacaaatagttgttttggaaaaggggacagtatatataattcagaaagcattgttaacctgtgcaaactgtaattataacttagtgtcacaattttcttgccctcttccccttgcactcagatcttatcttgtagtaatgatatttattaactctttccacctaaactgcattgcttgactgtaatgctatgaacacactaggtgtcagatataagctgagtgtatcttcagaaaccaagagggcttatgtgtgggaaagaaaccgagagggaaggaacgctttaacagatggaccccttaaagattcttctgcaagataaaagcaataagacagaaaatgaaaaagaggggagggggaagaattttttttaagccttagaaaggcattgttaaaaaattcacatttttctttttctgtgcacactaaaatccatgatgatttcatctgcactgttcctttgagggaaaaagaagcagtcaaggaggctgtctatgaatgcactggtcgggacaggcttggggcaagctgaaaaaactaccacatgacagagaaaaataatttgccaatatattttagagagtcttttcccataggaccagttattcaagtcatacgagtgcactctttttataaaaggatgtgggaaaggccaagagaattttgcattttatctgtgaagtccggcgagtggtggtaggctgtaatgtgtgagagtgagtgggtccccggcagaagggggcagctgaacgcgacggggagaaagcgcttctggaacttgggcttgtgacaggctgcctgccctctggtccttcagtgccctgctgcatttcacagttgggaagagtggagtgtattatatgaccccaaacaaaagttccattgcgctctcctcagattgcctgccagtgttgatgacctgaacatttaaatatgaatgaattgggggaaaggaccatctcccctggatcccatcaggccagaacaatcctctgttacccctgagtccctcttccctgacctccactacctgtccactggacctccctgcaccctctgccccaccacgtggccaggtgggcgttctaccacctagggctgtggcttggctgggtggaggggcggtgggaacactttttcaatcaattcatccctattgattgagacactgtgtttgtttggggtttcttttctcccctccaaaaaaggaagaaggtgaaaccaggagactgggcagagaaagaaaaaaaaatagtgaacaaaattaggataatttattttagaagagaaagtagaacccccgaaaatggtgatatttgaagagaggtgtctgtgaggaagctaagagcagaaggagagcagcctgtcagaaaacgggctgtccctccctccctaatcacagccctactcacagcaaactccctccctctccattcactcacttacttagggccaatcctttctctctctctctctctctctctctctctctctctcttcctttccctctctccctctccccctcccttccctccctctctccctctctctcccccttctttccctctctcttctctccccctctctcctctctctctgtctctgtctccctcccatcctctctctctgtctctgtctgtctccccgccaccctgtctctccctccctccctgtctccctccctccctccctccttccttctctcttactcggagacagtcagaactctcctccctgacagccacaaacctacagcactgactgcattcagagaggaacctgcaaacaaaacttcacagaaaactttttgttcttgttccagagaatttgctgaagaggagaaggaaaaaaaaaacaccaaaaaaaaaaataaaaaaatccacacacacaaaaaaacctgcgcgtgaggggggaggaaaagcagggccttttaaaaaggcaatcacaacaacttttgctgccaggatgcccttgctttggctgagaggatttctgttggcaagttgctggattatagtgaggagttcccccaccccaggatccgaggggcacagcgcggcccccgactgtccgtcctgtgcgctggccgccctcccaaaggatgtacccaactctcagccagagatggtggaggccgtcaagaagcacattttaaacatgctgcacttgaagaagagacccgatgtcacccagccggtacccaaggcggcgcttctgaacgcgatcagaaagcttcatgtgggcaaagtcggggagaacgggtatgtggagatagaggatgacattggaaggagggcagaaatgaatgaacttatggagcagacctcggagatcatcacgtttgccgagtcaggttggtgctggcattggcagggggtggggaggggtggggggtgggagggtaaaatatatttctttgacagtcccaggaggaacttcttttcccttcagctggaaactgcctgggaaggttattagttattaggtgatggtagcggactagccgacggagggcaggcaggggagggggagaggactttacagaaaaggaattctcggtcgagctctgcctggagatgactggcttacacttactaaacccagcgggtcacacagagaggaagctcggggccaatgttgagctggaaggcagactgtgaggggctgccttgccctgcctgtgaaaccagatctgagcagccggaggaaagccgcggcattttcgggtgctaggggagcagaggaggcttccggaccccatccaagtttttattgagggtagaggggtgaatgtaccaggattggagtggaatggcacagatgaagtcactctcttaaaacaaaccttcccctttaaaagtccaatctggggccacattggagaagcagggcatatttatgagtgacagtcatttttacctttagaaaatgtctataagtgcacaggcaccacattcaagacagggaagagctactttgggggacagttgtcattgaaccagcagttacttttgggacactgacttttgctctctgaaagaaaaaaaaataaataaaacaaccagttttgttctttctaaagttactaagagctctctgccaaggaacgcaaccttgacaaagtactctcagatactacgctgaactcactcaatccttaagaggaagaactttaataaatagattctaatcgttggcccaggaccacactaacctgttgctgaatagcaatacctgtcaaaagtatgggcccatggacttggagccaggctatttttatagttaagtgacacagatcctttgcatgcctgcaagcccatgcacgtcaggcacacagatgtgttaataccgtgttactttcatggtaatgccaggctaaagaattgcatcctttgccaactccatttgaaaggaatgccattgttttgtttggtagagcatatggccagtaaagtatgtgcagggactcccagcatttttgtttaaaagtttgccgcagcagtataaacaattaaggcaacactcagaatttccaatctgaaaacctgttgactcagatgttctgttttcaagaaaaccatgaaagaccagggcatctttccgggggtgcagatagcctgctggctgtgtggcttccccttgcaggagaagccctggtgtcctacaagcttcccagtttggctctctcaccagaagcctctctcacttagggaagatcctactttctttccctaaagctctttcttaacccagccccaaaaggcatgatcattaggactttatcttctggagctttttgaggaagaaagctaggttggaacttttcaagttgacacccatttttttttctcaacttttcatggtgggaaaaggtaaaaaagaaaatatttacaatatttggctgtgcatgtgaaacagatttcagtggtctagagggttgcttcctgtctttgtataccaacctccacacatgatggattcaatgacagctcgtatccagttgcctttaaccatgtcatatgactaagtatacctatgcctttgaccacttttaaccgcactaccgttactagcaatatgcccctctttctgacttactggacttgtatagcaaatcactctcttagcatttagagatttggcagtgaaaaaatttgaccatttacattctttcttatgtgtggtcttcctttctgtgacagtcttctctcagttgtatgagatcttgtcatttttttacttctcagttaggtgtttagtttgaaaaaaaatgagcgacttttgaaaaagcgattcgttggacgttcacattgagtcaagtttaagatttgtaatgggaaactcctggttgactttacaacttgactttggattcttagaaaacacttattacaattgcttatttttctctgagggatttcacacatcaacttcaagttgatttaatgtaatttcatgtatttaatgattgctgtatggactgtctactcttcaagcagaaaaccacgtgagcattttgctgctgattttgctagtccagaaaagacatttatcatccaaatgattgtagcaaatatatgaacatgaatagaaaagacctatgtcttgttgcttttggaataattcaactttaataacattccaactatgtggaatgtcaagagtttttggagaatagaaaaaggaatgcatttttctttcccttataaccattttgtgcagcatagaatccagacattgtcacccatgagcatgccacagatgcagacccatagcagcccctttcaacctcaagattcttcaatttgaggctacgtttaatttttgccttttctctccttgattgttggataaagccaaggcctggctacagaagtagagagcctccaaaagctgaagtgctgaggactcttttaactgagtttgtcccatcctgtttaggtagaaagtgctcaatttttgtaaagttgatgcgagttgttattgactaaacagcagggaatcactctaaggctctctgaaatgtatcccaacaaacaaaaattattttatttttatatatgtcacatcacccaagatttctcaccaaggttagtgtgttctttgcatggctggcacaaaaccctcaatgttttaccttaaggcctacagagttcttcacaaggaaagatagaagggatgggtaaagccaagctatcactataaatgtcatgaagctaaattcagtggccttttcagctgatgcagcttatttttattttattttgactcatgacagtaggtggtcaatcaatgcataataataatgtacctctaagtctccatatgctgtcaaacctggatgtgggttctggtaattagcttagcaattgatagcacttgttgtagaaagaatagggaaagaaagacaaatgacacaccaagaaatggatgtgctcacgtagcctaggtgttgttaagcgcaacacataagtctaccccttggaggatactatgtatggaagatttgagttagaagtttgcactgcccagacagggatccaagaagctttgcttggatgaccattttccccaccccaagaaagccatctcaaaatgaagctgactcccaccattccaatcccaccttccgaacttttctgtgaatcacccctcctttagggatgcctttaggggttacacgctctcttccgtgaataatggggaagagcggccacaagagggcgcgttccaaagacttttgctccttgtcagtgtatccagggaaaggcagttgcgcgtactggaagcccctgtctgtagcgccctaatcttggtgattatcagttaccgcctgctccctctcatcctgcagaaaaagttaggaatttatgagatgggagaagcatgactacctgtaatacattaaatgagacagaaggaaaggaaatggaaattctagtgatacatgtgaacattccggagctctatggaaggcagacgagtgataaatttcaaaagcaaacaaagcggagcagggagaaatgtgactatgaatcatcagcgatactgatttgctcacaagtctctccctaatacggtctcccgggtcgtaacaaaaacatcttccatctcccctgattttgttgcctagttttcctgccttatcaacagtttccaccagcgacaaatgacaagtgacttcaaacagggaggaaaaaggttctttctgtaatgccttgtgggaacatggtgttcggcttctgaggatgcgtttgtttccgaactgagggtgtggagagaaatggtgggaaagatgggaaaagagattaatagtggtctgcggcctgtgcagtggatggactgggctgggggtggtggagatgccagggtggaaagtccgttgtaatatttaaagaactgcagtaataccttcccaggcacttttcttgaaaacacatatttgtcttggcccctcttctgctaaaaaatacttgcacgtgatctcctagctgtagttctgaattcttcgtactcgactggttcctaagtccaaaatgagaagtgccaaagttctcaggaactttggaagaagtctctgaaattttgtgggttaaaccttaagaatttttgctacttgtaggaacctaaaacccctttctcccaaaatatttaacctttttcatcaccactttaatggaagaggcatggatgatggacgtttgtgccagggcatttataaatcaataatggaccctaaggagggaaattaaagctaaaaaattaatcaagataatttatggccaaacctatagttctactgcaggaaagatcctctactgtaggtcaaaggaggaataaccttaagacctcacttgctgctttctgcagaaacccctggaagcagtccaaatgcaaagttagggcttcagagaatgcaccctgtaaatggtagttgtgtatacccttaccattgactataccatatctaggcacagtgaaatcttgatgaagaatggaaaattaaaggaacagacgctttttacagggaggcttcccccagcccccatcccatggtaagtttaaatgtgttctataaacaacgaggctttccacattcacattagagacataactattgcccatatgtaaaagagcaacatattttaagcaggaccctggtgaggaaaacaaaaccaaatcgaaacactgcatgtgtgtgttgcttatttaactgaaaatgttcatagacccacaaatctgagatgctggacttttggatgagtccagcattttgcatcttagtgtagggggagggaacaacaaggggcttagttgcttaacccttgccatgccttcatgattgacttattcaaaacatttttaaaattctgaaagcaaaggaaaatgtgctgcaaacacccttccagctatctttccttccagcttacacagtctctcctctgtccaatccttcccacccagcagcatttcagaggtattccctgtgaggtacaaaatttctctttgcccatttttctgcacctctttttctctctctttggtatgtgtccaccaagctcatagaggtttaagtgatgaaatattatcacccacatgggtttgcgtgggactttcttagtgaattactcaggcagagcaggctgtgatacagccttgctcacaagcctcgggagggaaaaaatagcacagaggatgaaaagaatattattagagagcaggtaatgaaaggttcgcaaagcaaccagctatatctggttagctaggtaatagtgcaggaacctaggtcgcacctgtacaaactaatgcagaacctgctcacggcgcactatgggaagacattcatttcaagagtttacagcatgagatatttgagtaaaacctgaaactgattagaaattgatcctgaacatcccagccttagtcaaccttccctttttcaaattgttatgcatggagattggaggattggggcatcttgaaagtgtcactgcagtatagcaatctctctcaggtaatatagagataaagggaatataataaattgacctgttatttattatctttttcatacctaggacattccgaggcttaatatatttctgaagcctacagccctgataaacatcaatcccacgtcagtttccagcagtctcatctccccacacccttctgcaatgaaagctaatgtaaaagaaagaaatatgcactgcttaataagtcagaatacaatagaacttgtaaaatgtacctgcatataaggtagacattaggaagacttgaatctctctcttccccctgttctcctgagcattatggcaacagcattttcatgaaattagatctgttttatattttttcctgataaaatatcatgcaatatacaaatagcagttccagaaatggacaccaggagaaggaggcgacaggcatgtcaattagtagggggaaaatccaaatgtcagaaatatgggggagagagaaagcacgcaggcagtggatgcaaatacagggaacagagtctttcaattcagataattaaacggatgcataaatcagcacccttgcctctctacaatacgcaggcgatgccatgcagttaattatcagccaagaccagcatgaaagtcattttatgatgactctctgatcctaatataacagcacctgacagattgagccccctctaatgagtactctctttgtacaatcctctctcaggaacactaaatcatttgcttccaagtacagctgcctgtgaagaaggggtggggctagatcatgcatcagaaacctgctcttgtgaaatcaggggctgtcctgtaggctgtgtgactggaagccagcagcctcagcctctctggccctaaaaaagcaatttgcacacggctgtccctaattctagtcagccaagtaaccctccctcggcacccccacctaaacatctgtagtcagccttgggtgttattcatggaaagtccactgcatgcgggtcagcactgctgtccatcggcttcaccctgaccccttctggcaggtgtggatgagagtagagcagagctcatggggatgagttaccccaaacctattaagcctccctatccggggcactagtcagacactccagttttacactctttcctagaaaaacaaaacccaaccttgtgccctctgggttctctaatttagcagctactatctgtctgtttttggagtgacaccctgtgcagtttaggatttcagaagctgtcctgcatagaggcagaagggaaaacagcaggtatcttgttaacattctctatggggcaaggcagatgtgcccaagctggaggaaacctgcacaccctccaggctagttatccaaggcttgggaggtttccctcggccttctcctaaggccttggcaggaccctgccaccctaaaatcaactgctgattgcctttttagatttaaatgattaagctctgcttatgggaatcttcttctcttttattttgttaagaaacaaacaacaacaacaaaacccacaccaattcttagcaaaggggaatatcgaattcagattttgaaaaaataagtcatcatgcttcctaaaataagacagcttctccctctaactgctctctctgctctggtattctatctaatcataaacccagctttattattcatttcaactcctgccaaagacatgaggtcggagtcagaggaactccccttaccaccgccaccatcatcatggccagcatcctcgtaagtttatagaaagatgccagagaacctttcctatccatctgcagccctgcttggcccttgcctcagtgaatttaccactatcataatcacagtgtgcagagtgtgttaaattaagaacagaatccacagtacgcaatgcacagaaaagcctgccttctgctgcagagaacttgaaactgtgcctaaaatttatagtaccgtaaacatctcagggcctcgagtgataagtatggctggatttccgttaactatagaaatccaggcagggagatcctcccagggagttgcaagttctaagatgaacttcttgaagattgttcccagatttgtgcatgggatacatgtacagcagacagttgtaaggaggtccacggtcatggaaaagaggatatgtttctatatgccaccaagtgggaaaaatggaagtgagggaaaatatttgattaatcaaaaaattttagtttggatacctgctttcatagtaattgttgctgtgtcattaaacatacagttgcttaggaaaagagaaggaaataggtgactttctaattttagagttaggctggaactgagtggttgctaaattcaactgccctgacaatgtggggatttcctgtccattagcagcgattgctatttgacatatgtttctggtgcccattaatctgccctgtaatgggtcagaggcaaaaatgggggattcagaggtactaggtggctctcttaatttaatagaactcaatgctaaggacgcctctatttgttaataagtaatcaagtcattggctactttctgctaaacactagactatgatagtgaccttagaccccgggcattctaaaccaggctggcaggagggtggtggtggaggtgatgtgaggtaagcctcctagaggaactgtcatccaaacaatctgaaaattgaaacattattaaaggcagcactaagggtggtatgttggagttggggcaggagcacttaaggcagaaggaacagcaggtgtcactgcctgcagttgagaaagggggtggaattctcaaggccttagaccccagagaacaggactgggcaagagctgacattcaagggaggaacagcatgtacagagcccaaagtcccagccactttctgttggatactgagcaataggaattcagtaaaggactttcaagaagaagtgatgtgatcagatccacctgtgggaaagatgcctttagctgcttcatggagaaatgactggagaggaggccttccttagtgttgcagaggcaaagtaaagaaaatgctgctgcagtgacccagcaaagaggtgatggcggaggaatcaggctgtgacaagggaagaagaggctggctcaagtgtgtctcgactgcacagacttacacagcgaggtggggccaggggctgcatttttgtctgagaatagtatttccttagctttctagagcttacagtgtctttttgtttatgttatctcatttgaccttcctaaacctgtgagataacaggtcaaatgtccttatgtcattcccatttttatagaagatgaaactgaggttgagcaattagtcaacagacacagactcgcaggccctcttcattctaaagcaagggtccaaaaccttttttctataaagggccagagagtaaataatttaggctttgtgagccaggcagtctgttgcagctacgcagtccttggttattatagtgcaaaaacagccataggcagcatgtacagaaatgagcataaccatgctccaacaaaactttatttacaggcactaatgtttaaatttcaggtaattttcacatgtcacaaaatatcacttttctttaaccacttaaaagtataaaagccattcttagtttgcaggcagtacagaaacagtttcagcccatgggctgtcatttgttgacccctattcaagagggtctgtcacagaagactcctgcttgcctgaaatttacgagtgcatgtaaatgttggaattaacaggtgtgcctgttttctcttatgctgtctttcatcttcaggaacagccaggaagacgctgcacttcgagatttccaaggaaggcagtgacctgtcagtggtggagcgtgcagaagtctggctcttcctaaaagtccccaaggccaacaggaccaggaccaaagtcaccatccgcctcttccagcagcagaagcacccgcagggcagcttggacacaggggaagaggccgaggaagtgggcttaaagggggagaggagtgaactgttgctctctgaaaaagtagtagacgctcggaagagcacctggcatgtcttccctgtctccagcagcatccagcggttgctggaccagggcaagagctccctggacgttcggattgcctgtgagcagtgccaggagagtggcgccagcttggttctcctgggcaagaagaagaagaaagaagaggagggggaagggaaaaagaagggcggaggtgaaggtggggcaggagcagatgaggaaaaggagcagtcgcacagacctttcctcatgctgcaggcccggcagtctgaagaccaccctcatcgccggcgtcggcggggcttggagtgtgatggcaaggtcaacatctgctgtaagaaacagttctttgtcagtttcaaggacatcggctggaatgactggatcattgctccctctggctatcatgccaactactgcgagggtgagtgcccgagccatatagcaggcacgtccgggtcctcactgtccttccactcaacagtcatcaaccactaccgcatgcggggccatagcccctttgccaacctcaaatcgtgctgtgtgcccaccaagctgagacccatgtccatgttgtactatgatgatggtcaaaacatcatcaaaaaggacattcagaacatgatcgtggaggagtgtgggtgctcatagagttgcccagcccagggggaaagggagcaagagttgtccagagaagacagtggcaaaatgaagaaatttttaaggtttctgagttaaccagaaaaatagaaattaaaaacaaaacaaaaaaaaaaacaaaaaaaaacaaaagtaaattaaaaacaaaacctgatgaaacagatgaaggaagatgtggaaaaaatccttagccagggctcagagatgaagcagtgaaagagacaggaattgggagggaaagggagaatggtgtaccctttatttcttctgaaatcacactgatgacatcagttgtttaaacggggtattgtcctttccccccttgaggttcccttgtgagccttgaatcaaccaatctagtctgcagtagtgtggactagaacaacccaaatagcatctagaaagccatgagtttgaaagggcccatcacaggcactttcctacccaattacccaggtcataaggtatgtctgtgtgacacttatctctgtgtatatcagcatacacacacacacacacacacacacacacacacacaggcatttccacacattacatatatacacatactggtaaaagaacaatcgtgtgcaggtggtcacacttcctttttctgtaccacttttgcaacaaaacaaaacaaacaacattaaaaaattgagaacaagtatggaaagaatgaaagatcaaggaaaaaagaataccaagttacatttcgttaaggtgcttatgatcttagaactatgcaacctaataggtttgaaactgtttacctgagagagaacaaaaagagagacttttttgtattggaagtaatctgattaatttttattttcttcaaggagagatacttgaaaggaatatgtttgtccatctgttggatccaaacatttctatattttgtaaatgttgttgttgttttttttttaatcgtttactatttgcactacaatggtgtttgacctgtctaatccttatttaacaagtattttctttggttgggggtgggggtggggtttaagagctgcacttaatgtgagctataaaagaactgctacagcacacaaaatagctatttttattattataattataattattattattattttgtaccttaaaaaatagacacatacaccaaagacatttgtgtgagcctttaaacagtctgtctgtggttggtatcattcaccatcaatgagtcaggggttgggattcaaggttgagtagtgtggattgtgttcaggcttaaaagacctgagaagtttggtttttgactccttttacatccatgaaacaggacatttcatactggatgtacagtagttgtacactgttggatatcaagttcaatcaaattcatggaactacatgcttgtatgtgtatatatacattgcttgtgcatatgcatatctgtatgtatatatacatgtattgtaccatgtccatacacattttaagcacttcaggctgtcattttttaatgttcttaaagcaatgaatgtttgtgtgcaaaacacagtatttttaagaaggataggctatagtttttgcttttactctgaactaggtgggcgcatttcaaaaattcggatgggaaaaagcctggaaattccagtgaatattcagcaaggccctctttcattgtacagggatcaaatttcctcctcttttttgtgccccctcccacttctacaagttatcccctgtggggaaaacaggatgataatcaaaactctgggctgatgtttttccaacttagtgtctattggaatcaatcttaaatcagaagctttttcagaaaaataatatttaggccagaattagagttgagtgtattttttaaaaatgattaaggcttggttgtgagaaatattacctgtaccagctgggaaaaataatgtcatcactaactaaaagataattaatttgagagaaagtgttaagagagggagagtaaggaagagaacagttaagaggaggcagaggtgagggcagtagtaaaaatctctaaaattttaatttacagccaaaattcttcatgtgtaaatttgtattgattcagatgcagaaatgaaaaaaaaacacctttgttttataaatatcaaagtacatgcttaaagccaagtttttatctagtttattctagtacttagcttgcctggaatagctaataaattattcatgtatgtgcttttgaaaatccagagccctatttttacacacttgtgtgaagttggcaaacattttgaaaaatggaaaaaagtttctaataattgggaacaattacattaattaatattttgtaaaatattgaagcttttagccctatgtcaatttgtagattaaaataaattaattataggaaaggaagataacagtgagaaaccaaacattacaaaaggtggtttagctctccttgaaaaatatactaagttggtatactataacacttggctatatgtaggcaatgtcactactgggcaaatacacttactgtgttctagaggcagccctttcttatgcagaaaatacaatacgcactgcatgagaagcttgagagtggattctaatccaggtctgtcgaccttggatatcatgcatgtgggaaggtgggtgtggtgagaaaagttttaaggcaagagtagatggccatgttcaactttacaaaatttcttggaaaactggcagtattttgaactgcatcttctttggtaccggaacctgcagaaacagtgtgagaaattaagtcctggttcactgcgcagtagcaaagatggtcaaggccatggaaaaagcagaaatttaccaagaaagctgatacccatgtatagttcccactcatctcaaatacatctgctatctttttaagctaagtcctagacatatcggggataacatgggggttgattagtgaccacagttatcagaagcagagaaatgtaattccatattttatttgaaacttattccatattttaattggatattgagtgattgggttatcaaacacccacaaactttaattttgttaaatttatatggctttgaaatagaagtataagttgctaccattttttgataacattgaaagatagtattttaccatctttaatcatcttggaaaatacaagtcctgtgaacaaccactctttcacctagcagcatgaggccaaaagtaaaggctttaaattataacatatgggattcttagtagtatgtttttttcttgaaactcagtggctctatctaaccttactatctcctcactctttctctaagactaaactctaggctcttaaaaatctgcccacaccaatcttagaagctctgaaaagaatttgtctttaaatatcttttaatagtaacatgtattttatggaccaaattgacattttcgactattttttccaaaaaagtcaggtgaatttcagcacactgagttgggaatttcttatcccagaagaccaaccaatttcatatttatttaagattgattccatactccgttttcaaggagaatccctgcagtctccttaaaggtagaacaaatactttctatttttttttcaccattgtgggattggactttaagaggtgactctaaaaaaacagagaacaaatatgtctcagttgtattaagcacggacccatattatcatattcacttaaaaaaatgatttcctgtgcaccttttggcaacttctcttttcaatgtagggaaaaacttagtcaccctgaaaacccacaaaataaataaaacttgtagatgtgggcagaaggtttgggggtggacattgtatgtgtttaaattaaaccctgtatcactgagaagctgttgtatgggtcagagaaaatgaatgcttagaagctgttcacatcttcaagagcagaagcaaaccacatgtctcagctatattattatttattttttatgcataaagtgaatcatttcttctgtattaatttccaaagggttttaccctctatttaaatgctttgaaaaacagtgcattgacaatgggttgatatttttctttaaaagaaaaatataattatgaaagccaagataatctgaagcctgttttattttaaaactttttatgttctgtggttgatgttgtttgtttgtttgtttctattttgttggttttttactttgttttttgttttgttttgttttgttttgcatactacatgcagttctttaaccaatgtctgtttggctaatgtaattaaagttgttaatttatatgagtgcatttcaactatgtcaatggtttcttaatatttattgtgtagaagtactggtaatttttttatttacaatatgtttaaagagataacagtttgatatgttttcatgtgtttatagcagaagttatttatttctatggcattccagcggatattttggtgtttgcgaggcatgcagtcaatattttgtacagttagtggacagtattcagcaacgcctgatagcttctttggccttatgttaaataaaaagacctgtttgggatgta

SEQ ID NO: 52 - DNA, 147984 bp, Homo sapiens
gaccgttgcttggcagacactggatggttatgagcctgaacaagctgaaaaggggcaggaaaagaagtggaggcagcattcttcctatttaaagctgcatcgcttgaaaaaagttttcgcagactgtgctggagctggtgctgaaaaagggggtttgcagaggctgccctggggctggtgctgaaagaagagcccacagctgacttcatggtgctacaataacctcagaatctacttttcactctcaggagaacccacatgtctaatatttagacatgatggcaaactgggcggaagcaagacctctcctcattcttattgttttattagggcaatttgtctcaataaaagcccaggaagaagacgaggatggtgagtttgccatttgctttgcttgtagtgtttattgcacggtttgggaaataggtggaatgttaagcctcaggaagagcgtgaagaggaggttctggtttgaagtttgagaagggggctgacggatttgcacctggaaaacgacttgaaagacaattgggatgtttgtaaatccggagcttctagatccaccgttggagagagtacactactaaatttttctgggaaagcctacaataagtccttttggctgagtgtgagagtgggacgtttaaaataagaaaagagtgaatgcttaaaacggagcactaaaggcattttagttagaggagctctgttctgtgggctggagttttcagagcaaggaaaagtcgcggcagaagctgggtagggtggagtctttttgtactgaacttcagctgcttcataaaattctttgtttagtaaaacctctgcagcaactctgatagctttgatttttctttgtctttggctcctcattctttcctctttaacaatttaaacttctttttaccattttcatttgtgaaaatgtgatcacttttgcttactgggaggcagtctcgtttgtttctccatgacagaggctgatagaagccagatttcttaaacagtggtattttcccaccctactggcttgattaacaggacagtggtggttcccggttggatggcggaaggcaggaaatcagcatgtcttgtatatatcttatttggcatggaatatttgcatggacattaccccttagacccaagcttttttttttttttttttttaaagataaatcttgcctggtgaccacatttttttcctatgcaattttcatatgttacagttgggttatatggtatggttaagcaaaaatgcatagctgttgtagtatataagaaaatatttaaattgattcctctattaaatctttaatcttgagggttgcaatttcaaatacagacatgtactcctttaaaataagccactgtagattttcatcaactcaaccatgtaacatcaaactcaagcttttaaaactttggacattcattaaccttttctattactttcatatatagacacatacatacaggtatatatgtatatatactatgtatatatctatatttttagaacaaatatctgcttctgtgtgtttttggtttcaaaaagtttataaaattaatctagagatcagaagttctaaaaagcttaaaaagtgaaaatacgaatttgtaaatgaatatccaacaatctgtcaggagtcccatagagggggcactttctaagacttggagctttttatgttacgttttatgtttttaaaatatgaggtaatttataaaaggtgaaaacttttgagtttctttgtaatggcatgaaaagcatgtgttgtttggaagggtggcaaaaataattgaatagaaagtagaagaaaacaggaggagaaaaacacagaaaaattacaatagaaattgaaaatttgactctagaaagaacagtttactcccctcccccaccaaaacaaccaactttaatttaaaacctttaataccactttctttgttaatttatgttaaaatgaataaagtactttaataaagtatggaaataattgaatatgtgaataaatgaaaggactgtttcacaaggtacatgaaataagccatattttaaaagacattcccaaatagttataattactctgtaggtgtttttgaaaaatgagcagataatttttcttaatagtaattgacataaatgtaaggaatgtgatgcttgatgcaaaaaagtccccaactccaatccaaccccagtaccccccgcgaacagtataaccaaatagcacagaaaatggaattccaaacatcaaattttacagaatgtgtaattgcttgcatatgtgttgtaaaaaattccagtattttatttctcaacttaagagaatataagtgataaaaattcaacagcaaaagaaagtcgtcattgccctaatcaaacataatagagaaaataattccagagtatagtatattcagagctgcttaacttatattgtacttacttactatgcatattttggtttaagttgatattgtatggatacttggcaatactttctttttcctgttcaggcctatcacaagcttaataaaggtgtcataatttagaaactccatttgattttgagtttggggaagagtaagcttagatcgatgctttaaattaaagaaatatctgaggcacacatgaaaagcaagtacatttttcaaattttatctataacagtcacataatgtgatatttacattttgtacaaatatgtcttcttggaaatgtggagatctgtttttgcatgtaagtgcatattaataagtttttatttttttctttctttttatgacttcagggtatatttccctttacttgactgtggttatttaccagaaatgtaaaatgtaatctgagtatgcctgcctgatagaaacatatgaatgagaagataaaagtaaataaataaagttttaggcattttaagccaaaatcagttccattctcactgagttttaagaactgatttgattttctaaatttataagaaactgaaaggagaaagtttgggagttgggctgactttagttaaaactaacgtaacaaaaattagggagttaaaatgaaaaaaatcagcttttaaagagtttgtgtgggtgtatgtgtgtgtgtgaaaaatcagggagttaaaatgacaaaatcagcttttaaagagtgtgtgtgcgtgtgtgtgtgcgtgtggtgagagtgtgtgtgcattggggtggtggtcttcaaaagattccacatttgtgttaaggaaaatgctagagcatttacagtgtatttatattcctaagttaatgcctagcatctagtgagctatatatattcttgttattagaagtaggcatgcttaattttagaaaataatctttgttatgaatcattgtattcaacatgggataagcaatggagaagggaaggtgcagaaatgtatcattttgtttccaaatactgtaaacctcaatgctttcagaggccaggcaggtaatataaacaagtgaagcaagccagtgtttgtacatcaataggtgatgatggggcctgtggagaactgaaggtgcatgtccactttaaggcattcagaattaacattttcagaagatattgcatatgacaaataaaatatatctgagtatatatttggctcccggcccatgaatttacagccatcatgttgcaatcctacactgatatcctcctggacccaagctaacttttgattactgagagatgaggggctcacagtcttatatgtcatggtctcttgcatttttatgatatgtctgccatttatctcattgttacgatacaaaaatcaggaagcagatatttaacactcagtagtatttggatgacatcattttaaaggaggtacagaatatgtataaatatgtatacatagcttaagatgcatgttaactcataaattgttttaaactcattactgttgaaatacatgctatgaaacatgtaggacattcagacttttatagtgggtacatgtagcagaacacagtagtttaaacaaacaaaaaaaggttttctggccaggcgcagtggctcatgcctgtaatcccagcactttgggaggccgaggtgggcggatcacctgaggtcaggagttcgagaccagcccggccaatatggcaaaactccgtccctacccaaaatacaaaaattaggtaggcgtggtggcacaaaaattaggtaggcgtggtcccagctactcaggagactgaggcacgagagttgctagaacccgggaggcggaggttgcagtgagctgagaccgtgccactgcactccagtctgggtgacagagtgagactctgtctaaaaaaaaaaaaaaaaaagttttcttttttaaatataaagaaatgcttttaagcaggtagtgaaaggctggcatattggctccacaaagtcatcagggactgaggttttttctacctctcctggctcccatatctctaggtatttttttttaaatttatttttatggtcctaaatggctgctgaagctccagccattgcgtgtactttctaggcatgtggatagaggatggaaaacaaaaactgtgagccattccccaccctgcccccttttatgaagactttaaagtcttcataacatttaaacttacttacagttggccggaatttagtcatatggtcacacaaaacttcaagaggggctaggaaatgtagcccttacctgggtggtgctggcaatatactctactgaattgagttctgctatgaaggataaaaggaagcaccactattaggagttttatggtccctacctcagtgagcaaaaaggtcagctacttttagtggcctagatcttacggtttcaatggacaaaatatagttgtgtgactagatccactttggttattgttcattactgagtagactgtgaagccaagaagactgaatggcacataaatattaggctacattttctttgcttcttgtctttagataaattttgacacctataacttctattcaaactaaactgaagctttagtttgaagagtatatctctttctacatatgtacattggtagattcatagatttagtgaatttttaatattgactaacacaatgtatacttggaccatgactcgtagggtcattggtaagcaagccacagatcagtgttgataaaaaatggtataaagaatcacctaagatcttgtgactaatatagattctagacccctctactttccaaatatctaggaagtttggatggggtctgggcatctgtatgtttttagagctctccagttgactctgatttacattggtgaaccactgtattaaatctttgactgacactctgaatcttgttgtggacctgttggcttttatgttccgaggctacacattaagattttggtaataacttgctattctagttattcattttacttataaggctgcttagttgaagtttgtaggtaaaccattgcaaagtcaccatcacttctggaaaaataactcaaggcccaaatacccctcatggtggattaggcgaatcattctactatgcagaagacacatgccatttgcatgtgtttccaggtgaatgcatgtttttcattttcaatatttcctctctcttactttctgctcttcacactttgagcactatcgctacaggcctgaaattcattgtgttcatcattctagacaggtacctaatgcaggatgtgaggcaaaagcagaaagaggaagctttgttttaagaagctggaaattagaagattggaatcgtgttaatctatggccacagaatgtagtttttaaaaatcatacagttttctctggtttgaagaatgattaatgcatcatcacctggccttacatggcattcttaaaatgtatggacatggatcaactgatctttaatcggattttcttctctgagatcacaacattgaaaagcttagatttatacattagagatatagtaagggtgggggaaaagactggaagtgttgattattaattgatctattgtataaatttgggcaagttacacaagtttatataagacaaatcttggaattatataaagatattccttgatttaatattttttattatttatatccatgaaactataattttcactaaaaatgtagcacgagacagtatcaacttactgataaatatgaagtctttgaacttttcttatatctaaaagtcacagcttgagtaggcttttggagtctgaatgaaattatcaggaagatactgataatctagttttcttaaatttatctccatataaagttcatatatatttatctaaattttacgtaagatgaatgagctgtgatattcaatatttaaaagactatttactcttggcatttgcatgggaagtactctatcctatggaaaattttgctttaaaggtgtgaccatattggcaaccttaaggtttttatttcattttatcaatgttttaaaaactaaacccttcaaataaatcaaggtggcttcatcttatactaaaatattcactaagaaacaatgtataagggaaattacaataaagcaagattattcctatctaaatcttgccttctacagagaagatagaggctgggtgtgtggctcactcctgtaatctcagcagtttgggaggctgaggtgggcggatcacctgaggtcaggattttgagaccagcctggccatcatggtgaaaccctgtctctactaaaaatacaaaaaaatttatctgggtatggtggtgggcacttgtaattcaagctactcgggaggctgaggcaggagaatcgcttgaacctgggagggggaggctgcagtgagcagagatcatgccactgcactccagcctaggcaacaaaacgagactccgtctcaaaaaaaaaaaaaaaaaaaagaagaggaaaaatgttaacaatattaattaatattaattaattaatcaaactttgttcctatagccttctggtgttatgttcaaactcaaaaatgtttacatgctttttttttttaagtttaggattaagaaggaggaaagacagtctcacagttttgtacccctttttaccttttatttgagatgcccaatcagaattgtgaattcagctttaagatgacagcaaactatattattggtggaaacactacttgcaacgtaagcatcatagcctcgttgtagtctatgtagtataacaagtataataaagcttggtccagccatcatgtgagagaacagctgggttctggtcctcgttctatttagcagttttgctacctgcagagggtccttaacctcactgggaatttgtgtcctcatctgaaatattgaggaaatagtatgcacctttgtcatctgatgggattcttaggaggaccatttaagaaatttacttaaaagtaattttagagtacttaaatgagacacggaaagtgacattacaatctacttcactgaccacagatataaaccctagtggtgtatttttaaattgctttcaccaaatctttgaattgttttgaagcacctcctggacttgttcttttgtgttttatttgttctccatctccctgaggaacttgttccatcagtcatgctctcttttctataacttcagccacttcctttctatctgctctttccctttagcttgtaaacaagttcagctctctcccacagcctgtgtctagctcccacccagtctttattcttagcccagctgctttaaaaggagcagtgcagttttctgtctctgcctcctatgccctcacttggcctctctttccacttaagctggtctagcatggtgaggattaaaatgtgtgatattccaagggtcccttttcatcttatcttatcaggcctttctcctttattggagaccattgaccactccagctttcctaaaatgctactctctgaaggttcttcctccacctccctgacctttccctctcagcttcatccatgggctccttcttctcttttcctgtagcattttgcttttcttacaagatttagttcattggttctctctggatattctcttcctaggccacctagaattaagggttttgtttaacagctgaatgctgataattataacatctcttcaaccccaatctttcacatgaactttagataaataaatatattcagctgtcccaaaggcagcctagaaccacatgaaattcagtgtatccaaaacttaatttattggcttcccttcaagacttggtcattttgcttatgtagtcccccttatgccagttaatggcaacatgatgctacccggtcattcagtcagtcattcaatcagcacaattccaatcgttcactaagatctaccattttacctgctaaatgtttctcaagtgtacctcttctccatccctactacaaatgcctcagtttaggccctcatcatctatccctcagttactgtgatagcatctaaattcatctccttgcctctcatgtatctgctttccaacaaacacatatattggtgccttctgttgctagtgtgatataaaactatctaattttgtatttaccttccttaacaactttcattgggtcctgtaacttgtagaaagaataaggttcaagcttcttagtgtgacatacaagatcctgctgatctagcccatttctgagttttagtcgcatcaactgtcattctcagcctcaaaataaggaattgcttgaggctgccacccccaacacacacagacacacacaaactctctctctcactctctctctatcccctttcattctctactgtccagattccacccagaactgacattctctcattagttgagctaagtgctcctctggccatctcacaacagtcagtacacctctgccatgcaggaacaataccatactgagaatgctttctttccatgaatccgttttacacattcccaccagattaggctaagtcccacttttataatgtcactctccagtgacattataatttattaacattatttattaattattaatataatttattaacattaacaatttattccaagctgccattgactgttgcatcacacttaacacattatactgaccttacttctgtgtgacttttttttttacctaagagtgccaagagtatccagctgccttgcaagactgctcatgttctcctccactgtatctaaacaaatactatgatttccattattgtccttaacactactgattgcagcacaccatgcagcatcctttctcacttcagatctaactttttactgttcccacatctaacttttgcgatttaggtacttcagtgcttctctttttatcttccctctgcctattgatgttttcctccaagttctgcttcaaatcttatatcctctaagaaactaagagattcttatctgcaataaatatcccctttcctttcaagggatggtccttatgttgcaagtgtgtttgtgctaaccaagaataagtttcctgggagatagggactatgtcatgaagtcattttatattttagatccacccatgcataaatgccaattgagtactatttgtgaaaatctagaaaaattttttccacaattcgttcactcaagtatgagtgatccgaattcaaatttaggttttggaaattgtatttccatattctcgggcaattttttttatttctctgtgttacagtttcttcatctatcaaattggaatgatacttcaaataattatgatgaatactatctatctatctaacacctacatgatagcagtgactcccaactaataataggaactcattaatatggcagatgattattattagattactatttaataataacaggccaggtgtggtggctcacgcctgtaatcccagcactttcagaggccgagctgggtagatcacctgaggtcaggagtttgagaacagcctgaccaacatggtgaaaacccatctctgctaaaaatacaaaattagctgggcatggtggcacatgcctgtaatcccagctcccagctactcgggaagctgaggcaggagaattgcttgaacccgggaggcgaggttgcagtgagctgagatcgcgccattgcgctccagcctgggcaacaagagcaaaaatccgtctcaaaaaaattattatttaataataatagagataataaatgcttattgggtgattatgagaaccaagatgttagatattacagagaaataaagaaacaacttttgctctcagagagattaagcctagcataaaaattttaaaatgcaatttttatattttattctactatgatcattttggtaatatatcagtgattttatctgtgtgttaataagcttttaaaacccatttaaaatttttactgttcaaataaaaaggccatattgtattatttccttttgtaggtttactaatacaaaaaaagaaagaaagaaaaacaaaaggcatttcccaatggagagtttctaatggccccatgatctgaagcatcactgcccctcccctgtttcgcagccccacatacatttactttgtgctggttcccagtgtgtgagcaagccaagcatgatccactccatgccccagtgccacctcatgcctgtctaccatccctgtctgcttcagagtttagtttgtgaaactatgataatcatagaagtctctattaaaaactggaaacctgttttccactctgcattgctctgagttgcatttggaatgagaggcattgcttcactgcacagggatttacaaagcagctcccaggactattcggatacagtagtaggggtgaccatcttttcccagactctgtagcaagtctcttcactttccaaaagctgttaatttacctcactcccttcactcccaggagatttttatgaaattgactccagaaagcagaaactggtgtgggatattggcacatttttcatactcacactttccttactttgctgcactgttctttctttgtaggttttcaaattcataataaaaaatgatgggtttaacttggaaggagagatgcaggtggaattttaccagataatttgtagctatgaaattctttaattaaatttttgatattcaatatggttgttctgtggtcatcaactttaaattttttttattatggaattctgaaaatatggatggttcccatagcaaatacaatttatttatagagatttaatattttcatttagctttcatagtaataggcttatttgctcttgaggtagaagaacctctcagattcatttatgctagtttggaagtattttaaagctttttttttctcattctttcgttctcagatttttatattaaataaatggaaagttacagtttaattcagggcactatggttttcatgttgtgatgaagtttcagccagaatttttggtgaagtggattggacagtgaggttaactgactaccatggaaagattaactgcaaagttcctagttttctgatctttggctacaaacataaaacttctgaggtttcagcaaaaagggctatatttgctttgagaggacagagggcactgaccattccatgttaagcgagagattctgttgtaagaattaaaaaaaaaaaaaaaaacccgggcacagtggctcacgcctataatcccagcactttgggaggccaagacgggcggatcacgaagtcagaagatcgacaccatcctggctaacacagtgaaacccccgtctctactaaaaatacaaaaaatttagccaggcgtggtggtgggcgcctgtagtcccagctactcgggaggctgaggcaggagaatggtgtgaacctgggaggcggagcttgcggtgagccgagatggcgccactgcactccagcctgggtgacagcgagagtccgtctcaaaaaaaaaaaaataggagtttgtactgggaaaaaagagacttgaggctgatgaatgaagagcaactgcaaattctatcagggagctggtgttcaagcctttaaggtgctacagtgttatgcccttctaggtgttattttgtgaaactatgatagtcatagaagtctctattaaaaactggaaacctgttttccactctgcattgctctgggttgcatttggaatgagaggcattgcttcactgcacagggatttacaaagcagctcccaggactaaaaaaaaaaaaaaaaaatcacttctttcttcaatccttccctatttttccttaagttttgataattgttgatgagattaggcaagttttttatttgtggcttttgttgttctctcttaagcatagtgtagctgaactgaattttgcttagacacaactcataggtttataaaccaatggagttctcattagcctagaaatatttccttatacagtacttagaatcatttttgtttgtttgttttaaaaaatggagtgggggagtgtattctgttatgtaaaggatgacaacaaattgaattagaattagttctataaagataaatcagtgaataggctctaagtttcactgtgggtgtttgtgttggggcataggaaggatgacataataaaatagaattggtaagttttagtatattcagcatataaatacatcttgtaaagttgccaagtgtcccgctcacctgagctaccttgtgcctcttgactttccttgggtgcaacatttgctaaagtcctaggagtaagagcaggtccagttctaagaaaaaaattttgaatacctggcttatttttagtttttaagggaaatatgctttcattcacctttctgtctgaaggaaaggcatttttcaggattgggaggccatccttgcctttccagtgttttgcactaagctccatctggatgtctttttcccagattttctttcaaatttcagacttttccttccagcctgacctcttatcacaatttacctgtttggcattcttttctttccgagcctcatggggagctaatatagtccagatgccctatagttagcgtcctaggacacagatttaatgatattatgctcttgtcatacaagcttgttatatggtaatttgccttttaagatctttttctcaatattttctcgccacgagaatcaactgacatactggctctgggtaaaagccccagtatcccagatggactccgtggctcacactacagacgaataaaattcagctgtcatagacactctacttgcccacggagggttccacaatccaaatgttaaaattacttcaagtcttttctaatagaaactgaaagctgtctggttataatcaaaatggaaatttgccagccagattcctactgtttctgaagagggattttgagtttcttcaggatagaaccctaaaattgccccatggtatatgcccaaagtgacctaacttggccagctgaatttcagggagatgctttccaagatgacaatttcactggaataatttcagaataggtagttctctgcccataatgtccctttcctgtcttaggtgatttaaaaaaaaaaaaattcaacctgtctttcttctcttcaaaagcaagtttcaagtcacacctgggtagaaccttatgcctctatggagactgcaggatgtggaagacaggagagagggtatggagagcagcaagagcctgggaagaagggctctccaagagtatataagtgataccaatggacaggtggctcacatagcatcattgaaatgcctaaaatgtaaggctccatgctaatttagtatgaccatatctaagtgatgtcttgggggatttatttagtgaatttcaaaaaatttggaaaagtagatgacatctctcaacatatgttctttgactcttctattttttaccctattttttaaacatagtcattttagaataaataaatagataaataaataaactgtgtcacaatactatattctttcggctaaaagcacatattccgtcaactaggcctacaggcagtaggagtaggacactgactcagcaatgagtttttgttttaaattgttattttgggagcttcccaagagttcctgttaccatttttctacatatagagctttttacagttagcacttcttttccatttactttcaatacacagttaacaaaagaagggtctttggattcacatctttgggtccagactttgccgtttgctaaccttgtgaccttgaacaagttcctgatcttctttaagattcagtttcctctcctcgtctgcatattgaggagttaaattaaaatgcatggccttaatgggcactgaagaaatgtggatgttattagtacttttagaatggattccctgattggctcattacagacttttcctccaataactaaaacaatttttatcagattattcccagttactaggtttgataggaggaaggataagggagcagtgaatcctaggcacctgggacaaaattggggagggagtggaagaggaaaaactataactgggagatttgaaatgacaatagtaaattttcatttactatgtatttatatttataattatttttacttatctcatgtttttccctttgggcaggtttgtgcttagctcttgattatttacaaagcatttcaggaaaagcaaaccagcaaaacccccaaaaattatcctttggtattagaatgcatttggcaaattaagtggtacatatacacatttaatttaattctttctttctaatataaagtttttggcaattgtttgcacatttgcctttggtagagttgtttgagaaaagtggaaatatgcttaagatatgaaacatctgtttattttaatgatattttactgatgtcaagacagacttatttgagccctggggcagtatttttgtgagggatggcatgcaccttgcctgagcagtcaatgaagagaaagcagctgtttgagcttgctcaacttctactaactcaacgtggatagagtccagatagcaactggccctgtgtcagatgactgcaataaagctctctttccttataaattctttataaacatgatgtgttggggtcttaattttctcatttacaaaacagagataatactttatatttttctaccttattggttcaaaagaaagagttcataatttctgtagaaattcttagtcagctgtaaaaccctattacataagcatatattatattacataaaggtgttattatttagcatgcttttactgtaatgaacagttagctaaatgcaaaataaaattcttctctgaagtaaacaataataataataatcaaaaggaatataagactctccatagaaataaaagaaggtaaagttgtattttttcaaaatcatatttaaatcttttatttagcaaaataaaatagactgcttatataactatctagaacatctcccaaagccccagaataggaattaaatagtaaaaaaaaaaataagaatagaggctttgacttgaggaaaaacagaacagatagaaaaacaaaatgtgatttttctgctataactggactgtagtctctctacaagtgaaatgtagcttcctggcagaagcctgaatcactattattattactttttctttattcatctcgcatcaggaagcttgtctcaaattcaaagttaaacgctaaaagcctgtttgtagcatggtatcccttttctctgggtcagaaggtgactgagagctagaagtttaaactggtgacaaatatccacaggcatctgagccaaacgtttagaaaaaagtcctatcatccctcaggcctgtctacattctggtattttaagactctctacttgtgtagagagaaacatgcagttaaagatatgagggccttgactaaacaggctgttactttcatgaatgaattgttgaaataatttgaaagaaaagcttctaaattaaaactggaccaggacacaggaaatctgcatcataattgcagctctgtcatggactaacttggtgattttgtggaagtgacttaaattctctggacctcagttacttctgttgcaaaacctgtgatacattacccagagctactgtctgctttgaaagcctgtgactatagaatatttagataaaggtacttcacttaagtcatatttgtgctgtaatacagtggaaagtctcacctacacattttggtaactcgaagcatcacacataatctctatggtaatacatttctgtacttgtgagtttgcatttgaagtttagatcaattcagatttgtagttatgtccctaaatatggtttatttaaggagcacagctcccaatttataacttgtaaattgatctgcttttcagtgagtgactctacaataaagttcctagatgctgttataaaagatgattgtaaaaaaaattcaaaataatctgatatcaaatttttcatattaactgaattttccaattagagagaaaatatgtaaatgcatcatgtgttgtgttatgctgtttagccacagactcagtgttctctaaatgtttttggtgagaagggatgtcagagtttagcagcgtgccttcttgccctgatgctggcggattcatctttgcaatgcttattttttccaacaatccttgaacataccaaactgctatttcattcagaataagaataagaataataatgaggaaaagaaggagaacaatgggacaggtggagaaggagcagaataatggggcgagagagaaggtgaattattattattattattaaatggttgtgggcttttacctgaggagtagatcatatttgttcttgattccttattttttgcctcttcttgacttcttatttttcttggcaatcatgtttgatgggagatacataagtgtttactatgaatatttagaaaatttgatttattccattgatattccttgagcacagaatttttttggaatatgctgcttgccctcctttatcttctgggaaaatgggactccatttttgtgtttgttcccccatttccctccttcactagtactgactgagtcctgcaaacatttatcttctcaagtcctgctagaattcctctcccagggattctgggcagaaaacaagcctcttttttacatctttacaagtagtgtgtgtgtggaattcaagtgcatgaaacattcagattaaaaatctgataatattttagaaattccagtatacccacaaatactcacatgtatgtttaaatcagggattccagtaggagaaaactgttagattctagcttaatgtactcctcaataaatgaggtatactttggtcatcgtaaagcacttgctaataatttactactttgggggatttaaatcccattctatcttcagaagtcattattaaagtgttatcagtaacattagaatttgctttggatgattctgacaaattcaacgttttattaaacaaaatgatgctctggtctcaaatgatggagatttcaacttgcttttctctacagaggagtatatcccccaccatgcaagttatgaggcatttaccttcatttattcattaatttggtaaacatgtgctgagtacctgctctttatcaggttctttattgattgatacagaaacaaatatttaattcttactcccaagaagttaatcgtctagtgggaatgagacaaataaaacaaggataatactttgtggtctgtgctgtggcagaggcagacaaagaatcaggggaataacagaagacttccctcccacatactgcctgagaggtggaggactgggatgggagctcagggaaggcctcccctggagggcacacctgagaagtcattccgctacatgaactctgttattttccttatcccttattttttcctccccttcacatccaaatctttcaagtccgccatcaagtctgatgtgcatcctctttgaaacctttttgaacatcatagacatattttttctcttttctctaaaaggtagcacttcctctttctttaacacatttagcacacaataaatccttttatttattgcccactgttttctaaataacatttattgtaaatgtcattgattttttagttatatcatatgctccttgagggtaaagaccatctctcaaacccagaaagtcagatccagctccagtgctatgcatatagtagaaactcaataaaagtttgtgactgatatttcaagcaaaatatattttcttcatgtttcaaaattaagtgctttttctctgttgttagattgctgtctaattacattgcacaaccttgcctaagtttttatatacatagcattgagcttaaaaacatggaaccagctcttatgcataatttagctatatttagcatctttggtccaaagccttataaaaatatgtacatcaaagcactgtaattaaatggaaacaaagttaaatttatattttacttgttttatttatagtgacttgagtcagagtatagggacacaaagatgattgacatattatcttgtatttaaggaatacataatgagaggaatagatacattaacaaataactataatgctgtctaataaatacagtgagaaagaatggcataagaggagtatccagcccacccttgagagcatgggttggtttcttgcagatgtatccaaaacataaaggatagatgtatagtaactagcagaaatgacacaagaggaaggacaagaggatggcatctagataaaaaaaaagtacagccgggcgcggtggcccacacctgtaagcccagcactttgggagatcgaggtgggcagatcacctgaggttgggagttcgagaccagcctgaccaaccccatctctactaaaaatacaaaattagccgagtatggtggcacatgcctataatcccagctactcgggtggctgaggcaggagaatcacttgaatctgggaggcagaggttgcagcaagctgagatcgcgccattgcactccagtctgggcaacaagagtgaaactccgtctcaaaaaaaaaaaaaaaaaaaggaaaaagaaaagaaaagaaaagaaaaagtacatgaagaaattctcaggaatattaattagcattgttttgcagaaaactacaactactttaatgtcttagagcatagaatggaaggtaggaagacattattattagagttttgatttttttggcaatttattgattgattaattataaactcagtcttcagtagtaggaaagacagcaggtgtagacctttatttttccttctctgtgcattaaaaagctgaattgtaaagggaagaagagctataggaccctagtcagaacaggatgtagagtccagtgaggatttttgttttattttattttcagatggcagagtaggctgtttataggcttcagaaaaaagctccataaagaggaagatgttgaagatagaaaaaaaggggggataaagattgcccaagatatagaaaggctttcttagagacaaagtcagggttttctgagttggctagtggtctatactctgttgacatttatttttggtgtcttctgcctctacaaataataatatcacactacatataagtagtattatacaattcatgaagcattcccacttcttttatgcatacattctcagaacctcagattaaagatgaggacactgaatctacaaggaatgaatgatgcagaggatgttggacagaagtatagagcttcagttttctggcttctatttcagggctctctcaattgtatcttacagagaggagaaaaaagggaggatggcaattttagtcaccaagaacaacactctatgttacctgaaaattatttgtgttcagtgctgagttcttagagacttcagtgagaccaaacctgtggcaggcaataatgaggaaaaaatacaatttactgttttatttaaaacaattatttatttatttttaatttaattattattattattattttttgagacagggtcccgctctgccacccaggctggagtgcagtggttcaatctcagcaacctctgcctcttgggttaaagtgattctcgtacctcagcctcggccttccaaagtgctgagattacaggcatgagccaccgtgcctggccaatttaatgttttagaagtttagatttttttaaataattttttcagtgaatatgcataaagaggaagatagaaccacacaacttttaatttactcaactaatacatttacttgtaataaaagcagcaacattgtagctggaatctggagttgaaaacaaatgtaatcacaggctgtgtgacagtgcaagagccaaaaatgacttttgagaaaaatataatgcttgttcagcattcagtgagacaatcctaattgttagattttctgccttagctttagatacactgctgattttaaaatcgatgaaacagtcatcggccaaatatttattgagtgctttctgggtctctggattctaagcaccatgttagacattacaagtagaaagaagaattagaagtgggcttacttagatacctaatatgagagatacaattagctatagattcctgtgaagagaaccaatgggtatataactaacaacatgcatgtagaccagcttaagcagagaccacatctgaaccaaatattttcagtaggaggttctctaatgaaaatgtttgtttgctaagaaaatatttttcttcctgatgtagtgacatagatgatcaatacctttgttcaggtttctttgagggtggttaaaattgagttaaaaatgtaatcatctgcagaaatgttttaccaatttgtatgaatgctgcctatttataataaatcaatccgtagagtataaatatttgtgtgacttcggtgcaccaaataatcaatctatatatttagtaagaaattcagaagcagaatccttggttcctgaccttgggaagtttcaaatttagttgcaaaataaacacttgaaataattaggctaagaaataggatatataagcaccaaacaaaaagacattaaagttttggtaataagtctagagtcagttcagggaaggggaaaagttggagttgttgggaaatgagtgaaagatttcagagaggaagcagataggagaatatagtgttatggaaggtatcagagatactcttagaagagattgacagttcctgtatcacagagatccaaggaaggatgaagaaaagatactgaatctggtactgtggtgttttctaactaattttgagagagtagttgtttttacagttaagaaccaaagtaaaatttccagaggttaaatctcttgtatattctaacatattgatttctgaactaatttcacagtagccatttggttcatatatttgacttaaattgtactcagctaatttcttttagttttatattgtttcttaatgttagggacctcttgaatactaataaaatgatggctatggtctattggtatttgcactgtgttaatacttttagtgctaataaatgttcatagagctagtaagcactacaaaaatagaggactgtgatcagtggctttagtaaagaattgcaaaaatgttttggcttaatatttaatcctttatgtaataataatattggtttttaacctaaataaccccaaatttccataaattactcataaaagtcattactatggagtcggtcattgcacatatctgtagctattactgtaatgattcttagtaactcatctactgattactgtatgattacctaacactatgacttaataattaaaatgcagaaaatatttattggacctgtactatgtttcaggtattgtgctaggctgtagggataccacagtatataagacacagtctctaccttcattgaagtctatctagagagagaaaaacacagatgtgtagaatgggaatgttttgaaaatttagttgccacaaaaatattgtttcctgtttagatcaagaacaaataatatatgtatgactaatatcagattaaaaatactgtagtttattattgcagtgatttcattgatagtaaaaatattaagttgtttcttcaaaccaagacataccagaggaaatagaacattttgaccaaagcctttaagttttatttcaaacaagaataccacaaaacatttaattccactgaagaattagcccacattttatttttgtcatccaaaaacattacattccaatcttccttttactggtatgtgggaaaaacactttgaagtagataatagtctggattgggattccatgtagtctactctgtccagtcaggtttgcagagtagtgaaatatcaccttctctagaagataacagaactatgtgtttgtaattattgttgaagatatatgatgaaatcatattcttgctttttttagacttctttatttaaatgtccttagcatgctctgtcaatttaatgaatattttaaattcttctgtaccactcttttcttttttgcctttaactttgttttgggttaaacttccagacgtgtgattatttgtatatgctttaacacacttggaagaaatatatttaaaaaataaagcaaatttatacaactttcatttttaatgtgaaatatgatctataagtcttagcactatttgtatttggggcttcatgtgctaagctatatatatagatatatatatgcttagcacatgaagatatatagatatatatatagatagatatatcgatatatctatctcacagctggaagtttcattaaattttgcagaatatttaactacttgcttcagtatagcctcagtgctatcccttgtggagatgagtaaaaaacacagacaggtagttagaactattacatagtcatattaacagttgcctagagtgaatttaccattttgtcaatagatattatttttcagctactgtggcaactaatcttcagccatatttccactattttattgcaaattcttaaagtgaatagactatatatgcttattatattcgctagtgtgaattaatagtggattttatgctagctattttggaagtttcagaagataatgtgattttacactgtgagtttggtggaacttattatcagataacagactcaaatattcagcacaaaaacatagttgagaaatgtcaatacatatttttggctatagagaaataatattaatttttcatactaaagcatcaatgtgtgataatattctgcttataaaagcctatgtcttattggtgcagtctctccaacaaagctggatagccagactcttttaaaattaatttatgaggacaagactatcaacatacagcagtaaactgagcataattgaaactttcaagtcttgacaaagccttgtgaaaaagtaatatattaaaaagaatgattttatatatgagtttgtcttcaaatgtaatttttatatttttaaaattctgcagttgtcagtatatatcaaaacttgttccccaaagaagaaattttgaaatttatttacttaataaatatttatttttaagggcaatgttgtcattctgaggatacagtaatgaacaagtctctgagcttcatggaacttgaattctactgcagggtgtgaatggcaaaataatggccatccccaaagatgtccatgctctaatctctgtaacctgtgaatatattaccttatgtggaaaaggggaattaaatttttagatgacattatgattgccaatcagctaattttaaaatacagatattatcttggattaactagctgggccccatgtaatctccagcatccttctaaaaaaagaaagaggcggaagatgtgatgacaaaagcaggaatcatagccagagagagagagagatttgaagataccactcttctggttctgaaaatgaagagaaagccatgagtaaaggaatgtagttggcctctagaagctggaaaagacaaagaaatggatttccttctggggcttccagaaggggtgcagccctgtcaatatcttgatgttagcccagtgaaacccatttcagacttctgacatccagaactagaagataatgaatttttggtgttttaaatcacgaggtttgtgctagtttattatgacagaaactaatacagagaaataaaagataataaataaacaaaaatatatattttaaaaagataatttccagtaataagtgccataaaggaattaaaaacaggataggattctgaaacagtgctgtccaatataatatacactaacacatgtagctgtttaaatttaaattaattaaaatctaagtgctactagtgtggccagtgactactatcttggacaatgcagataatagaacattgctatcatcatagaaacttgtcttggacagtgctgttctggagaatggtactacttcacacagagtggattcagtttgtatgaggatctgagaaggaatcaggcaggtgaaaggcctcccaaaggagcaaaatgtagagcagtatgtgctataaaataaatgaaacagatgtgatgtaaagcattttaaaatctcccaaaggcctagtgcaatggctcatgcctgttatcctagcactttgggaggccaaagttgaaggatagcttgagtccaggagttcgagaccagcctgggcaacatagtgagatactgtctctacaaaaaaaaattatttaaaaaagttaactaggtttggtggcatgcacgtctagtcccagttacttaggaggctgaggtgggagggtcccttgagcccaggagctcaagggtgcagtgagctctgattgtgccactgcactccagcttgcacattagagtgagaccctctctctaaaataaataaataaataatctgtcaggatactttagggaccttattattattttatttcaaggtactcataaccactaatttattcattcattcgtcaagcatttagttacaacctaattttatttcgagttttatgccaggtaaaatatatacaaaagtgaatataatggaggtgctaaactcatagaaccaaagtctagtagaattctccttttaaaaattgtggttcattttggacagcacggtggctcactcctgaaatcccagtgctttgggtggccgaggtgggaagattgcttgagtcaagaacagcctgggcaacctagcgagatttcatctaaaaaactaaataaataaaaattatggttcattttgacggccacagaggccattgattctgcaggtggagaattaaactgcaatttctcatcatgctagggagggtgagggaagagggaaaccagcaagattctgctatgctggggactgcccacttgtccagtatcagagccattcgccaggtcattttgtggacctgattccactctggtatcaacccacatcatatttgtggaagaagaagaagcaggagtcatgaattatgattctcctagcgaatgagcgcatccttattaaaccttgttaagtcctgtgaataaattttgagctagaactttaacttcatactatagttttgttggtgttactgctatgcattcatttcattactgctgtgtagtttatattaatgacattgactttcaaatatcatgtcttagagaataaaaaatagagtttctgatatagtaatctcctttaaggtatccaaagagctgtgagttgtctgcatatgtgcatgcatatgtgtgtatgtgtgtgtgccttttttgtttgcttgtcttaattttttaaaaaatgtattacttcaagacactataacattgactcataaaatgtgtagttattaatatgactgaaagtgccagagtttgcagtcagtaggttgcaattttccatagccagggaatattggaaagctgttattcaaaggcaatgcagaatcttagggggtctatacaggaactaccttttaaggaaaatgcgtcttaccagtgaaagtgatggaggatgatttccagatgttcaaatgcttgttttggcaactgctacagaaaactgaaacgtgttgccagaacaaccaaaagggatgtgaagcactgatgtaagagggatcaggccatggaaagcaaggcaagcagaaaccagagagtatatagagagataccagagaggggagatagttgagccaagagaacaaactttagagccccagtaattacatgtagtaaaagcatatctgcctctgtatgaggatgcacacccaagcttatcacccctgtgcaccccacttacactttcctgtgctttcttcattatctttcctgtaactattgatgtcattatgttaattgggaaaactcttcctggctaatatgcttgttagatattatgggttagtgaagcatgcatgactggggttaagcagatttgtcttcaaatcttgagttcattcttgactaccaggatggtcttgactgaatcatgtaagctctagaatgttcagtttcttcatctgtagaatggaggttataatattattaccaaatagctgttgtgagaaccaaatgaaataatgtatgtgaagagcatgcaagaataggtttcttctccatctgactccttccaaccaatttccagaagtaacattacgttttttgcccagttaggaaaaatacattttcagaagacatctgagaattgcatgtaatgttggcagactcacagattgaaaatgtttagctaggttgactttttgtgggctcttggtttagaatcatataggcaaccagatactgtgtctacaaatcaggcagccacttgggattgttttctaaaagatgagaaaatacaaaaaataaaaatccaaccttgattgaatatgtccttttacactctgaatatctgcagtgtttcttttcccccaacttttttttaaacacgtgttgattttacagtgcagactattaactgccatcccaaaccaaccagttccaagcagttcaagataaataaaattccccatctgccttcacatcttggtgagatctttgaccttcatttctaaatcattttgattcctcgccaccctcccccaacttacttctacaatgctctccaccctagctcatttctgaaaaagagatttttccaatctctgtgctaggcctggtcctgggccagaaaaagccaggctcttccaaaaagccagcctctgcgggagttggaacctaaaaatctaattcatactgcaactattttcccagggggtggagcaacaggagccaggataacagaaagggatcgctgtagggaactagctcattccacacctggacacctgactgtgttccactgtgaattctctgggaaaggttttgaagtctgtattttgagttgagctacattgtgtgttggctttcacatacattgtgtgtatggccatttcaacttaccatattatctgtccatgccctttgacatcttaatttctctgaggaaacatcacagagatacaatttagaactctttggtatcataacttgtagcccggaaggcatggagtgctgaccttacctattattgtacttgaagttagaaactctcaccttaaatcctagatttttcatctatgagctgcatcatcttgtattttaaattatacatgtaagtgtcaggttccatatctaaaaaatgtaaaggatgagaatacttgctctgattactttgcagtgtgtaaggattgaatgaaatcatgtgtgttgaagtacttaaagcagagtagatggctcccttcctagttctcctctgagattttgaagaattctgttcatattgcattgtaattatttgactctttccctctactgactcaaaaacagagattaattttttaagctatgaagtaagcaaaatagcataatagttatctttctaatataactactggggtcttagacccaacagtacactttgaagtgaactctatagttatgtgatttttaaagtaaagtggcttttaaataaatatagcttgtatataatttcttactaggatagagtttaaccaaagttattgagaagtatataaggtgtgtgcagtcagttgaagaggctccattacagcagagttttaagaataattatagagagtaaaattagagaaggtacactagtgggttttacagtgaagaaggtaagaaaaagagttacagatgaatatgtgtttttatggccttgcttatattttaaacacaccttggcaacttatcatggaagaggggtaaactaactgaaatgaattgtatagaagcaaaaactaaatgtcaggtgtttatttgatttgccagttatctagatcatccttactgtttaaacatttaccgtcatgtatgttttcagtcatggattcaacagaaaagacagtcaaaacccaattattatcactattgcttttcttgtgaagatctgttatctagattgtctttgctctgaagattgcttcatttgtcattatgcctttattaaatataaaacataaacaatttaaagacctactataacaccatttgccatagaaattagtttgctttaaagaaggtacattttggatgtatatccaggtaagaatgtgtttattctattttaatggaaggggtgaagggcatgagttcatttcaaagaatgtaagagtaagatgctgggggttagtgtgtcttaaaatgtttgcagtgattatctgtgtggaaatgggttacatttatttcttattataggccatggtagctccttatggtagaaagaataataagccaattttggctgccaggtaatccatgattttttcatcaaattacgttacagactactgtcctccatatttatgcatggaaacactttctaaaatgttatgtgggattccctgtggaaaatcttttttaacctttgacctaactgagaatacaatgggttccctttgaggtaatgaattctctgtctctggaagtaaccaagcaggagctttacagccacttatggatgctatagaagaaattcctaagaaattggactaaatagcttcttgttctcttctgatgctctgtataaattaatttagtgtttgaggaaccaaagataagcttcctaagttcattctagaacaaagatctgaaaatagtagaggttccaataaacatcaagaaacatttattgtctacagaaaactttttatctttcacggttttttaaatgggagtaggaggttatatcaagaaatccaagcttgatttaggtcgattttattataagatggaaaataatagcagtccatggagacactggcatttcacactaaacattttaatttttgagaatttttttaaaaactaaaatttacataaaaaattagcatgtccaagagaactccagttgattaaattccaaacagcaatcacctcagcactgtgtcctaaggacttttatattgatatgacagaatgagagttgcatttgtgtcctgatatttggcaattagcaggagctctgtttgccttgtgtgctcagttgattgtcatctgagagcattctggatataatttaatgcctgttaagtcatctctaaagtacgattgtaatacagtaaacaatcacaactgtttagtgtttgcacaattgcttgctttcatttgaccttattatagactgtgagcctgttagtttgattcgtgaaggcacacacattgttcaggaatgtttgccagtaatgagtgagggctagttttccatattgacctcatacataattacataaattaaagcaaaccataacaactgagggtcacataaaatacacttcacagagagattttaaagcccttgcattgtaccaagcttgaaattatattgccataagacacatatatcatttttgaaaagtgtatgtttaagtttctactaagactttacaaagaacactaaataaaaggttctattttaataagcattaccatggagattttctctagaaaaacttggctaagaaagaggattgccagtgtttttattctggaggttaatgacttgatgatagaaatttctaatgctaggcttccaaacagtcttgaaaccactaaacacttaggaaaatgcaaatgtggaatttagatcttaaccccctgaaaacattagtgatttttaaaattcacttatagtttcttcattcttgaaatttcagaataatgttgatgtttagccaagttcaatttaattttataattaacctttttcatatgtgacttttttggttaatagtgtagtcgatttttaaaaatgtaaaatatacacaagacctctgcaaatgaaattgcattccatgtgactatttaagaaatcatagactttcagagtttaatggaatatagagccaatattaaatatatttaccaataatttcttttagatggtggaggccaaagttttagttatcaatcagatattaaggttccaatattattaatcagcaagtattacttcatttatttcactttctaaaacaattttgtttgaagtttatagaaccttatttctattgttttcactagtttttgaagcaacatataagatgttatcatgggaaaatcttcacctaacattagcacatcaagttttctttttgataagaaggaagttgaaatgtctttggctggagtatttttcatttttcaaaacttttattggagtacaatgagtcttattctgtcgcccaagtgggagtgcagtggtgcgatctcggctcactgcaacctctgacttccgggttcaagtcattctcctgcctcagcctccccagtgggtgggattacagtgcatgccaccacgcccaattaattttttgtatatttggtagagatgggtttttgccatgttggtcaagctggtctccaactcctgacctcaagtgatccacctgcctcggcctcccaaagtgctgggattacaggcgtgagccactgcaccaggccataatcagtatttcatgttgaagaccatgtcaacattaaaatgagcttaatgaccactaatatattttgggaatttccatttttggttaaggctatggtctgtaactccatatatgagattaaatttgtgctttatggaaaaatgaagattcacctaaatctatgattctagaatatgcattcctaggtttagctaagtctttttgattgttatagcatttcataattttctgacaccctattggagggcaatatggactcatgtttattactaactttataatgtttttctcttcttaatcctctttttacatcttttaagtctcaattcacacccttcacagtttagtagacttccctggcctatcgcactctttcttggtttcatcttcccagcttagaagacctgtgtcttctgcatggattcatccagagttcttacctcccttgggtctgtggttgccctttgcttgattctttccacctctatgtgtcttttcttacatgtgtcaacttatgccacatgatgtttttctaacctgcccatattatgactttaagtgtcagatactactatatatatgcatatttttttcttgacaaataattgttggcctataaaactagcatcttgcttggctatctcaaagtatgactgtgcaaaaactctgagatcattttctgggtctttcacatcataatatagcttgtcatctaagtgaaatttgggtttccctccccccagtgaatagtaacataattttttgtgaatgcaagtgcattttccacaaagaagttcatttgtcctctttctattaatactaagagcatcatggcgctttttaatgataatcattgacattttttaaatgtctgaagtttaggataatccagaaatggttctaaggatctgtgatagactcctcaagaaattctccaccaactcatttggtagagtcccgggaccatcagagaggagataaagcttctcttcctccttctccacctacttccttacccttgggactttgctggggccctggggtattagttaaggcatgtagatggcctgcaaggtaaagaagcactctgatattatctgtaagcccagaacattctctgggtaatgttttttctagagacgttatagcactgtagtcctaggaagccctcagtatttgaatttttccacctgaagaaatatttttttggtctttacttgtttcttgactctaagacagctccttatgcatgttagaacatctttccaaatcccatggtgattcaatcttcaagcagtttttgtatgaacctagtcatacaagtattcaagcatcattttccctcccagtaccatgattcctctgtgagttgtattgtgttaagaagatagttattctctcctttgtaacagattccaccagatcacctggttgaaagtaaaccttagatttccagggtcttcgctgaattctgtctttatgaatggggatcatattgacaacttgtcttttctggtttgcttaatttgttactggtaggtcatatgtcttggcttactgttcaacatttaacccttacgttttttcataattttcgtatagatgttatagcatcttaggtatttatctgtgtcaaatataacaatgcatttttggcaatttgatccagtattttggacacacataatttaatatgtagtttaggtgttgaaatcgtcaaaagaatacattaaaagagaaaagaactaactattcttttagtattaccccaataatacaattttatatttaggatttctttggattccggaattggtttccttcctctgtttgacatttttaagggtcttcttattgttggctttgaagttacttgtttcacaatctttttcacaaatatagtttcacaaagatagtttcacaaatctttttctggtctaatttccagttatgtctgatgtgtcaaattttagaggcttccctttcttccttgacttgggaaaatttgatttagatgcttgtttcttcctatgaaggcagcttttactgtaatagtttgctgtgaaagcattttttaatgcatctggcttgtttttatgattcatgacaaaaaattcatcttgggcttctaatgatgtattttaaaatagtctccagacgtcccgtggttcattttattttaaactatttctttttacttcttttttaataatggccagattttcctaagttccctttactaaaattaaattattttatatggcattccttttttcttgccaaatgctaggcttaatcattttgaatactgtgtagacagaagtgggcacccatgatacaaccttcatcaattcctgctcaagtctgcctagactcggaaaatccaattttggcaaactgatgtctgtaatcatctgtattcttgtactccaatgtgcattctgtatgtctatgatgggattacaatataaattcaccttatttatactttatccaatgttttcactttctttcttgttatacactatttagataattttgcttaaatagtgtccctgtagcccatagaataagtaaggttcatattttttagtttaacaaccaatgcctttcataatttgatccctaattattctatcttcattcacttcccactgaactttttcttttcttttgcagtacaattcttactaaatggtaaaatttcacaactgtaccttctcccagatctttctggaatacctttcccatttccttcattgttcatccgatcaatgtatgaagatatcatcattctaatcaagatgttagttgtaggtgccttttcagttaaattgcatgtaaccttcctaaatccttggtccttgccttcaatgtaattctactgtcttgctctttatgagtccagatgtgagagtcattacctcactcatgtacatggcaaactccactcatgtcaagtttttggaaatttaataatttaactgaagatttttggttctaaagaaggatcacagtattaaggactatctatctattttctcctttttttccttttcagaaaataataattatgccttatctcatatacttttgtagcctggtttcacctattatatgggtcttcccctatactctaagtagcttagaaaagtatgtatttttctttaaaatatggtacttgcccaataaaaatccttctgaataagatcttcttcagctcattaattggccatagtttttaaagagcccagaatgatctaggcaatataatagacactgattatatagcaagaaaattgcaggtcaggtttttgtgttcataaagttttagtgtgtgatccaaatagcaatacataattgtaaattagatattcaatagatatttggggttatgcaagtgaatattttatattttaagcttagttgtattattttagggaattatagtatatttgcattactgtattttactatttaaataggaaattcagtgaacgctgccttgaatccatgtaaaaaataaacaagaagaaagagatggtcaagaaatgtatcattcttaattcctgacgtgtgcaatttttcacattactttactcatttaagtaaaatttctattggagtatagttcccatgtcatgtttctaaccctttctaagtgcaagaatccttctgtgttctcacatcccgcttactcagagtctgaagtaagaaagtttttatacaaacatggaaacactcatggcttctactgtttcatacatataggaattaagaaagtattttgcaatgctctgaaggcaattctggttgtagactaggtcagctcgggcttccatgaggttctaaactctaagaagggctagttcagaaaggatcattggaacaagaggaaaattgcatgctaatgtattccaggagatgatgaaatctctcatcttattaatttggcagtgttgagttcctcttctgtagaatgtaatttcctttctaaaagatatgaagcatctgttcccactcagaaccaaatggagaattcttcatctacattagcaagtcaggcctgcttagtgccccaactgtgcttactgctcaggatgttctactcacgctgactggttagtgcatctggtgtttcacattatttgttggaattataagcacttatcatcttcccagttcattaggattaaaaaactctgataaaagtatatatataaaatatatgtattttttaattcaagaagatggcaaatggattttttcagtcttgaaaaatatataaatataatatatacatataacatatatatgtatgtatgcacatatatttttgtttgttctcactcattcagcattgtatgggtacaacaaggatactgcaacctacagtgtccttatgaagctaacatacatgactatacaaacacagaccagttctctaattcaaaatttacagtaaataagcactgattgtttttctcccctctcctttgagaagattcttgctcagaaacaaaacttgtactctcctaactaggtaaaactaagcaaatacccaactatgtacttgtttactgaaactgtgtgtcaaactgtaccttttttttctctttcatctgtctgtcttttgagtttttgaattgttcagaaaattcttaagtacttttatgttcactgttttcagaggcccaagagtcttgcatcacagcaacatggtttcttgcagggaagaatgtgtttgaatgtccacaccccttgccataaccatctggtttgcagatgataaatacaaacactacgttgtttcttttttttcctcctctaaagatctgggaaacagattgaacttaaaattctaccctggcgatctcaatatattaatcttcattaccatgtctagttctttaagaattccagttctgcagctatatattttttaaagactgaacacataatacgtatgatataccacttgtaggatttttttatgttattataatgtcttcatttcttcctacagtctagtaatatcttactcctttttcaaagtccagtttaagacctgtttcccctgtgaagtcttttctagttattctaacctccacacgtctctctttcattgtttggaagacttcacaccaaagcaaggtatatatttgtttaaaagtttcatgcatgggcttagctccctaatcagagtatgagttgtttaataacagattgttcatatgttttgtaatcatagtataatggacacaatggatatttagaacctagttgtcgaattaatacttcattaatgccatcaaagaagcctcattctaatagaggatatgagagagactttattaggatgggattaagttaggcagaaaattttacagtgggaaatattgacctcagttacagggttagagtaggcctttatacaccttttgtctgaaataacattagaaacagaaatggaaaacagtgccacctctgggtgacttctgtctgaaatagaaaacagtgccacctccaggtgaccctaggcaagtggacaggagcaaaataaaaggcattccttcttccagtagatacagccccaagctagggttcatagtatgacaaggagagcttggattgaatgtcatttcccactggccccctcagttggagtctttgtgaagtgtacaaactgcaaacaatatacaacagccctccaaacagtgatatagataatgcaggcaagtcaaggcggcttggtggcttatgaagtagctgacactgcatactctgtgtggcatgaagctagaggctaagcacctagaaatttatttgttacacattaggagagagatcgaacaatcatggctgatgtggaaaatatttacttaagaatgtagatttttcattggtatataaaaataatatttaagagaatgaatagcccagagaatagtcaagtaggtcaaaaagcagttgatgagatttgtaaggtgtgaacaataaccagagtgaaaaaaaaaatgacacaattctgaaggtgaggacaaagttgttattgggccagagtgcgactgagggcaattgctgaggtttgagaaaggtgacacaattgaagggccatttaagaagaagtttcgatagctatgtttaagatagattgcagggtaatcatagtataaagaaatctgaaggatgtctgtcctattgaaagcagaatgaacaggaattaattaaggtaaaatatggagagaattttttggttgaccttatataagagtgggcataagataataagcatttaaattatattctttagtggacattcattaatataatgataatcattactttgaggctaccatttattgagtgcttaataagtgcattcaattattaagtctatgtatagtacatttgtataaataatgttagattttagtctaacaaaacacataaatattggtaaatgatatgcacagatataaaaaatttataattatggtgagctagttggctgcagtatggaaaatataatctatggtatacatatatcataaatgttaagcatttattttagaaataaaaaaacaaggattttcaagggaagtatagatgtttaaatatacctagttcgaagagtaatcttgttttgcactaaaatgtattttattattaaaaacattttgtttaaaattattgtcaatcataacatgaaaacatatagattaaactttaaatattttggaataatctgtatccattccaatgataacttatcaagtctatacaatgttaacatttacatataatagggaaaaatctagttcttgattatatcagatttatattatctctcaccataggcataggaaattccagaaaagaatttgacattatttataaaattactatccataaaacatcttaaatatttttccttagtttgatgaagctcaacctttagtctttcatccttgacatacatttcgttatcaaatcatgcaagcaaaatatgcagaattggatttcttcaagtgaaaaagagatggcttcactattaaactctataaactccttgatcctattaaaaggacggtttgcttaattttttaggtcagaatacaccttaagaatctagaagaaatttaacagtgcatttcgctattttgaaatagcattagtaaatttcaagaattcgggggaagttgggaaatgagcgtgctaactttaaaacttgcattaactacgtgacccatgtgactatatgaacttattttacattttttggtaagaggaaatctttaaccggagccataaataaattatcccagtcagataattgtatatattaatatatactcagcatagtctttggttacagtaatagaaagaatgcatctgcaaagataaggctctgaaaactgacttttcactgcctgtgaaatcatttcgcccctgtgaaccccaatccctttatatgtaataaggcaaaataggcaaataatttctaccttgaatagtcgtgagcatttatcagataacatctgaaaactgccttgtataaagtaaacactagatggtatttattattattattaatggtaaccttacgcatattaattcaccaatgtttttaactggtctactgcacactatatttccagctaacttccaagtcggcttccttaccagaccatggggaatcctcagctcatattgcccagccccatctctgcctgtcaaagtcctgcttcatttcccagaatacctcactgaaagcacatctctattaaaaggaatacatctggctattttatagttccttttaataaaagaatgctgattttatcattgaagtatttttaaatcttaagtgggcaaggtgaaaattttagtatattttagaataaaatatttgaatctaggttaattaacaagtaatatctgtgtggtgcttaatagtttaaaatgcttttttcatgtaatttatccatttcacttgcaataagaattattaaaactaatttttaatttggaagaactgagccttagaaaaatatattacttactcaagttctctctatggtaattactagagctatgtcttctgatactagaaactatttttcttagtatacattaagcctctacaatgagaaataagatttaataaaaagaaggggaggggatacagataataacctaaaagggaaatagtaaggaaatgtaaagctgtaactatagctttgtacattttgaataaagatcaacttccctattctctttcttcctttctatatatatatgtgcatatacatacatagatttttctgtatttttattataagctttgttgaagcacagtggtgtctctttgtttaaatttctggtctataaacatatctttgttttataatataatgccaaatgtgcctccaggtttaaaatgtattaatattcagaagagtcctctaatctgcttaagacaagataaagggaaaaaggcaatgtagaatcagagggctgtgttcttcattgaggccctgggcatgttttttctgtttacaattgctggaaaatattagttttattttctgccctatatggtatcgtatcatgtatgtacatatgttaaagtgtgattattttggtataaatacatattttacactttgattcttatttttattcttgatgtttataactggagaattatagaaatgctaaccaattgtattttggacatgatttaacatctggtcacttttttatttttttatttttttgagatagagtctctctgtgtcgcccagactggagtgcagcggcgccatcttggctcactgcaacctctgtctcctggattcaagtgattcttctgcctcagcctcctgagcagctgggactacaggtgcgcgccaccatgcccagctaatttttgtatttttagtagagacggggtgccaccatattggccaggctagtctcgaattcctgacctcgtgatctgcctgccttggcttcccaaagtgttggggttacaggcgtgagccactgcacccagccaacatctggtcacttttaaaatatactttctaattttagaagttttaaatttacaaaataattgtaccgatagtacaaagggttctcaaataatctagacccaattttccctcttcttaacatcttacattcacaacgaataagccaatattgatattttactattaactagagtcatactttagttagattttcttagtttttgtctaatgacctctttctgttccaggatccctcacaggatcccatattacatttagttgcatgtctccttaggctccttttggctatgacagtttccagacattccttgttttttaggattttgacgatttttcaggagtactggcctgatattttgtaccatgtccctcaattaggatgtgtatgatttttgttttcatgattagactggagttctgggtgttgggaggaggtaaagtgccattctcaactatcaacatgaattattattactgatattaaactttaataattaattaatttatttatttttgagagggagtttcactcttgttgcccaggctggagtgcaatggcgtgatctcagctccctgcaaactctgcctcctgggttcaagtgattctcctgcctcggcctcccaaagtgctgggattacagacgtgagccaccgcgccaagcctggtgttaaatttgatcacctgtctggggtggtatttgtcctgtgtcttcactgtaaatttgctgtttcctcccttttccattctgtaccctttggaaggaagccactatgtacatacagttcttacttaaggagtggagacttactcttcaacttttaaagggtggggtagctacataaatcatttgcaattctgcataggagatttgtcctattctattttatattttgtatgtatttacatcggtatggactcatagatatttattttacatttttggtgatatttgaatgctactttgcttattttatttgtcaaactgtttcagttttggccactggaaagtctttcagttgtattctgtgtccctttgatatatccccatcatgtgggcttttttgtgtgtatgtacttttttactttcggttactataagatgttctaggttcgttttgtatatttattggcccagtcctagaatcagctgtttattcaaagagctcttgttccttatattggagaatgctatcagaaaccacaatctgggacctaggtgtgttcattgctacttgggagttgttgcttctgtgttctgtcagctgacagagcaaggaaatatatatgtgtgtactaatagttgtatatacaaatatctatatatatttcaattaagcatgtatgagttaatatttggaagcagagacagtagaatcgcctgagaagaaatctgagcatttcttctcagatttttcctatatgtgatatataaacagaagcaaatcaagacatattaataagtaagataagggtagagctagacagaggctggaaataataccttaaaaatataccgggccgggtgcattggctcacacctgtaatcccagcactttgggaggccgaggagggtggatcacaaggtcaggagttcgagatcagcctggccaacatggtgcaaccctgtctctactaaaaaatacaaaaattagctgggcattgtggcatgcacctgtaatcccagctactcaggaggctgaggcaggagaattgcttgaacctgggaggcagaggttgcagtgagccgacatcatgccactgcactccagcctgggtgactgagcaagactccattttatatatgtatatcctaaacctggagtcctcaactggattaggcccacacagatattttcctgggctcaaacagtgctttgaaaaactattagaattacatcattaacatcaaacaattgagagatgtcaaacacaaatattgatttctatcttctctttaaaatttgccaggtctgagaaatcctaggcacacatcatttatgcacccatcaccttgtgctgaatggtggttcaagccttcatgagtattgcacaagccccagttcaacagcccatctacccatcccccgcccccaactcactgtcttctgcacagttagaagctagctcaggttctagtccatgtgctgctgttttttctattgtagaggagaaaggaaaatatttcctggatccatggctaacaaattaataagataagaaaaagcattttcctctaagtgaaaagtatcattttttgtttaatacacaatgtgtgactacatcaaaagaatattacttaaaatttcagtacaaaatcaacccagctcaccaaatttggatttctctaatcctgtgttcttcaatagtgatcagaacataagtcttccttcttgctacttgtacaaaatgacttcatcaagtaacatgagccaatacagaatttggatttaggcgtggccttgatatatatgttattattagatttcaaaacttcagaagacatctctcatgtaagagtaggacttcattttctgtgataattttatacctcttgtcatttcctataaaagaccaatgataattcactcaagatccataaatcacattctattgctatatttaatgtattatgtttgtgtttttgcttgaagagattggtccagttagttttattcagaataaacacgaacgaagaaaacatttgttaactgtagattaataattgtaattatagaacctataatatagatttctactacactaaagagatggaatttagattcagcattttatttgacatttggcttctatttttcaaaatgatgaatattatcagacaataaaaagtttgggccatcagcagttaaaatgaaaataaagttcagattgtaagtagctgaaagtgaagcaagtttatagcttgccatgttttactaactgaaccaaactaaatatatttggcaagacaatgtacttgtggcaagaaaatggaaaaaagcagtgtgattacttgaataaggttgaatttaggtctaattccaagtattaaaaataaatgtaagataaaatataataactattataaaatataacattaaaaagtatagaaagatcaggtttggaaatttgactatctcttttccccactctccatatcattgtattattgttagcatcataaaatttcatagtgtttatgtctgtctgtgtaaacatacaaacacaagatttctccattgttatacatgtatgatatttttatatacatatatatttataaaaaagaaaaaatatacagatgccaaatgtgagtgtatatataactacctcctagttaacctgtgtaaccacacctgtgtaaaagaaaatatctatatcctcaatacacacatatgaagcttttacatatatataagtatatacatatataagcatatatataaatatgtatttatatacatgtaaatttgtactcaggtatttttgtgtacatagcagtaaggttttcattagaagatgctgattagctcactggaaactttctggtttgcagaataatatgttgtctttttatacacaaattaatttcctatgaacatgtgtagcatagattagcattaaaaattaatctgataaatacaaggtgacttaactattaagtttctgcactttcagtgctgagaaaacagagctttagtcaggcctagctcagtaagtcccatcccactcgcaatcattttattctaacacctccctgaacatagcccatccagggaataaatgtgactggtggacctctttctctgctgatcctccttactgatgaaaggtttacacctgcaataacactctcttgtttcaaatccagggcctatcacttatgagggatgggagttgctgtgagctactgttggttgcctcatgggaatgatactgtttattgaggattaagtgagatcaagaatataaaacagttaggacaatatatagcacatattaagtattcaatgaatgtaagcttctattgctgcctctcctattaccactattatagctactaccaatttaaacaaaatccttttaaactgaatgatcttttaatatctcttataaaatatgtgttctttttcattaatctggagatttcctaaatgtgtagatataagcatagtgtttgcaactacttgaagccaaaacaattgaaagacattagcctacggattatgaatgataaactgccatgtggagtattatcttttgttcttcagttcactgtttgtaaccaatatttatgacacagagaagtaggatttgtcagaaatcattgcagtacttcattttcaagcttaggcagtatttcttttaccagatatgtactctgcagattcatagagcgttcaaagcccatgtgttactcttaataactcacaactgactgtgtggcaatattttctcataaaatatctccattataaattatgtattacttaaatatccaggttaggaagaaaaaagttgctaatagggttgaggtaatagtccagtaatccatgagcatctgtggtaggttctgtttttataatttggttgttttgaattagaatgtatatggttttaaattaagccagtcattttttattatttgactacagccatgatgtaagctgaaatggaaaataggaatagaaagataacaagaagaaaagttgtgacttgaattgaagatttattacatatgttatatgtagtccagccaacccaacgttatgagctggagatatgaatactatccttaaaggcaagataacttttcaaaactttaaaattaatgccttgtataacttctcagtctgtactaatttcatgtggttaataaggcatgcagaagctaatgttgttactaatgaaaaattaattgggattagaagaaatttcattttctaaataataaaaactgattgtccaccctattttcctgattttagccaagcttaagagatgtatgtgcaactcttttgaatggcatttatgacataacttgtttcattttcctgaaatttgcccttggtttgttgtttgctgaccctcaaattccaggaaggcattttcatgtaggatttttttattctatgagttcatcaattttgaatttgctttatgcaaaactgttgacaatgatgtactttctaaaatttatttctgagatggagtctcactctatttcccaggctggagtgcagtggcgcaatcttgactcactgcaacctccgccatccgagttcaagcgattctcctacctcagcctcccgagtagctgggattacaggcacgtgccaccacacctggctaatttttgtatttttagtggagacggggtttcgccatttggctaggctggtctggaactcctgacctcaggtgatccacctgccttggcctcccaaagtgctgggattacaggtgtgagccaccacatccagctgataatgatgtactttaaaaatagagtctagcaaattgccaaaaggttatatttatattgccaactaccttagaggaattttcaggcttagattataactaactctgtaaaggccagctggctggtgagaatgcataaggttctgcatgactggctttaatacagaatggagggcaagtataccaataactctcagagtgggatgaagaggatgacagatctaacaacctgtattgattccaaagaaatcaatcagcatatcatttttagtatttttttcttttttgttggtgaaagaagagctttcataaagggtcaagcaattctgtatggctgtgtcctccctggactgcatggtcattttcaagcagagggtgtggcagcgatttcatgtatgtcttcccaatccttcactcagaaataaacacctgaaggaaaactaaaatagtcattcagagcaggatatggtgctttaaaaatctttttcttgtgtgaaacataacttctgaactcctctgattctgtcattaacacttggttggtgaagtggtctctctagcttctttttctagcttcccctctgtcgtaaggatggacccttctcaatttacattaggcccagagtaatgaacacctaactggcttgctgcatggaatctttccctgctgcctgacgctcttagttcattccgttgtctcagaagattcagtcttcctttttccatttcgcagctcaacaaaggaaaagacttcatgccatccctatcactatcaaccaagtaaatgcaatgctgttagttgatgttcaagatgtctgattaaaggcagccaacaccctctggcatgtattccacaagaagttctttctttcataaagaagttgaataggctgggtgtggtggctcacgcttgtaatcccagcacttgttggggggccgcggtgggtggattacgcagtcaagagatcgagatcatcctggccaacatggtgaaaccccgtctctactaaaaatacaaaaaattagccaggcgtggtggcaggtggtgtagtcccagctactcgagaggctgaggcaggagaatcacttgaacccgggaggtggaggttgcagcgagccgagattgcgccactgcattccagcctgccgacagagcaagactcggtctcaaaaaaaaaaaaaaaaaaaaaaaaagtcgtacttgggcagtagtgtagagattggtttgcctgttaatgaattcaaactaatctctacactgctgcccaagagcattctatattcaacttctttatctctgagaaattgcttatatctccccaactgttatttccagaacactcagccagggaacactcaattaatattgttttattaattttttttttgagatggagtcttgctctgttatccaggctggagtgcagtggtgcgatctcagctcgctgcaatctctgcctcctggattcaagcgattctcctgcctcagcctcccgagtagctgggacaacaggtgtgcactaccacacccagataatttttgtatttttagtagagacggggtttcaccatgttggccaggctggtctcaaactcctgaccttgagtgatccacccacctcggctttccaaagtgctgggattacaggcgtaagctactgaacccagcctgttttattaattttgacaataaatgagatgaattgttaaaaactacattgaatgcatctttttttcttatacattgtgatttggttatttgaatttcactcattgtttttcaatactattcttcttttccaaagatattaaagatacttgacttaaataaaagtacattcaaattattataaagttaagatagtttttacttaatatctgcagccaggactaataagtctatgcagctcccttaaatacacaaagttcatttcctctgttttaacagaaattaaaagaaaaacgtaaaatcaggtttgtaacctttccaaaaacaagttcccttttttcttctctgattttctgaagttgtctgtaccaaaatgatactgttatttaggaatgttgatgtggtaggaaacttctacttatgtctctaaaaaccagaccatgattacgtatcataaaaatagatgcaaaacgtggctattctggccacttgaggtcagagaactttgccatgactatgtttaattacatgtccatacaactcaatgacttattttttcaaagaacagacattttaatacaagacaatcaaaatatgaacctcagtggatgaattaatagataccttataatcaaaatctgtcagcctctgaattaacccaaagttcagtattcacattttatcaattatattacatagaattgccttgtttgaaatatttaggtattcttatgagaaatacataattactaatttacacgtataatttctttttctcctctaatttgttttaacaagtatgagaggtaaatttagctaaaaattatgtatatggatgaagaaattctcttagaggaactctaaaactaattgaatcatacttgatatatttgttcttttcaacaattcagttttttaatgcatatttcattagggtaccatcaatgtgttttcctgaagcctaattacacaaaaaattatcacatattttccctccttcgggtccagacagagctgttattgagctccaggcctagttgctgtttttgctcaaagagattttcaatgtccaatggcatctcaaagtaaaccttggaccctaaattttttgtccaataacatatcctgattgtctgtggtctcttaagactatctaattcattaagacatttttttcacccaagaaattaaacaaatgttaaattttctcagcgaatttcatattttcgtgaaatttttacaatggcttgagcagtttaagaagaaaaaaacctttttgatgctttgcattttatttgctgggaaattacctaggcaaagaaacttattgttccattttatgaactttacaattcacttagctgtcaaagttatttccggtaacccaagaaagaacttgataccactttttatgatgacaggacttaaagatgacatttattccaataagaatcgtcatttgaaaatactatgttatttccctcaggtctctgctcaaattctactttatttgtgagcttgtccctgattattcaaaattaagctcagtccccgctctcctctcaattcacttttctcctggagctctttgtctttaccttgctgaatttttggtaacacttcttgctactagacatattgtatggttagtaagtataatatttgcttatttcctgtttctttccactagagtataagctctttaaggactaaatcttttctgtctgttaacacttatatttctaacattgatatggtgcctaagatatagaaggtagtcaataatgtgttgaataaataaaaataaatatattaagcatttgtgatgtgacttgggctttataaactaaatttttcacaggcacttgtgtaaaaggtaggtttgtagactggtttatactctaatatttcatttgtaaaatggaatggaaacttatctgtgtagaagagatactagatgctagctagatctgtttgaaatcttttcagagccaaggtggctatttaaatatggtggcaatactctgattttatttcctcatttcccttttagttcatgtggctacagtgaagacccactatgtcctagatcccttgctaggtgtaaggggtacagctatgaacaacacatagataccctgcttcagtggagagtagcctagctattaaagcaaaaattaggaataaatatgatgagtgtctttacaagtaaatgcccttttaaattgagcacatattaggtgctcaaaaatcattgttaaataaatcagtaaataaatttgtaaagaggctgtatatcaaaactcaaatcctgacacttacttctagaagtctatttcatagactcacctcttaaaatatctcagtgactaaaaggatttggagtaaatagtctaaaagcatactcataggttctaaccacaaaatacttccatcttcccacaaattactaaaggaaggaaaattctcatgtgaaattagacaagactgtttctttcagaaataaaagtattcaggaatgtgtttgtccgttgccctatcaccacaatccagggcagtgtctggcatggagaagacagaaaacgcatttttgttgaatcaaactgaaggaatataaggagggaaaaagattttagttctatggccaaaaagatttctagaatatcacaatacagacatttttagctaactattaatttatttcatcttcctttgcttcaaggtcacatatgctcatataatttataactgctgcaggcagaaccattaagagagcacaatttcaaacaagtgtaagccacatgagggcataaactttatattacggtaaacctcccaccacacagtctttaatgtagctgcataatatgtgtatttggtaaatggctgaattataatccaacctcttcccctaaatcttaacatggatgaagtttaaatggatgtatgatacagataagttgctcttcaattcctaatttgaaaatgatttcctaaatcatacactataacttgtcccttttgaaatcaaataggtgatttacaaaagtaaatgtcacctagtacctagtagcttttgcacgtaaaagagagattttaaaagatgagaaaaaaggaaatttgacataaaattattattttatttacaccattttctcttcatttctgaataattcaaggaatgtcccagaatcatctctcaaaatagaagcttgaaaaatcctcattgaaaaatcagttttcaaacattttacatatttcatattgaaaaacatggattttcagatttctttagcaaatcatttatgggctgggccccttttagtgaaatgtaaggagtttttcctgccaatttataaaagcatagaaaaacaggctgaagacacagctgacagcctttcggctttagtatcgctagccatctgttttctataaggtagttgttttttcttgttaagttccccgtgtgaaatgtttttctttttttttttatttttggtttgtgaattctacccagtgataaaactcaccaggggaccataaaggcacaaatggaatctgggagaactttgagacttcttatattcacaccagaatctcactttactaatctaaatcagagacttttttccatggagatttgttaccgaaataccagagtcctaattgattaaagcaattttaattcaagagggtttttgccttacaacagatgattattgagagagatttcaggtttatgatagttttcggtgataaactttcctaaggacgcaagtgccccatttagcttttctctgttattataaggaagaagcagaagatatagtcttctctaacagctggacgtaaggaaggaaaggtgcctaattgggaatgatcattctaaagaacaacagttttcttgttgcacatcattggaatgcttattgtgaggacgatagtaattatttctgaatctggcatcaaaatactagagatgcttctaaaaaatacaagtttccagtttcaaaacaaaatcagagtcactagaagtagggcctaggaatcagtattttaaaaaattctctgagcgattctgatgcaaagccaggtttgaggagcaccaacttaaaagaaaatcaaggctgaaattaaaaagaaaaaaacaaaaaacaacaaactcttcaatatgagggatacacagcatttaaaatcacaaactacatataatttttatgaaactgattttggataaaatatttgaattacagaagagctgaaagatcataaatatatggttacaaaaataacctgaagctttggatggcttggaaagataattactgggatttgcctcccaattctgcaagcaaaataccacctactttttacaaacataactagcaaggtatgtatgggttatattggcagaagtcacaaaacatacttcaatggcttaaaatgcctcttgtcaaggtgccttataattagcttcaaaagccttccagctgtgattccattaaatacaggtgtattgctgtgggcagctacatcaggtactgtggcattaataggctcaactaattgctgcagtggatttgtgcagtattatatgcttactcagaaaaatttatcttgccctctttcctacacttaccatttctgttcttgaaatctgagtgcacttctgttttatgaccttatttatatagacagacttgacctcagggcgttttgtggaagaagcagcactccttcactgtgatcatagccttatataaatggatttttgtcaatataatgtagatttttctctcctgctgcatcctactccagattctgataggccctataaggaggagacaggtgagcatgactctacatttgatacacatgtaaatggatttgaatcaggcaagagaaatctgggaacctctgtgctaaataataatggtttgtgtctaaataacacatacttatttttcaaagcactctcacatctatttgattctcagaacaaccttgggaagggggtatattatccctattttttaggtgaaaatacatgacaatcaaagaaattgtaatttgtcaagtgttacatagcaagtagttttcagtgttggtgtgaaaaagtaaaataaataaaaaagcctaggttttctgaactactcaatttccattcctcctgcatcgttttgcctcttaagggtttccagtgagtagattaagagccaaaatacatctgaaaggctattagttagagctgcaaatttgctttctcttcctccatttcttctcattcttttgatttgggttggcaaaatcctactcactctgaagatgaagccaaagaaagaagactgaaggccatcagaaatctgtggtccagacacctgatgctgccattttttccaaccctgtccctttttaaccactcaattttgctttccttttttttgtctcttctctttccctgccttttaactgtattgaattacaaatcgtttctggataaattctacttctttctcaattctcagttcatacatcacttccacaagaaaaggtatcccaatccccctacaatggctaagcaatgcttgtacacactccctaagcactctgaatttatttctgtaagttgcttatcgttttgcactttagttccttggttatctgattgtcttcctaattaggatatagctacttggagttagagggatttcttttgttttgttcagttttggcacctaaagaagaaatggcacataataggtactcagtatttgttgggtggaaaactattgtctctgctcatggccttagcattccatgcagtgcagtatttctgtggatatttctttggagacccaagtctgtttcctcaccctgccaagactacttcaaatcccctacatggcacactggactgcatatatttcatttactaaatgtggccatttttgttatgctgttattagtcccttggtttggaatgcattttattattataatgctacctctgtaggggaaattaaatttgacttacatgctttactaaaaagcctaatttattcttcctgagttttagaagccaaagagctgatttcctctttcctcttaagaaattctgcagaatgttccacttgatgtgctctaagtgccttgtcacttttcttgaaattcattcttgtttagcactatgaaaagaaataaaaaaacttatttttaataactttaagaaaaagaaataatttcttttggtaataaacactagatattaacattttaaaataaaaatattactttgggtttaatcacaacttaaagaaattttccataaactcttctcattacacaaaatattaccattggaaagaatccacatatactgacttttaggtaatatgcattttgctactttatcatattggtttttttctttactaacatttctaatatttaaatcttaagatgaacaagctgaatgattgttaagtgaaattaatctctaataaatttaagtataacatagttcctgtgtaaaaatcaatttttaaatttctgaaaactttagaacacatatagtggagtttgtaatttatcatatgtaggctggtataaagtagtataaagtcatggctgggagagggttattgttgcagatttcatattcctgtaagttttgactaaactcttcacctatccgtctatagttaaaggaatccaaagcctggatcccataagaaataagcaactttctcttaattttatgagatgaggaagaatcatgttgaatacagttgtctctcaaacaatatgggggttatgggcgccaataacctgtgcagttgaaaatccacatacaactttcaacttcccccaaaattaactactaatagcctactgttgactggaaaccttacctgtaacataaacagatgattaacatgtattttatatgttgtttgtgttatatactgtattcttacaataaatgaagctagaaaaaggaagatgttcttaagaaaatcatatggaagggaaaatatatttatgatttattaagtggatgtggatcatcataaatgtagtcattcttattatcttcattttgagtaggctgaaaaggaggagaaagagaaggggtttgtctaggggtggcagaggtgggaggaaatccccttataagtggacccatgcagttcaaacctgtgttgctcaagattcaactgtatgtgaatactgctgtatgtgcaatttggtgtggatatgcagaataattttgtctatgccttagaattcctaattcccagggaagtcattggtaaatgcagctggacataaaataatgcctctaaatctacttaactgttttatttaccaattcagatactgtgaatggccttattcccttatggttgaacctctacaacatcagagaagtttctattggtggatacataccttgagtttctttttgtatctagcacatcttgtcatctcatttgataatatggtccagtcatgaaaagtttggttgagttcataataaatcccatagttctttatacttgatatttagcccgtaaaattccattaaataatttttagtcattgctattccattaacactataagaatatccagattcactcagttatctgccattaaatcagtatgcaaatggatcatacttagaattttttattagatcatatgcttttattgctataaaacaaagtgagcaattacatttatttcattatttgcttttatttctaatccttattgccagttgaatctattgtgactaacctgaccgttactaaacaggaaaaaaattgaagttataagttggtcctggtaggaagattccattttcaaatctatagcaaagattaaattaaaaaaaaaaaaaagaaaacacagttaagaactttttaaaatactagttcagacttcagaaaaatgaaagaaaatgaaaacatgaatgtaatgtaatttaaaaagcagaagttgatagttttctttaaattgcattttataatgttgaattttattgaatttttcctcagtgacttttttatcatcccctgtttagtttaagtgaaatagcaagcatggtgcattctgtttgctgaacggagtcatgtttatataatgcaagctgaatattctggggaaaaatttcatttcctgcgccctataaactaatctaaacagaactaaataatagttggtatgcaatcatttactatccctactcattaaaatacctgaaagacttattcatgtcatggagatagtctttcccccatcaatatcctgtgaggcctcagaaaagctagggggaatttcaccggatattagcatggtaacatttggtggctacacaggcggaacaccaggaaatgaaatttcctccatttagagttgggaaatgaatagaaagaatggggttcgcaatcttagtatattttaattgcttcttgttctcacacattttcttttaaaacacccttcttaatcgcttccttttctcatctctaaggtaaaccatgctttacctgttttttctttaacccaggcttctattgctcttcattcttcacaggagctctatttgtcacttttccactctcttagtcaaaatccacatttagagtgtgacttaagacttttgtacatgtaaatgtgccatccccttatcttttctctaacatagcaatctggttgtctaacacaatgtataatagttatgggcgtatattttttttaaatattggctctgccactcactagctttgtgatcatgattgaccccaagcctctaccaggatggttgttaggactatgtggaaaatttttatcactcacttaacataacttttagaacacaattaatagctgccattaatatttctactgggttattcttccttaagattcactccaacatgccttaaatagagtttaggatttttaaaataaaatttgtttatctctccaaaacttttatttcattcgatgtctagaccatacacctgtgttactttcctaggggtgcttgataacaaagtaccacaaactgggtggcttatgacaacagaaatgagtgtctgagtctctgtatctattcccctcttccctccttataaggacaccagtcatattggattaagggcccatcatattccagtatgacctcatcttaactaattaggtcatcttcaatgaccttatttacaaataatgtcacattctgaagtacagaggattaggaattcagtatatcttttagcagggcacaatttaacccaaagtacccagtagatatttcttcctccattcatttctgagactctgaaattatctttaaaaatttttaggcctggcgcagtggctcatgcctgtaatcccagcactttgggaggccgaggtgggtggatcacttgaggtcagcagtttgagaccagcctgaccaacgtggtgaaaccttgtctctactaaaaatacaaaattagcttggcgtgatggcacatgcctgtaatcccagctactcgggaggttgaggtgggagaatcacttgaacccaggaggcgaaggttgcggtgagccaagattgtgccattgcactccagcctgggcaacaagagcaaaactccatctcaaaaaaaaaaaattaaatactttatcccacccaaacttcatcaaacccttcgtattttctacctagtgtctcgtggctttacctctgttctcataactactgtttctcctaactccagtataacattttccactagtggcctttggtctcatttatttctgatttatctttaattaggtagttacgttaatattcctgaaagcttcttatacattcttttatttattaccttttttcatttattcagcaagcatttcatgtatcaggcactttaatacactcatgatatagagagaaattaaatatttttcattctcaagaaatgtacagcccagtagagtttacatgcaaacaaaccaataagtgtaatagaatgttgcaggtatttgccaggtgtacggataaggtgagatgagagcaagagaagagaatgaccaaattccatgtgggcatgtcgttaaaactttcctagtggaagaggtatcacatgtaccaagtattctcatcacctcctttttttgataaattaaaccatcccctcctgaagctatgtatatgacatgttttcctccctctctattcctgttttaggtggttccctgcctctttcccaggcagagttttccttacccccaccacctcaaataccttctattttttcaaggcctgcttaagaacccacttctactcaccctttctcagataatttcagcttatagtgataccatcttttcagatttcttatttgtaattctcaaacctcgtatcttatataaactatttgctacctcaactaattgtggtcattgaagaaacaactggatagaagatactttacattttgaatgttcttagtaaatatttgttaaaagagtgactttataaactttcctctaagctcctctggagtagcttgtgtatctttaacttttgtatctttcttccatggtatatagtcaggcatacagtaagtagactcaataaatacttaagtaatctatgaaaatgagtataagtggatgtgctaagtataagtaaaataaacttttagtatgggtatttaatatcttacttcacagtgttttctaaattacaaaagtcagcttctttcaaactagacattatactatttttttgacttcctaaaatgtcaaaacacaataatccagaattctgtatctacaattgaagaaagactgtggaattggacctagaaaaatgctttttttttttttttttttttttgagacggagtctcactctgtcacccaggctggagtgcagtggtgcaatttcggctcactgcaagctctgcctcccaggttcatgccattctcctgaaaaatgcttttatagtttgtcccagtgtggctagagtgagttagtcatcggcaacaaatggttcctgccatgttgctgtgcaccactgtcttggcttctggactgctggcccgcaccaccgcaagagccccacccctcctccaaggcaccttcccatggacataccagttggtttagaaacaagagtgctgttgttttaccctcagtcaaaggaagagatggtaaagaaattaaaatcagagtcatggttgagagggagtacctggtctccttcagatccatcctggccagttggtagagagaaggaatctgttgccaattaccaggaaggagccaggagtaacaatattatacaccttggaaatgaatttttggaaaaaactgctttggattttaattttctcacttgaaaaaaaagcaacccccaaaacaataaattaaagaaaggaaataaggaagttaaagaactcaaatcccagatttcttttgacttctctgacctccagcctagatgatatgcccttcctacatgttcccacaacaaccaagatttgcctataattttgtatttaaagaattatgttctaataatctgttactgcactggttctctcagtagtctgtaaactccgtaaaggtagagaggaattcattactttaactgtattcccagtgcttggcaaaataacagataaatatttgttgaataaataaacaatattatcaaaatgcatacattatgttattttgatgtttgcttcaagaataagtgtatttattttatgatttaaacacattcttaatgccaaaggtgttggaagactaaaacatacagggaggactgaaactcacacagaggatctctaaactgtggccttagccattattatggctggtatattctgagggatcattgaatgatttgcatttatgggtttccactttctctctgctatgtatccagactgtcttggtgtctaagggtttaaaatatgtttcattatcaaataggacaccaaaggagaatcaatagatgatatactcataagtgaatgtaatgttattctgtattctgttcacccttactaatttgaagtttgcttttataaacagaattttatatttccataatgattgaagattgtttttgttttggattctaggaaatcctcaggttgatgttccccagacttagttgtagttaatgaaaataaacagcattagacaaaacctctcaaaacacagaggaagatttccaagataaggaccaataattcaaaaggccccaggatacatataggttagagaaatgaaaaaatagaatgagtttatgaagtttcagtgtgtatgtaatttttccagaatgcactagtgaaatacacatatgagcaaaatcattctacaaaaaattcattatcttttgcagcttctgtatattttggttgtttttggcaaggaagttgaactccaaatgtctcattctctgatccaaagttttcttttgtactaaacaagtatttaataaaattgttattatatttgctagataaataactatcgattaaatggattaactaatgcctctattcctttttccagattgacaaatttaggatgagctttcaaacacactttaaagcaaacttctttatgacatctttaaatatttcttatctgcaaaagtaaaggctcatgttttatctttttctatatgttaacaagtagaaaaactgaggcacacttttcatttattaatttagtaataaccagttgactagtaaacaacttagttaatcttttgtccaaactaaattttatactccttagtttaggaaatgttatatatttttctcctctgatctcagcatgtgctaatgactgtattagcaagaaataagtattctgtagttacttggaattaagcaaatttttgaaagattttagaaactttaaatctttccacaggtatttaaagaaaatgacaagagtattgttttcctttatagatattttattcgtagtcaccatgtttaaataaattaaaatgtgaattatacaataatgataaaattcagaatttaaaaaactgaatgaataacattaagtaataatctaaaacttttgaaattctaataaagtttgcccatgtttacttgttaaggaaaatagcaacttctccttagaagcacatggatttgtaggtgaaaaatctccgattcattctttgtattttccctaataggataaagaagtatcttcaggttaattctgttgttttctaaagaaacttgtaaaacctccttcttgatgtagtaaagttacatggaaagaagatgattgtctcatcctccttcctctacccctctccctccttcctctcttcatcctccttgtctgtttgcttttcttgtcttttgttctccctacaagtagagaaattacccaatgaagagctttgctgtgcatctaaaaagttattgatataactttccaataaaggcaacaactctttttctcataccaagtatgactatggcatttggctggttttgagattcagagcatattgagttttgatcttaaacatgcaataaataaattggcttccatgcaattatgcacattataagggataaactaaatatgaagattaagagatgaatttaggttctgaaataacaattacagttttttttttaaagattctattacctgttctggaagtgacttggaaaggaatgccagaaagaagagtaaaatctagttttagttttgttcttcagcaaaatcacttacttttttaatagctagaaaatagatgtaaattaaatctgtgtaaagcagaacaaaactgaatactaattcaagtcactagatatttccaagaggataaaattagaaattggcctttgggatgacagcactagtctcctttcacccatgcctccagaactgagctccagagggaataatgcagaaagaggcatccctttaaattcctattagaaattttcttcaaaatattttagaatccttggtactgaaatgaatgggatcaaagagccattgagaactgtggaatgtttggtggattgtaaaagaaatttcaacttgctcaaggcaagggcagagaataaagaatgaattggaagaaataagctgactacaatgtctggattttctctagaggccctaaatattcttctgtatcagggaaaattgaaaaaggaggcaaaatgcagctgcaaagacataataaaatacagagttaaattgattctaaaatgttttatgtaaaatatttaattttatactcattgagtatacaataatgaatattctcttaaaatacaataataattattttcaattacaaaaatgagtaaaaatatatgttctttttaggatataatgtcaggaataaatgataatacatcatattcctataattcatggtattttaaagctttgtaggtttggcccacatttaaataagcagctaaaatggcgcttctctaaaaatcaggtaatagcccagggttgaagcatatcattttgtattcaatatggcctagatctcttacttggtattcttaacaattgactttagatataaaaatccctttttatatacaaaagaatattatgaaatgactttaccatataaagcttcttaagcaaacaactaatattcaataaattaattcaacaaatacttcttgagcatttactatgatcctgacactattctaggatatcagaatatatcaacaaaggaagcaaaataaattatatgtgttctcacagagctataattctatcatggggtgacaaacaataaacataataaattcaatatatagtaggcttgaaagtggtaactactacattaaaagaaaaaaaaaaaagagtaagaattagtgaattgagagtgttatggttgtatgtgtgtgtagtcatgtgcaatttttttggtaaggtgaccagagtaggtaacatttgagctaagaccagaaggagatgaaggaaatctggaatgtggatactatatattactgaatatttacttctcctttgaaagagaaacagttaagcagatttttgtctctcctgttgatctcaagcaatattaggctaggagagattaagtagacatcattcagaacacttacaaatgtttcatgtatttaggtaggcagacacatttggcatagctctgtaccaaacttattcactgaggattaatatttaagattagaactaaggttggctataaaaattactgctgaaatttctagtgtatagattatagagttggctcaattctctttgtgctgttttgcagctatttagtagtttgaggtatgtgggaaaaaaaatctatgtcaaatgcattagcagactgaaatctgctcttccagacagaactgtagatgagcattgcatgtgcagtatgtgtagttttagtttcacgttttggccacagtcatttagatttcccaatgatacatggaaaaaaacttaagtatacctaatatgagagtttttcctttctattttttccattttaagtaaagtaaaaacagcagttttactagttaactgaaaaactttgcttatgagattggaaaacatttaatggttgcactgaagaaaccaaccaccttcacagacagtttatcaaattttttaaattcatatgctcactgaaatgcattgaaatgaagctttctatgagtcatctccttttcaatttttcagatttcaaggaaaattttcaaaattgtcattatattgctttagaatataaaacatgattgtccttagtggaacaaaaatttaactcagctcaaataattattgaatgcctactcttgttcagttggtacaaggaaaaaaggagcagggcacagaaaaagtaataatttggataactatcctaaaaccagatttaagcttgcggggctcactagaaagtaaaagtctttgcagtggattgaagaacagaagatgtaaaaccccataggcctaccccatacatacttatcctcccaccatcccatagatcttgaggctgagatagaaaaaaattgtcaaagtatgtaatagatccccctcaggtatccctggtggcttcatatgtatctaacttttcaaatttgggagttgtttaaggaaagcaaaatgaggaatgtggaatttttggcatctcctctgcatggtctaaagaaggaattgaatgctgtccctcttcgtctttcccttctaatgataaacagtgccctagagcagaaggaagggaaggatttccttggtaggttctctggaaccccatccaggagcccacgctctgctgtgcattactaaaggcagcatctgtggcatccagactgacacgtgggcggctttattacctcctcctttgtcccacaaggcattctctctccacttcatgaggccaccagctgacagtgtcatgattatagtccctcaaggacctttacagtcagagaaactttaagtaatggtagcccagatcttcacaatcccaaaagggacctaaatctgctgggtcaggaaggctgaagggttgctgtagctttctgaaggttgttctaaaatatgaactgttgtgactgacacagtcttcttcctttctggtcacacagaggcctgaatgtcagggacacacctggtaagaaccaccaagtgaccattccctttcattcaaaaaagggttcctaagagcacatcctctctggaaagattagggaaggaggaaagagagctaaaagtgcttatctttttaataggcatatcaatgaactagttccttactttcctcattcacatctgcattcatcaatgctacacatacgtttatcaaagacggattatataacattaaatgtgaaggttgctgaggtaaacacagttctggctgtcgaggagctcacagtctcacagctcacaggggaaaatgatcagcacaaacctgtgtctgaataagagatttaaaatttttataacacgtgtgtgctgtgtattatttctgcttgaaagaactttagttaatggctagagaatatctaacataattttagggacttttatttcatatatttttcaaagcctgtaagtagactccaataatttaatatgcaaatacagtcgtctctcttggccagtccaaggtttcaatatggccgtttctatgcaggctttttttttttcccccacaggtgtaattgtgtgaaaaaatgtggatgcagggcataccatatagttggcaagctgcaattgtgataatttagtttctaattgttataataagatggtggatttggtctgccatctagtgattaagaactgaattcttacaactaaatttaaaagcacttaagatttatgagaagagaaatctatgaggatatatgagaaacagaaaaattgagttgatttcaaataaaatgtgatcagataaaatatatctcttttctgtaatatatcagtgccacaattgttgtgggaatgacttcacaatggattcaatttattggaacatttggtgagggtaaaagaatcttgtaggttgggagataaacatgaaaattacaaaatagtgatggtattatcagatttctaccagtcctaatcaattttaggaaagttaaacataaacagcaaaaaatacaagtaatgcaaaattatagttttggcgttcttttttagattatataaaaatatttatctaatttttaaatttaaattttatttttattttaagttccagggtttatgtggaggatgtgcaggtttgttacataggtaaacgtgtgccattgtggtttgctgcacccatcagcccatcacctaggtattaagcccagcatgcattaactatttttttctaatttttactaatgctctccctcccgcaaccccaccctactccctgaccggccccaatatccaggtattttaagaaacattttttttttttttttttaagtcctgggccttgaatctaagctttggacgtcagcttgggttaattttatgatttggatagagaaatcaggaggacagaattgaatttctcagaatgtcatttgaaaatttttgttattttatactgtgttgtcatttataaaataattctattatgacaactttactgcaatatttttcaacaaattggctgcaattttgctttctattttacttttcttttcgtttaagtaaatgtctgtgtagaaaacagaagggacaacttaatcatatggtgtacaactaccatgtagatccgtgaaaactgcaagacaccctgtattttctacccactgtttctttgtacatgtctttcattcagacatggacaatgagagttcactgagtttttgagccctctgtgatgtgtatggattcttgtctgagtgaagagaagacaaggtttaacagtgaatgtggtttttcgtctccttgctatttaaaagcattccaactaactttccacatcatcttaaatttaattataaattctcaggagaagggaagccatgatgactcagagtataaaactaacctttaacattatcatttaaagaaagtaatccagtggcccacttctttgccccttgagttgaagttatgttgtcttaaactttcagaaagaaactgctcttctaggtgttaacacaagactgagacaatgtgtctttttattccaaccctaaaggagccacaaggaagaagataagctactccttgaagagttcctcacatattttaatatttaattgacatcattacgtgtcatcttgtttttgtttttcatattctctgcttccaaatatctaattatcccatcagcatatatatccttatatataatatatatccaataataacatattttgttataataattcattttataaatcttcaggggataacttatcctgttctctatggctccttcaagatttatacaataaacaaacatatattatataattaaaattatataataagttaattatattcatctattatataacaaatatagcactccacaatgttatatatataaaacatacatatattgttatatgtgtaacatatataatatatataatactccacaataatatatattttgaggacagaaaggaacacatatgcttccttcttgtcttttctttttgtgagtccaggtctcactctgttgctcaagatggagtgcagtagcatagcgttcccatagctcactgcagcctagaactcctgagctaaaatcatcctcctacctcaccttcggagtagctggagctacaggcacaagccactgtgcctggctaactttaaaatttttgcagagatagtatctcactatattgcccaggctggtcttgaactcttggcctcaagcaatcctcccaccttggcctcccaacatgctgggattgtaggtgtgagccactacacccagccacatatgctttcaatattttgcacaattagtactaggcacatatgcacttaactcccagcacccccacccaagagtgtgtaatgagagaaacaagctaattgaagtagtatctcattttcaggtaatagcatttaacatttgtaagtggatatttccttctcaatcataaaacttaatgagcaaaattacccttaagttatctacttaatggaattgttcagtgaactatagacataagcccatttttatacaggttgtgtctttggaaatgttattcatggaattacactgtgttaaagtgatatttcatctaaaagtcacactgtttatttgatgaatacatttctcattttttcaaaataatcttccagaaaagcatattaaaacataatttctattttccccttggttttaaatgactataatagcactatggacatagagctaatactgttttgttgattagatatgtattatgtgatacaagtcttttaatgaagataaaacagattagaaacttgtgtcctcatcttataaaacagcacacaaaccattaggatatagtagtgttactctctgaaagcaattttccgtttgccaaatatctgtgatgaaagactaaatacataaagcaaaatattccacaggacagtgagaaaaatgtttttattccagctttattaaggtataattgacaaataataattatataaagcagatttttgtattaatatctgtattgtaaactaaaataattttcatatgtagctttgcattatcatttgaatatatttatatgccaaatgataatatctttcataaactgattacaactacattaaaacatctttttatgaagtacaaagttcatgctgtgcaattaaactagtttaccgtagtttagattcattcattatatccatccagtagacaaatatttattaaatggctgttctatgaaaggtatagcatcaagctatacaatgaggaggccgggcacagtggttcacggctgtaatcccagcactttgggaggctgaggtgggtggatcacttgaggtcaggagaccagcctggcaaacacggcgaaaccccgtctccactaaaacaaaaattcgctgggcatggtggcaggtgccagtaatcccagctacttgggaggctgaggcaggagaattgcttgaacccaggaagcggaggttgcaatgagctgagatcgcaccattggactcctgcctgggcgacaagaacaaaactccattttaaaaaagaaaaaaaaaaaagaaaagaaatacagtgatgaacaagacgcctagtccttactttcatctagtttttctctagtgagggagataaactaaacaaaaataaaaaattaatactcattctaataaacttcctgagggcagtgatttttgcctatttgttcacattttagtatctcttcaattacctagcatataatacacaatgaatgaatgaataaatgaatgaatggctgagtgaatgagttctttgaaaaggtctctgaaaaatatcagttgggtaaaggaagtctaatttttgcagggtagtcagaaaagaatttcgcggggagatgacattgaagtaagtaatgatagatagccatgtgggcctgggatgaaggaaggagaggtagtgctgggcaaaagtggtcaagttgtgcaagaaatgggaaagaaggtctttagcctttataaggaagttttgaatttaagtagttgggaagttcttgatgtatttaagcaaggatgatttgatccacattatgttttaaaattctgtagtatttcttataaaatcacaaagttaatgatgtaatatatgtgtttacttgttagtaaatgtataatagaactgctcttgagcaatatgtgtacacacacacacacatatatatgtgtgtgtattttcccaaactttcttaaattgtaatgtaaatgtagaaaagcactagacaaatatatattaactcactgtattattttggctatggttttccttaattaattttgatgcaaacataattcactcattatctgcataagttttgcatttctgccacagttgagtaaacaccatcaatttagtatatcaaatagaattctactccatgaaatgggacatggttatacttttttactgtacatttaaaaataattttaataaaaacatacacctttttcttttttgaagtttttttctatggtacatgaaaacatactgtctcctgttgtggaatttactaaagtttccagtgagttgcaagtcataatagggttcaccaaacattcaaattttatattctcctttgagctattcattttctccccattttcagatggttctcttttatccctctttattgatattctcatgtttcatcattcataccttcaagaataaaatcttgaaggaagcattatctggttaaaaaatatacctccattgtatcacttttatttcttcccctatcatgcaaggatacattatcattatttcatggtgaattacatattattttgttatgaaatgaaatcagttcatctgtgtttggctccttggaaggttacttcttagtccagaattttttagaatccacaagatggctcaccttttattttctcaattctataatttcagattactaacctcttctttcttttcttattttagaaggatatggtgaagaaatagcctgcactcagaatggccagatgtacttaaacagggacatttggaaacctgccccttgtcagatctgtgtctgtgacaatggagccattctctgtgacaagatagaatgccaggatgtgctggactgtgccgaccctgtaacgccccctggggaatgctgtcctgtctgttcacaaacacctggaggtggcaataccaattttggtaagaatgtttagggccaactcataattgatccagttactcacctttatagttgcagtgtttttcactttcagcattcagcaactcaagagaataattaagcagcttttttggtggcttttggggttaatgattaatgattttgctcactcacttcatctaaagttagatagaagcagacagtaatttcctgtcttcttaaatatctgaagcatttggggctgaattttggtggttatgtctaatctgagaatttcttgaatcacttaagatgatcatttgttaccatatgcatgatgagtgcctccaagttatttttcagtttccctttaagtccattaatgcctgagagaagatctagaaaacacatttatctacaatgatgccaactttgtcctagtgaatggaatacttattcctaatgtaattcagtgccacagcaccctgtattacattggctcttaaatgcagaatgcttttcatgttggctaggtaaagaatgaaatagatttccaggagaaaaaataatataaagtaaaacttttaaaacttctttgaagaaaaagtttctgtgtttaacagatattatgtatttcagtatgagtacatattttaaagatacatgttagggaaacaagtttatatttataggtttcaataaacaaggtaagagcaatattaaaccttcaggttatttgtgttagcagtcatgagacttctaattcatcattgtcaagacaatatcaaggctttatttttttttcaaaatttcattgcaaataacagcaaatacaataaaggtttcaacagtatgtatatggaaatagatagcaacttaccttttctctgcttcttgaacagaaacaatgtgccttgggtaaatacctacactcacttttcagtaatgtaataagaaatatataaaagaaagaattaaaaccaagacatataagagctacccaaagcaaatacaatcatcaaaacagcccaggaataaagtaaaattaaatccgtggggataagtgaatagcaaatgggaacaatggtggcaaatatcagaaaacacaccaaaatatacagtctccttcaaatagttggtctaggagctggcaattgcattatgcacagatgccataagataaaaagtggttgagttcagctaaatttacgagataacacaccagaaaatatattgctatagaccatgtgaaaattctgacctatcattttaccgtgaaccaaaaaaaaaaaaaaacttaataaagtaattctctttaagaaagaaggctataaagcagaaataagtaatggtcagaaaagaaatagaaggaaaatcaaatcatcacaaagaaatgaagatgaaatatgagggatcataaggagagttgatatcacacaaaataaagcaagggccatgagaataggaaaataatgaattacaatttttaaagagttaaaaaataatagatgtagaaggcaagcaagggataaccctgaagatgggcacccaaagaaaaaattaatacaattgagtagaacaaataacaatataatacaagaaaaattttatgaagtaaaactttaatgtcaatattgaaatggcaaccacatgtctgaaaaattgacctaaaagagttaacagagacatatgtaacttaatgaagtcattaaactttaaagataaataaatacttctttagaatgtcaaagaataagaacagattatttctcaagggaaaagttgttaagactggtcacaaatttctccacagtatccagtgtcagaagacagtggagcaatatatacatatttcttaaggagataatatggttaattaaagttaaatataaatccattctctccttcaaatataaaagctacagtaaaagcatttctgtggggttattgtttctataaatttctcagggaaactaccatcggctaaatgcaaggcaaccaagagttaattgaagaaactgtcaaagaacttatgtgagcatttattatatttaaatctagaaaaagactaaaacaaaagtgtaacttagggtgacagatgggattgtaaatattatagcttctgacaatgcagaaataattataaaacatatataatgaaagggggaggcaaaagaaagtatgaactagagtgagtttggtaattcctcatctttaaaggtgaaagtcagataatatcattcaaacctgacaaatcacatgaacaaagtagtggcacatttaacactacaaaaataaatgctaaaaagaacatttccttgttaaaatggaatgctagaagaaaacctgagcggcatgtaagaaaaaagaaacactgtcaattttatcattgctcattttagtggaactaatagaaactgtctaaacaaatacagatctatgagtaatgtaaaagaatgttaacataatttagcagaatatggaatataattgatagaactaatatataaatctttttaaacataagaagttctaacacaccaaacaaagatacttgaaaacacagtgaaacattttatttttaaaattttaacaaaaaatcatagttctatgcttatataaataaaaagaaagaataaaagtatgtgcatttagcatctttctcaaaaagttaaaaagaatcaacaaaataaactgaaagtaagtggaagaaaaaaattgtaaagataaaaacagaagttgaaaagtgagaaaactgaaatatagtagaaataatatgtaaatccaaaacatggtcccataaaaacccaaccaaaagatctaacctaaagcaaaaaatgataaagaaaaaattacctaatgaaagtaaaacaacatgaaagaatcattaagaggtccctttattcaactgtatcttcataaatttgaaaactaatatgaataattttctaagacaatgtaatttactaagactagctctggtagaaacagaaaatcttagaacatggattttcttagaagaaacagagaaatttgcaaagcagctagattcccaaagcagcaagtccaggtgttttcacagttgtgtcaaacaactaaaaggtcttaaaaagaaatcagatggttttaatgcttttaaatcctcttcttgaacattgaaagagacagcaaactttcaaagttttactatgaaggaagtatattatttacagcaaaagtaataacaatgacacacacaaaaaactatgaactgatctcataaattttttttacaattctaaataaaatattaagtctattagcatattaagagagtaattattcatgaaaaagtggcgattattccacaagtgcaaaataattgactattaaggaagctattaataaaaataattatcttaacagatctatgaagagaaagtatatgaattctttcataattaaagtaaaagtatttgacaatgatcagtaaatacttttgataaagacagttactaacttggtaataaatgatactaacataatacaatatttacatctcaacttaaaagtttcattatgcttaatactaaaagcatccctactaaacacaaagatagactgagtatccattatcaccattaccatttaacagtactgaatgtgcctgaataaataatttgacattaaaaaaagaaatcagaggtttcaaaactctaaaaagaggagcaaaaactatccatttgcagaaaatacaattgtatgcttacaaacctattaaattgagtaaaaataaaactacaaaaaataaaagaatttagtaagacatgagagtgcaaaattaacaagcagaaattaataggtttactatgtataaacaattacatcatagaagaaataataggaataaaaattcctcatttgtaatagcaacagacacttaaggataacttaacacaaaatgtatgagatctgatgaaaattttttaatactgctaattcaaactaagtatttaaaagactgaatgtcctattatgttcttggttagaaagactaaacattacactcacataaattctccataagttaattagtgattttaacatgatctcaatataaacatagcacactttctttgagaattcaacatattgcaagttaaaattttcatagactacacaagaaagaataatcaggcaaatccttaagaataagagcaattaaggatgactagccctacaagattttaaaaaggattcattagtttaaaaaatgtgatgtagatacatgaataaaataaaatcttgaagtagatccaaatatacatggtcagattgaatacaataaagatggcatcgtagcagtggagaaaagaagaattatttcataaaccttgttggaatggctaggcaatcatctggaaaaaaatgaagttgaataataaaaatatattctacactagcacaaattataaataaagcagtgatttaaatgagaaaaattaaatcataatgatttcaaagataacataggataatttctttatagtcttctaaaatatatgactttatgaattctgactcaaagcccagaaggcataaaaatgtacaaaaataataaacatttgtgtgacacaaaaaatgagcaaagtagaaatgtttgcaactcaattcacaaagaattaatattctttacatataaagaaatactagatataaataattaaaatatcaataacctaataaaaatataggcaagggaaattagctaatcattcgaacaaggaaatacaaatgatttttcaatatatgacaaaactgtcaaattttctcataataaaatatgtgaatgaaaactatactgagctatcatgttttacctatcagattggccaaaattaaaatgtttgatagcatactgggtatcactgcatattgcctgtggggaaatgtgtccattatttgtggagtgtaaagtggtataatttctatgaaaggatattggtagtatctatcaagttaccaatgcctatacctttaactcaaaaaggatattggggaatttatcttacaaatatacttgcatgtagcgtatacgtaacaattactcattacaatattatttttaatagccagcatgaccttcattctagcttgcctaggaaaaccccaaattacatcaattttcttggcataataaacaataactttcactttcattcttaaaagtgtcctggttagatgataaagtacatcctagtgataacaaaagattagaaacaatccaaatgtccctaatgggtaaaggtcaaaattagttaaatagattgtgttagattaatacagtggaatcttataaaaaaattaagaaaaacaataaagaaactatatactgatgagcaaagatctgtaagatttaatgaactatgtgatatacagacaagtgaagaacagtatggaaaaagtagaaaaatgagtctgtaataattttcttaaatattccaaactaaacttgagaacaacatacgagaaaccaataatagtggcctcctgtgggggtgggggtaaagtggaaatagggaacacaggaccagatggaatgacattttttagtgtataattgtatacttttaatacatttttgcttttgaaccatatgaataaacagccttgctcataaaattataaaaagcaaaaatggagaatattgatgaaagataattcattatagctttaatagctaatttaataatttaatgaactttaaatgtcatataaatgttgtgaagaatattaatatcatgttagaattttccaaaaagatgcattttttgccttttatggaagtattgatccaaaaccttttgaattctgcttactgctgatagtgtaatcactatcactgtaattctgactccagaagaaatctattattgaaagtaaatatttagcagattctcaataattgtttcctcataaaataacacatttactcttttctttttacaggtagaggaagaaaggtaagtgttactttgcatattttctttttcataagcagacttatatccaatactatccacacagaactgtgctctgaaacgtttgaaagcttttgaaaagtacaaagtaccatacaaatacattgtgacaagtatataagcacagttcagctactgtgtttccaaaggacagatgcctcttaaccattcactttatggttaatttctgtttgtatatctgtttctgccagaaagttgtgacatctttagggattgaaaatgtctgattaaccttttattctttgcatttgtcattgcatagtacatactttgcacatattagaagtacaatacacatttgatggaagaaagaaaagataggaggaagggaaggaggaaggaagaaagtgagggaggaaggaaggaaggaacgaagaatgtcaatttgacttcaatgggcctgtagcccctctctcattggttgggaagtaaagatccagaattaattgaacattttaccaaacagacatttcttcccctcctctcccctccttcaccttcagagagcttaaaatctaattctggacacaagctttacacttgaaaacagggtaggctgcatccatgacccgagtatagctggtcagcttggtcacttgccatcaataaggtaatcctacgaagcgaagatagttctttttgcccaagagtgctctctgttttttggttatcttgaaaattatggcatttacttcagttgtatccaaatgagatgggcacagggatcaaggcagtagaaactgttgctggtcccaatttccataaattttctttacttttgcacacagtggaactttaataaaatgatttatcagataacagataaagcaatgctacacattcatgataagtaagagtgatgctatcaaggggagatcctggccagttttacacattttgattcagagggcaatatcataaatttgtctcatttggaataaattagatatgaatatatgtcaaaggagaagggctgcaaatgctatttcacatttaatttattgtgaaaacgaaaataaattgaaacttagcagattggtataggccttgaacaaacttgacagataggtgaaagatagatggatggatgcatggatgcatggatagacagatagagagacagaccaatctatgaaacaacaaaaaatcctaacaatgagtactgccatgaaataatcattttaattcagttagcagttacccgacttagagagataactggtaggctgtgtcatttgctgcctttctccaaaagtagtgtgggagagctgggtgaagaatatactcaaagcagctgccaatgtagcagactgtggttatgtgccactatcttcatgacttgttttcatttgtcatcaggtatcatcagaaacacaagagcaaagcaatgttataaaaatgcaatttgttcttcgtttatatccactttgatatttacttacaactcattgaccgattgattcattcattaattcatgttaactccaacataattactgaaccttttttatatggctatgaggcaaatggtatagatgatgcaaatgtgagaaaaacactataactgcttccatggtaatgacattctacaaagcatgtccacatggtattaaatgataagtaattgtaatgcacatctggatctgagtacatgaactttatgtttctcagtggatatgaaaattaaatttagtaaaactttagacagaccattattccatacaaattaacttattcaaagcctatattaatacaaacaatagaaacaaatatttacatttgtggcttatatccaaaataagaaatctatagaatcattagggaatttattattagaaacttataattgaacacttaaccccttttaaatattgtgcagcaacagaacagtcatatatcaaaaagcctacaatttaggtaagacaggtatcagagagttctattcccctacatataaagcaagtataaagtgcattttgcttgtaggtctcttaggatggaaatttcacaactattcttagcaggctgttccatttttctcattctgactgaaacaatttgtcctctctttttatttgttcttctagtcttcctctagaaggagcattgtttcagcatcataaagtcctttgtttattgcacaaaaatttatgtaccctttctaaacaattcaaattctttcagcattttgaaaaatatcttttattatagctcttacatggttaaattttattatttttgtattttttaaaatagaaagactctagaagttagtggatgtgaacatgcagaaataagcctattttactttgaagcccatatatgttgattctttcttgtcctaggctttgtgtaggttggctattagtccctagtgtttcaatcttgaacttaccctatagaactgcctcctgcttctggagagccctttccttcttttggattctcaatttattccttacttccagagtattcgctgcttcaacattagaatcagcaactgtgactgagttattattagttccgcccttaagtccatcatttcacttcatgaagttttgtcaggatagtattggaaggatataagtagattgtatctttagtagtacaatttggtgatatgggttaaaaacttaaaatgtctttagtccacaaatttaacttctaaaaacatatcataaggtattaatcagagataccatggacacatttataaacaaagatattcattttaatgtcattcttaaacttaaaaatgaaaacaaaatttaagagtaagataatgaggcattgattagatactcaaagtgcatgtagatggtggaaaactaagaatgccagcatattaacagtggttatctccggggtgttgagtaggatatttagggttttttaaaaaatatttcttctattttcaaaatttcctgctatgaacacatagtatttttataatcagattaaaggataatatatatgaaaggagaaataaaataaactagaactcattcttcttgtgtttttctacattttagagatgttaaattcatattcatcctacacaattgcccagtaaaaagcattatttcttaatatattaatggaaagtaatacattttaaaaattcattgaatgcttccatttgctatgctgagcatgtgaagtagactaagacacaaccatgactttgaggagaccaaaatctgttcgaagacaaattttgaaatgaagaatacaaattagtaaatgattaagtagaaatagataaagctacaattcatccaatattatttaatctatgtacctgatatcatgcaatgaggattccatttctgagaaaagttctaagaaacaaaataaattctatctacatctattacatttgctatatctattataaaagcaattatattgacctgaccctatttacttacatgatagtttcttatgttgtttttgattttcttagtcaattgattttttttcctagattttcttcaggtattgagaatcatctgagtggaattattatttttttctttctttttattaaagatgagcacatgtactcatttttaatgcccttccatgagtactaaaaaagggtgctagtagttcaggaatggcatctgattagatcctgaaaactatgtgtcatatgataaaagtgtgaaaatttgtatatattaatttatattaatttttatgtattacaatttctggctctttttgtgttttcagtctttcagtagtttttcctctggtgctttgtctttacatctttttgttgcaactattttgtgctctagtcaactctttggatttgatctatgtggaaactgaagcaaaatagctttacatatttcacacgctggatttttttatgtctttcaggtgagcagtaatattttaatgagtaatatctgactaaatatcctaaaaattgttaactttctttttgtagttttttgcatttcttacatagaaattccctgtgtttacatggcatattctagggtgacatgtttttgcccagcaagccattatattgtgctaattgaatttttgaattgtttttaatgtcacagggacaaaagggagaaccaggattagtgcctgttgtaagtatatgtataatcattgtttccttgtaccttaaataaacttagcttatagtataattgtatattattgcttatgtacatactttcaaaaataaattagttattttaaaaacaagtttttagtataacacaagcaaaccagaacagattagttatttaatacaatatttgatattctgtgttcctgacttttatagtcccatgactaaaggtagaaagtcattgttttaaaaagttaaatatattacatgtggatatacactgatagttaatattagtactagttagtatagtagtttattattccacacttctggaaatacatcatgccctgatcctgagcaaaattccctgttgcataagaattcctaagacttctttaaacttgtaaatggatcaagaagtatgttactaaacaggattaaagctcttcaactgtcgttctgtcaggtttcattattttttatttttatttttttgaaacagagtctcgctctgttacccaggctggagtgcagtggcacaatctcagttcactgcaacctccacctcccagattcaagtgattcttgtgcctcagcctcccgagcagctgggactacaggcaagagccaccatgcctggctaaattttgtatttttagtaaagacggggtttcaccagtttggccgggctggtcttcaactcctgacctcaagtgatccacccaccttggcctcattctcctaagttttaaaggtgttatcatcagtctgtcaagacaaaaagaatatgcatgttgatttatttagcagtgtttacattctctatttgcctttaattggcttgtttttttaacgaagattacctaaaacttaaataattcatattgttttatttaattttaaaaagcatttatgtgtgcttactatgtcttaggtgttaagtgctttacaaatacaaatatttatttatttgtcttcataactctatgagggaggtaattacctaatcatcactaccattttacatttaagtttccacttaagatccttaagaacagagaggataagtaattagtccaaagtcacacatctggtaaagggtagtgtcgggatttgaacccaggccccttggctccagtgttggtgctctttatcattacgccagcactgcctccctatattagttaaaactagataatatcttaaatcttaaggagaggaggaaatggtcatcaattgacaacatccatttgttaaaaaaattactgtggtttttgttgttattcttatttgttactattgacctctctgaatatctgcagaaactttacctttacaaattttcttgtttattgtttaggtaacaggcatacgtggtcgtccaggaccggcagtaagtagtttctcccaatattcttggtactcttgtattccttgagatactgaaaatctttacagatattatatccatgagaagataaaagaattaaacaatgatacttggtctcttaaaacattttgtcttaaaccatcttcaagttagacattgctttgcagcaatgaatggtagataagggatcattttattctgaaactgaagaaacattatgttagtcttgctattggttatgtaaaagacaaaacactttattgttacatttgttaattttagtgtgactttgttcactgaaattagggcatacttgtgtgttgtttgactatgattaatggtaggctagttttatctgcttaataaaattatatattgcagtagaatttgagaaatcatacagcaggagagcatatttatggcttagtataaaagattaattttttcaagtttggattatcagcagtattcataacatatacacacacttcatgtaaatgttaaacacatcaaatcagcttaaaatactaagttagctttaatggactcactctggttcttctgaagccctcacttttaaacgatgctatatgttgggttgagtaaatacacaatataatcttcataactcagtttaaatcctcttttaaagagaaacaaagtccccctggcaacagccatttcccagggggggaaaaacattttaagatatcagcacaataacaccacttttgaaatataatagtcatttgttatttaagggaaaagtaactgtaattaagatttggaaatttctaagtgggttttaaacatacaagggaagtaatgcaatattctaagtaaagtaaaaagaaaagatgcttgagtgtacataaagcagtactgtagtaggctaagaggctttcctttccattgcttttatcagcaacttgaacagtgatgaacattttggggtatcatgtaccaatttgatttcatacagtccctggaataattgataatttgtattttgcacatttatgtaattttcaaaatcagaattgtaagtttttgtgctcagagtttagtggcaaaggctttacctgggagaagacagcaaatatgatccttaaaaatttgcaattactagtcaagctaatctatttagctcactatgctccatgatgccataatgtgcacctagttcttcataggtctttaaatgtcactgataacataaacaacgcttctaagcgtacagaacttttatatgcacatggctttattctctatagtcttcaactgaactgaattaagtgtggtatttctgttttccaattttcttttatcaagtagacttttaaaaattcaataagaaagtatacatttttgcatgcataatcatcattttctgttttagggacctccaggatcacagggaccaagaggagagcgagggccaaaaggaagacctgtaagttgacaggagggctccttgtggggaacgtacagccagtcagtttacactgtgttctctgaatgcagcaagaagctgggagcactattcctctttcacctccattaaattttacaaaaatacaataataattgtatattatcttattagataacacaaatgatatttccttgtcccttatgaggtcaaatcaaaataaagtagaacttaaggaagcatagttaacatgtcatgagtttcactcatgagtaagcaatgccaagaatgcactgttgagataaaacatccaagttatatgatctgtggttgccacaggaataaccaagctggatacgggaaaaaattgttagaggataaaattttctttcaagtggttgcacaacaagtttatttcccaggtagcactccgcctttttcactcagcagccactgcagagatagcaaaggagtagttttaaaaatcagcaatcccattactagacaagtgaaatacctttacaataaaatagtgacctcaatatctttgagataaaacatgaggatattatataatatataccaaaggttttcttttattacctatctgcacagaatacatattgttctcaagtgttagagttacaactttttttttctttttttttttttttttgagacggagtctcgctctgtcacccaggctggagtgcagtggtgtgatctcggctcactgcaagctccgcctccctggttcacgccattctcctgcctcagcctcccgagtagctgggactacagttgcccgccaccatgcccagctaattttttgtattttttagtagagacgagttttcaccgtgttagccaggatgtgatccgcccgcctcggcctccctacaacgttttttcttatgtatcacttctaaaatctaatgtctttcatatactaaataactgtattcatttgtatattgctcccattatcccatgtttcaattagaaaattttgtttgtactgtttaattttttctctaatgtatctattaaaactctcagtagatttttatccttttaaatatatatttatccatatttaaatgggaggattagaagataagcaaacagcagacaagtttgaatatataaatgaggataaaatatattttagatcatatgcctaggaactcttgccactagtttcattcttgttactacattatccttctactcatttcacctcatatatagtgtgatgtcagtactttttcttaaacggggctgcactatggatgttacttgcaggcatgtaggtgcaaagcagtgccccaagagattggccatatcttggggtgtgtccagattattatatgccccattcttcactgtggttgtattgagttttctcactagtgttggtagcttaaacactgctgtaggtctccagatgtctctcctagatctagaaagacagaaataggtagaaaataacatcagttgggtggaggatgggtggtcgtgacagaaaaaaaaaaaaagattttgcattggtgtatttgtacactgtaagtaattgataacattgggtcctaagtctaggtagaagttgttgtaggaccagacttccagagttcctggttaagatccaaagaatctactccccaacccttctcacttattttccctatttgactttgtgatgtggtcaatttcctgtcttggttaggcctgagacaatcaatgtgaattgggtataagtgtgtgcgtgttgtgtgtgtgtgtttgtgtgtgtgtgtatgaaagagcgagagagagagagggagaaaggggggtagatttttaggaggaatcaagtgagacaaccctggcagatatccaagtaggaaatctgttcctctcttaatcctagcaaagaactggtgtgatggtaagtgtttaacaaatcttttaatgcctgcctacaccgatttcaagatatgaaatgatgtatagctttgcatgaaatgatgtatatgaaatgatgggcatgatgtaacagaatgcccataggtagaatgttttgcctcatgtctcaagccttctgggagctgcttagctggactaaaattatggctgtcacaatatcataaatagcattcccccacccccaccattatattaccatcaaacagtacggaaggctcacaatgtacagcatggtttctcactgttaacactattgatatgttaggccaaataattccatatgcattgtaggaagttttgcggcattcctggtatctacccactagatgccagttgaaactgccatcccccatacaattgtgacagttaaaaatgtttcttgacattgccaaatccaggcaaaatagctctggactgagaactagtatgtcagtagttcagtatgagatactcctacaagaccttcaggattagccaatgattttcatgactgtctctcatcacacgtcctcagttttaagtgtattgttcagataacttcatagtgacaagctagcaaactgtcaggagatggaccgtcaatgatgtgctaagttctagttgcacatgacacttaaccactattggtatgtttcttgatctgtaaaatgggaaatatactagatcttaacatctataacatttatgtgtgtgtgtgtgtgtgtgtgtgtgtgtgtgtgtgtgtgtgtgtgtgtgtgtgtgtgtcagagagaaagagagagagagagaaacgagagaaatgaagttctttaacagttcccggtcattcgtcttttctacttgtggatgtttaaacatcgccacctagtggcaacctcaaagtacttttttattgtagattactgcggaggtatttgagtatcttggaaatggaagggaatgataataaatgtaacatttaccttaatataagaattatgtaattcagctcacttggagatataaaaatagatacttttaatgagctcccaaattctaatttgcttttgatatttaccggtaaacattcttgtgttcacttaattttagataatttttatagacgtttttattaattttaatcttaatctgtgcaacagtaaatttcataagctatttagagggcattccgtggagacatataatgaatctgaagtcaatgaaaacaatcttaggatcagactttgaaatacgaagtgttaattacagaagaatggagaaagtcacaatctctttggaggactaatgaatatttctcaaacttatctccactcctgttgacaataaatatagttttgtgtatgtctctttggaactctcattgggagcagagattatgcattagttcactttttgtatgtaataatatctggttattaattagcaactgagcattgcaagaacagaatcagagttttctacacaaggctgtatgaataaaccagactattattttgtctgtgctgtcatatacatatccagttcatgttactctcattcatatgatccaggagtcctagagaacaattgaaatcagcctctgttgtgtataatgaagtgtgaagtaaattgttagtagtttaggagtcagaaaagttttgatttttaaaaactgagaataattttctaagatatcatttttaaatataagtttttcaggctaagtattctacttctatttaatagataaatttgcttgtttgtcccactactgcaagaagtaaatatgtctatataaatgtttaaatatattaaaataattaaatttctgaatagctatgatgccaccctccccaaaaccatcatatacaaactgccacctccaccacctgagcttgtcctgtgtttgctccctctgcactatcagctcctatttgaattgcttactgtggtcccataggtattctcatgtttaagcatgggagttctttttttaactattaaacttcatttaccatatttcccttgatccctgcttataattataaaaagcatattgcctgatgactttttggtcctttctttttgaagcctttcaagattctttagggttaaggagccagaaaatacttaactagccttgtgggaatgatgaggttagaggacggagcatttccagaactgaggacgtggctgttccccaagctgccttcagaatgtgggttaggagaagggtggaatttggcagctagaaatcattgctcacttctctgagaacttagacttggctgggtcacagtgcctttgcctctaatttctcaatggtctagtcttcctctgggggtgggaagtaaaataaagtgtgccaggctttaaagtattaaagaggactgaaaggtaacaatataatatgcatgtattgagtgtctagtatgtaccaggaactatgcaaagcattaaacaattagacagaaaatctctacaaactccaatcaagggattcttgaattttggggggaagggagaagttaagcagacgtatacatagttaactgtaatccaatgacaatccactgtaatttcagtgacagacaagtgaatttataattgttgatcaaatacccttgcacggcaaaaactcaatcaaataaggaagttcactttagaatactgttgaactgaaaattttaaaaataattattctaagaatgctgatttctgggtatttaacacaccacataaaattcttacccagaccacatccgaatggtagaagttcagacctatgctgaaatcagtagtgacatggctgatgaaattactctaagtggctagattgccatgtatttttaaaataataaacactcccttgccattaagaagtctgtgcctttagctttctactaagtgtatatttggcagtgggttctaattttaactggcttgttttccagggccctcgtggacctcagggaattgatggagaaccaggtgttcctggtcaacctggtgctccaggacctcctggacatccgtcccacccaggacccgatggcttgagcagggtgagttgtgtgcattgtttgatgtcacgtacaggtcatgttttaaattattgatatattgttaggattttaaattgtgtctgttcagatattgacacttgactgtaagagcagttaaataaggtcaacactgctatggacagtagaactaataaacccacagggaattgttggaaaaattggaagaagtattttctaaagtactgcttcaaattgtttgtatttctcaatgtcagctctagactctatgtgctttgttttttctattgattctaaagaaccactgctttccccctctttaaatgaaatgagagatttatctgtcctattctctaggctcagaatgccaaaaaaatctgctccgtatcctccacaagagaggatgacacatccatgatgagggatatgagaaggccattgagttgacactaaaaatgacacctaattatttcttcaattttagtttttttacttgaagtaaagtcaaacaaaaagcctttcaataccgacttctttgaattgttaatgtcagacataggggatttataagtacaggcaaaccatggagatattgtgggttcagttccaaaccacctcaataaagtgaaatactgcagtaaagtgagttatgtgaatttttttttgtttcccagtgcatataaacttatgtttttccacaatatagtctgttataaagtgtgtaatagcattatgtctaaaaaacaaggtatatttctttattaaaaataccttattgttaaaaattgctaataatcatctgacctttcagcaagccataatctttttgctgatagggtgttttgctttgatgctgatagttgctgactaataagggtggtattgctgaagcctggaattgctatggtaatttaaaaaataagacaacaatgaagtttgccatatcaaaatcctttgttgtcatttcaacaatcttcacagtatcttcaccaggaatagactgcatcttgagaaacgactttctttgctcattcataagaagcaagtcctcatctgttaaagttttattatgagattacagtaattaagcaacatcttcaggctctacttataattctagttctgttgctattgccatcatatctgcaattacttcccccaatgcagtcttcagccactaaaattcattcatgaaggttggaatcaacttcttccaaacttctcttgaggcttatattttcaccaatcaattaagaatgttcttaatggcacctagaatgataaatcctttccagaagattctcaatttactttgaacattatattcttaagtaataagatttaaaagttgaaatttatttatatccatgggctgcaaaatggtttttgtattagcaggcatgaaaacaacattaatatccttgtatatctccatcagaactcttatgtgacctagtgcattgtcactgagcagtaatattttgaaaggaatcctttgtttctgagcaataggtctcaatagtgggcttgaaatattcagtaaacaatgctgtaaaggctgtaaacagatgtgctgttatccaggccttgttgttccatttatagggtacaggcagagttgttttatcataattcctaaggatgctaggatttccataataagaaataaacactggtcttagcttaaagtctccagctgcattaacccctaacaagagaataagcctgttcttggaagctttgaagccaggcatggactttttctctctaaacatgaaagtcctagatggcatcttcttccaacagaaggctgttttgtgtacattgaaagtctattgttgagtgtagccacgttcatcaatgatgctaacttgatcttctggataacttgctgcagtgtctacatcagcatttgctgcttcactttgcatttttatattatggagatggcttctttcctttaacctcataaaccaacattttctagcttccaacttttcttctgccacttccttgcttctttcagccttcacagaattgaagagggttagggccttgctctagattcgattttgggtaagataatgttgtggttggtttgatcttctatccagactactaaacctttctccatattagcattaaggctgttttactttcttattatttgtgtgtttactgaagtagtgcttctaattttttaagaacttttcctttgcattcataagttggatgactgtttgctgcaagaggtctagctttggcctatcttgggtttcaatatgccttccttactagaccatttctagcttacaatgtaaagtgagagatgtgagactctttctttcacttgaacatttagaggccattgttgggttattaattgacctaattttaatgttgttgtgtctcagggaataaggaggcccatggagaggaagagagatggggaacacccggttggtagaacaacacacacaatatttattgatcaagtttattgtcttgtatgggcatcattcaaggcacctaaaacaactactttagtaacatcaagatcactgaacacagatcatcataacagatataataagaacaataataatattaaagtattatgagaactaccaaagtgtgacacagagacacagagtgaacacatgctattgcaaacatggcaccggttgtcttgcttggtgcagggttgccataagacttgaatttgtaataaacataatattggtaaagcacagtaaaatgaggcatgcctgtagattgagaccttaacaaggaaacatatgaagcctgaatatgatttttgctttacaaaagttcatacacatttttctcaacagattgtagaataaattgccaatttatttataaacagtacacacattctttcctaacaaaatttggaaactaatgtgactactaaaatgtatatgaacaattttggtcagtttgattactagggttttttaattgtgaaagagagtaggtcaaactgtttccaaacttggaacattcagggattcattaaaaggactataaaagtgttatcaacttacataaatgtaatttaaagtttactgggcattgaacaaagaaagaatatcatccaaaaacagtccaaaatggaatctggaatctttaggacaaatgttttaaaggcatcttttaggctttgtttagatgtttggcatctctaactgtgggaagaaatcagttaaagagacttaaacctgcaatcaattagactggctagtgcttatcagaacaatccatgcttttatcaagtatcagacatttgccctgtttcagaaactgctctggagcaacatacttatacaatactctgggaaagaatggtcaataaaaagcacaaacaatcaaagcaacttaagtctttttccaggctttaaagtcaagcacttagaatgattctcagaagagtcattctataagaattctagagagtgtacatttatccatatgaaaaggacgttgatgtatgtcttttactgtagaaataatgtcaacatatcgcttttacagccgttttcagctcaaatggctgggttggatgaaaaatctggacttgggagtcaagtaggactaatgcctggctctgtggtaagcataaattttactgatcattgaagtacttcagtgaaaaaaattattttaaaaagagaatcttgagttaactagtcaaagaataacatgcatcttcttaaacacagtcgtacattcattcattcattcatttaattaacttatttactctactgtatgccagttaaaagcccagtgtgtttcattcataattatgcaaagtgctgacattaataaaggtctatctgtacattttatttaatattggaagaaaataaaggagtttaagacatataaccacagccacaatagtaaaacctaaacctttataaataaaaagcagaactattttatggtgctcttagaaacagtggtttggtaaaattttgaaatgagatgttttgctattttcatttttattattttctacttaatatcctctggctgccttattccaacagctctatggtttcctggctgagtcttctcaatattcttaccctcttttgaatttcttcaacatcagaaagactcccatttttttcctggatatttggagcaatccaattttattgaataaattaacacttttaaaaccaactctcccatgttttattgctcatagcatagttcaaaataattccaggttaatagcatttcaggcaataagaagtgcaaaatcagacctcatagataaccaccccttctatccatccttaaggccagcgttgtgagcattttaaatattatttgtatatttttaaagttactagtaatatggcatcatttagtgattcttttgggaacttttttttgagttgcatgtttttatccatttggagtttaaattacatatgtgtggttttttttaaatggagcttttcttactatatgttccattcaaaataaaaaattaaaatcttgccataagaataaatttgattttggccaggcacggtggctcacgcctgttctcccagcactttgggaggccatggcagacggatcacaaggtcaggagattgagaccattctggctaacacgatgaaaccctgtccctactaaaaaaaaaaaaaaaaaaatacaaaacaattagccgggcatggtggcaggtgcctgtagtcccagctacttgggaggctgaggcgtgaacccgggaggtggagcttgcagtgagcccaggtcgcgccactgcactccagcctgggtgacagagggagactccgtctaaaaaaaaatccaaaaagaataaatttgattttaatttattttactttttaaagtatgatatttaaaaaatagtaatatacatataataataaatgttctaaaatcgcatttttgttttcttccttttgttatgcctcagtggaacgatttcatgtttaaatgaggaaagcctgtgtggatagtttcaatctatgttgtgaaagaaagaaatcacccaggaaactcagtgccccaaatcgttttcaactcacatttaatataatctagtcattattgttgatgtttcataaacctttaattcaacttatttaagttataagaattatctgctgtgaatctgaagaattaaataggaagtttgagaactaacttatgtcagccaagatttttctttattcggatgttcttacttaacagaaccatccattaaacatgcaagtgttcttgttctaaagacattgggtgtgtacagacatatggctcatttctctttataacactgaagttatgtataaaatcatcccaaatgttgtccaagctttaatctccttgaatttagctgccttccaaatgagtacagatggagaatgtcatcatccccctttgtcaaaacttcacttttccagattctagagatgattcaacatttttgaaatatttgacctaattgtcatgagtactttgcaacgtttctcctcatttgtttttaagggtcctgttggcccaaggggaccacagggtttacaaggacagcaagtaagtctctttataattaattacatgctgtaagaaaaacatacacacacacatatattacataaggtctctgtgacatgactgcttttggctggttttaaaattttatattgtaatgctcacttcaaacaggatatattaaatagtttttatttagaaatatatgccacatgtctttgcaaagtttattgggataaatttttatcatctgatttctttatgtgactgaccttcgataacaaaattacatgactttgcatctgaagtaagaaattcattatgttatgtcatgaaaatgttcacaattggttatatgccaactctgaagctatgaaatcagatcataggaggcaatccccgtgtagtattattagaaataagaatcaagatgtttgttccatgggatctttaggaagaatataatacaatatgcttttaaaatgcctatcagatgccagtaaaatagtgatgtagaactatttttatttattatagcaatttaacaggcatcaggaaataatattttaaaagaaagaatgaaaataacctttagttcagtcaaggttaccacattgtcattgtcatgtgtgtggagttttacttcaagctatcagtgactagaaaatgtggttgatgatggtgatgatgatgatgttgatgaggagaactaccattgatggagcactcacacactgtgccagcactattctaggttcttaacatacattaattacttcagcagccataacagcctaataaagtaagtaccaatattattctgattttacacattaggaaacagttacagacagattaagtaacttgcccaaagtcacacagctggaagatggcagagccaactgtctaaacaattacactgtatattgacagagtacagggtttaatattctatttttccttggtttgtatatatactttgttttcaactgtagggtggtgcaggacctacaggacctcctggtgaacctggtgatcctggaccaatggtaaatgtcaagtaagcatgtagacccagttacatttgggtccaccattataatgatgtcaaatattgagttatttatcttcccaggtcctccctaatgtaggaagaaataacaatccagtttgggagtcctgttctatgaactgttcttaagctatatgtttctcatagcagaatatttaaattcaaagactatttaaatttatttatttaaatttaaatttaaaaattcaaagaatatttacattcaaagattatgatcattagacagtgctgagcgatttgcttttgtgcaattatacttcttgttgagcacatgatctggggatgcaacataaaattcaaaactttaataaaactattttctctgtctcaacaatatttatcattttcatttgtttcaataatagtttgacatttcatttgtctcaataatgttttgaattgtattactggcaagtaaaggtaaatattctttttttccttttgttttgttctgttattagggtccgattggttcacgtggaccagagggccctcctggtaaacctggggaagatgtaagctacctttcctcattttccattcaggttttgaagaggcgaaggggttaaaatgttaacaagaatgttctgtattaatttccattacatttccccacccttttagcttgcattaaattcaatgtaaacaggagcactcagaatggaattttacaaatatctaaaagggctcttaatttgcgtagtattatgttattaggtactactgtctcttcctgaattccctgggtttttgttaagatttctccattagatgctaggcttgttgtcacagtagcaacaacttttcctagtggaaccactgaaattacctgaaagaaaaaatatgttgctctgatggcaatacatcattatgaggtcttatttaaaaggaatttttaaaacgtgttagtagtatagtgccaatatggctccccaatgatgaaaaaatgatttcttcaattggatttttaattaaagttaagacccaactccagattttaacattaagaacatgtaatcagagaacagtgtgcaatagcagacttacatttctagattcttagttgtaccaaagttgaggatcaaattatgggtaggccattaatttctatatgatactaaaccaagtattaataaatattttctctttatgagtcataagatttatttaaacaggttacattgaatttggacatagagcacatatttctgatagtcttttctttttaaccacaggaaagaaatggaaagtagtattttaagaagcaatactttaattcagtgtcatgtgatcatatagaattctatagtatatatcctatagcatacatgtatgtttatgtgtataaattttgatgttcataaaatagtgagctacatcagaccaagaaaattttcaacaatttattcttctgggtaaattaatgaaagccacagactaacttgatagaatggagtactatcaggaatataaggaatagagcctatttttactttattttttgcactgtttagagaattgtacattagctttctaaagaagactgttttattagtaatttatttatcatttagtttcagagaagaaccttttaatcacttttgccttcccaatctcctacatttttttccataaagggtgaacctggcagaaatggaaatcctggtgaagtgggatttgcaggatctccggtaagtttatactcaacataaaggcaaactttgaaaaataaagaacattgaattaaatcacaattctctgtatgcacatgtatcaggcactaagtaaatggagacaaacagcattgtttgtttccgtaaaaatgtaaaatgtcacaggacgttttgccagagtgattgttaactccagttgtctgctttgcattggcaccataaataagccttctggagctagagaagtatattgaacataacatgaatgctctccaaactgagtttcaaatcctcagaaaattcagaaaaaaatagttttttttttttcataaaatgagttaccagcttgacctgtttacaattcacacttcaatcctattttagctctttaaaatctttttaatatttttactttatattgtcacatatgtctaaataatagcttgaagaaaagcttgttgccttgttttttatcaactagagacagtaaattatggatgggatgcttctttggctgctccccaaaccctaattttggctgaaattcttgattaatgttctgggtcctaaaatcatgacaatttacactgatttccagctctcctaacatagctgttttcttcccctttggctccctaaaagaatagactcctggcaactactccaccagaatccaagacctggcccctttgccgttctctgaacccacctgtctcttgtcactcaaattgctttgctaggccctcttctagaatgtgttacgctggccatggggaaaattagagtatgataagcaagcaaaagtcctcttcaaacattcctacttcttgggtttctcctgctcaacagcccctaaacattcactctcccatttattatatttcctataatttccttatgtttctgccactcagtacaatcaacagtaccacattactttctgtttactttctgaaaattgatgaggttcaatgctaggaaatgttttaaacaaatgaatgctcccttatcttttaagggaaatttgcaaggctcaaaggattatttggttgcaaatataaaccaatttcccaactccctgctttctttcctcctcgatcagcctgggaaataaatgcagacagagacatgaggtttagtcattagcacagatgtccttttcaacccatccaggtttgaacttcccatgtcctgctgcactcttgctcatgctcacagtgtgggccctccatggggaggaagggtgccctgccagcacaccacagatgcactgtgcaagctcagtgcaatgtgtgattgcactgtaatgacagtcctgggtcagcagaatgagaatttttatgagcattaggacatctggttcattttcttgttacattagggatatgtaatcacatgagaatttctcttgcagaccataaaaactgaagttaactaattatttgaaataacatagctcagcaattcccctataggcttagacgggtctgcactaagttgcctgctaaggatggagaggagacaaatctctgtaaaatgaggcattaagttgaacacttaaagggagttcttgatgtgaaagaattcttgagcggggttgtgtaaacagaagaattaatgggacttcatttgttcagagagcatgatttgttttacccctactgtgataaccctctaaaacactaaagaaataattttctttcaagaggtcacagacgaattattgctttgattttgttatatgaatttcatccattgagttgcttattcaaccatttagaaatagtgaatgaaacctatgatttgcagagcagaaggattttttatctgtataagatcatgctaggccaagagaaattccttaggaaaggttaaagtgctatgagagtaagaaatatcaaaccatttctttatttagttgtttatccagtgattattcattgaatgtccattaaccaaacataaggctaagtgccagctatacataaattaagaataataatcaataagtgatcacatcaatcaatgctatcaaggtgctcaatatactggcggcagtggtaatggcaattcaatgcaaaatcaaattaatataggccataataataagtaaataattaagtcattagcttagtatcttttaagacagtataaggaaaaagtttcaagcatcatttcaaaatagttgtgccactggatttgattttctatggtatttctattgttttttatttaatgtgtttaggtgaaagctacatagaatttgcagaaattaagtaattatttagtcaagaaaccaagcattctcatatttcttgactttcttttctgttggatattttgtttattcatttagttttttaaataatcataaatccacaaagtttttttctaaacaatttattttaaaaattcctgaccacattataatactgttcttcccatcatattctgctgccaatattcagaaattcatagaaaataaagacattggtttgctacaaagacatttaatcgtgtaccataaataaagcacaataaagaaggaaaaggatattttatcttgaatttctctcctgaatattttttttctaccttggtatagtcaattctcatgttggacatattgattcatgcttatgttcttgttttgttttcactactaattataacacagtgatatcatgtgaaaaattcaaaatgtcatgaactcaatacctggcattactttgtatccttgtataagtcatgtttccatttctaatagcatatttactttgctaattttgatcacccagatatattttgacagataaaagtatactgcttttttttgttcttcttaatatgttgctggaaaactgtgtactagctattttttgggaaaaaatgatatattaaggaattttgcatccttattaatgactgtaaaatgccctatctatgttttcctcccagggagctcgtggatttcctggggctcctggtcttccaggtctgaagggtcaccgagtaagttcaatctattgtaatcctctcagatactgtggtttagtgaacaggctctggggagatttaccttcaaaatctttacaagtcaatttgtcaattgtccttaactgtctatggttgcagtattcatctgtggttactgaaatcacaattttttaatacatttcctttgagtttaatttgatttgataaagaaatatattttgaattcttactatgtactggacactatgctacaaaagagggtacagtgatgaatgagaaaaatctctagcctgaagcttcaggctaatgggggatacggatgaaaaggtaggcaattcctgtatagtgtaataggtgacatggtagagatagagagtactaggtcacagaagggacccagtctacctagacttggaaagcaatagaatgccttccttattactgaagataattacgatgtaactattatatattgtttacatatgtagaatctatcatctatctaactatcataatatcaaatagtgatattcaatcaatatacactggcctctgttttgagtagttgagattttgattaagatgtctgctgctatactcattattaagtattttgaacattcaccttgaatacaaatgatattttataacaatatgaactctgtagttatgtgtttcctctaaagccactgtaaggtttttatttgtagctacagattaaatttctatgaagtcacaagtgtttgaagggtgagaacactgcaagctgaaaatgttatttaaaggtgaaaactctaattttccttgaataagctttcagaaaagtttgagaatttgaaagtattttgagcaacaactttaaatttgatattcatttttataaggcaatttctgcaagcttatttttggttcttatgcctttgaggattgaaaaaaacaggatacaaatacaaatttacatttttattctcagggacacaaaggtcttgaaggccctaaaggtgaagttggagcacctggttccaaggtaatcttataattatctcactgtaacctcactttggcatcttagttttgcttcaaatgtttacacatttttcagaaccaccttaattcagcaggagagagggctacaaacaaatggttaggtaaataaacataatttttcaaagatgagtggcaatggctttaccatgacatgacttgatatgcctccaagaatagcctccatagcactgggtgtctgccagtgtaggatgagtgttgtcttcatatgaagatggcactatgaatctatcttttaaaatacaatcattcatttttctttttaaaaaatatctgaaaggtttagatagttcattagtcccattattgagtacccctttaataccaagaccttctcctcattgtttcttctcaaaatttatttgtatttctacagggagaaaaaacatcaaggaagtataaaggaatttctagtggaaagcatcatgacctaatgtggaaaatcatttggctttaaaattttttttatttctaagtctcctagaatagatcttaagatagtgttacaatcaattttagctttgtaaagttttacttgagacgtatcagacatagccagataagtcctttcctgagactagttactgtggctaggtatgatagtttccgtcaatcttaagtccccaatattattttagatgtatttctttaaaactacactactattgcattttgagaagaggtaataaaacaacattctgagatcctatatcaaaagtacatctttcatatgtcctctttgaaaatatgcttttaaaattacacacacagaacaaagtgatgtatcggttgtaggcttctcatactgtaatgtattctcatttttttttagggtgaagctggccccactggtccaatgggtgccatgggtcctctggtatgtgctcgttttcttgtttcttaaatttctaaggttatatttccttgccttttagattacaacaagagaatttttaaatgaaaaataaaaataaatggacaacatatgttggctagtaaaataatcttgattaccagctgatagacaagcacaggagagttgagcccttctaacagaaaaggtttcccacatttcactgtttctcttaacggttgaatgcccttattctttttctatactcagtgatcaaatcaagattatcgcagatttagcccattaaagccaggttaagtgaaatctatttatgtaagaggtgataggttatttatctccacatggggatagtttttcaaacccaacattgcccctggaaatactactgcttggtggccaattatcttgaatctcaattggattgagtggggtagtcagactactctacatttcaaattaggtgcttcaagagacatttcttctctatcgtctatagggtccgaggggaatgccaggagagagagggagacttgggccacagggtgctcctgtaagtatatctgcttttacttatactgctgagatgtgtatttcaattcattttcagatttggtttactgaacttgccttttaaatgaaagtaatagtactggtcaccttttttttttttctttttcttttggaataaagtcaggtttacagaaaagttgaaaagaaagtacagagaattcttgaacaaccttccctttgctttaatgttaacatatagccacagtacatttgtcatctactttaatacaaaaattaagaaaataatgaatacatataacagcatggaatatagtccatagaaaaacacaaacttggatatactaatgaaattacaataataggaaacatttatcaagagcttattatatgccaagaattcttccaagcattttatgttcctcatactcctaaaaggtggttactctgagtgcactctttgaaagatgtgagcctcctgatcacctgtccttgattcattttaattatacagattgagaaatactcttgcagactatttatgtaacttgaacctgtataggaggcatattctaattattcttttcgcaattctctgaagatcaggctatgctgactaatatttcagacttatagttcattactttggacctaccttgctttagatagttaaggactgccacctttcctctattatttcaagatccgatcatccccattactattagcaatagcgggtttacactgtctctgctattacctccagcccatagaggacaaccacctcagagctactcaacaataccaaattcagggccctgatttggaaagtgtaagaccctctcaccaggccattctttatcactttagtaagcagagtgtcctaaggggatatagagaatattatagaatatagtcagctattggcttatctaggctaacatcgtctatcaatatagtatgcttacttctctgtgctttcttctactgtctgccaagggaggtctgacatttctgccccagcattggctattgctcttcccacatttctaagaactgtctcccatgtcagcactatttctcagggttcttaccagggtattaaattgcaatatcacgagacagtgtatccacatcattaaaattttccaactttgtattctgtttttttgatacagtatcttcaggaccaagacccatacattctttctcagatcccgcctctacccgatgtttaggtcttataggtgctttggtgtatgatatctttttaaaaaatcaggagtagtgttagttattggtgtggtgtccagaagtgaggcttaagttgtcttccaaattagaggcttaggtatcatcttcaacaagagagaactaccaactattaatggggggaatgggccacttctctaggccaagtgactttagatggacctgagattttaaatttcttttttttcctttaaattttgaggacagggtcttactctgttgcccaggctacagggcagtggcacaatcatagctcactgtagccttgaactcctgggctcaagcgatactctcacccaaatagctgggactacaggtgcatgccaccgttcctggctaattttttttgtagagacagggtctcacattgttgcccaagcttgtctaaaactcctggcttcaagcaatcctcctgtctcagcctcccaaagtgctggaattacaggcatgagtcaccgggcccagctgaagttcttcagtgtgttgacccacatatcctattgccaaatctcagaatccgactcctcccaatccaggaccctgactgtgacataacagactttctaggtttgagaattcagccatcccaagagctctcatagtcttgcattaagccctgtgcttggcctgatattcagctttttcttctctctggttgcagatgagaattaaaataaaatgctgccaaggagtcttactttggtgatttatcaccatcagccttttagtgtctttctccaatagatgcactatacaagacccatgcaattccatcagctttataattgttattttcttaattcttctcaaatgcccgagatattgcattactagcccattcccttaaaatatctctgttcaccattggtgacaatattttccattgtgccatcgcggcatgccaagggtgattcatactccaactgtcaccagctgaccagtgggaaatccagcttacaaatcccactttagagtttgctttcttgtaaccactctgacattaatggtcttagggtcttaggtcaggtttcctaggaaacagcctcaaaaaagtgacttgtatacagtacaggaaatttattggtgagtgctcttagaaactgtatttttgaaggaaggaatgaataaaagcagggtttttcagagggagaaattgaattgtgttgcaattgcaacagagatctcagtcaatttcaggggaactatggagctgagatggctcttgcagacttgtgtcaaataagggccaatgctttgtatccctgcattgaccaaggaaagagcacagtcttgagagagctaattccctttagctgagggcaattcctagggaatgtatcaatagtgagccatcagcaggttatatttccagctggcaggatgaatacttcagtacttaagggagctctgggtgaaacctacagaattcactataacttaatttatctctcttgtgtattttattttctggacattgcttctctgagttaatctggctattaagaatactgaggtgttcaaattttcattgtctctgagttcatatgttagaagatgatacattaaagtaaaagaatcattttaatcagtttcattttctcaatcttgattttattgcttattgctataaggatagatgcatttatgactaccatatcagcttgtgtaaatgtatttatattgctattaactgagtgagggttattgtcagttaactttaatatttattcttcaatttgcaatatggaaattttttataaggcaaataagagaaaatatagtctaaaatgtaatcttatcctgtcttgtctctttttctcttaattagggacaacgaggtgcacatggtatgcctggaaaacctggaccaatggtgagttatattattttcatattaattcattaatttattcatgcattcttccatttgtacattcaaaaacatttacagagcactcaccacatgccagacacttggaataaaaagttgatggacacatagtacttcttcaaaactgttctattaaggaagagagagatattaatattgttgtataacataattgttaactccataatacagtatacaacttcagttatgggaacaactttcaagccaagtcctgaaagataagtatttaatatataaaatgggcaagaatatagcattgtccataggatagatagatgacaaaacacagtgggctcagaaaattctaggaaggtaaaattggattgagaggcgagagctatatcatgaagggttatacttaccatgttaaatggtttttgagctcttttctatagtagttaatgtgcgatcattcagggattttaaacataagaacattatgaccagaggataatctgctggtaatgttgaacatgaaatgaagatggctaagaataaagaatgagtttgaataccactggcataattccagaaagaaattacaaagatgtgaactaaagttattatggtagtaacagaggccgactgcatgtcaatgagctaagaactctcatgggcatggcccagtagatttctggtttaaagtgtttgatggatgatgtaatttatctgaaattggaaataaagaaagaggaacagcataccgtttgtgggtttgagtttagaatgggaataaatgaattcaatttcgtgattagatatgcaagagtggagctcaggatagaaatttgaatttcaaatgtagttttggaaatttttaacatacaggcaataaatacagctgtgggagtaaaaatgtaacatggaatgagaaatgatgaggtctcagtgtgtaccaatattttgtacattgtgcttttttgtgcttggtatggacaaggctattgtattttgcttcagaccatcttgcactatttcataggtaatcctctgtaactatgaacctttaattcacgcttgaagatgaaaatctgaatacttataactagatctagatcataaagggctatacttacttacccatttaaagggtttttgagctcttttctgtaataattagtgtgagatcattcagagattttaaacataggaactttatgaccagaaagatcatctccaggtaatgtggatgatgaaatgaagatggctaagactaaagaatcatctgtaaattataaacatagaatcaaatgtaaattataaacaaaggcaaatattttaaatttgacacatttcaagcatattacctttttaaaattccattacttgcaatagttctcccttgtgaatagcctcaattgctgcccattaactgctgtgttacccagaggtacaaaggatcctaagagatgtgtggaactgaagtagattttaattgtaacagtgctatggatcaaggtctctactattattcagtcaaggacacttaaattatatctctacaagcaaaacaaaactaatttaatttttaaaaagagcttcaagacataaagttattttctgaactttagagcaacttattatacatgtgcttttcccatcaaattatgtgactttaatagtggtgccctgacttttaaaaggaagatgtaatgatatctagaataaattatttcatatattattaacactggttgctagtaaaatgtacatacttatattgtaggcatcatgtagtaaactttatctgttcatcatgaaattagtggttctcaactttggctatacactagaattacctggaaacttaaaaatattgatgtccaatccaatttaaatgtaatctctagaggtagactcagaaatcagtattttttaaagctctacagatgatttcacagggtcatcaatgtggatagctgttgcaggaaaccaagaagtggtgttttgtaatagcacaaatatatttataaaatgttttctatagccattttttaatgtagtaattgagcacaaagttgttactgaaaatgctcctaaataaatagtccatggaacaattttattttgctgcaacaggaaaaactgagtcaagctctacaaggtaaattatgctaacaaaacaccaagaaaagaaaatattatgagggaaagagagaaagtattgtaggaaatattcatgatcaacgtgggccaagactgaacgatcataaaataaaataaatttaaagctattagccaaaagtaaagtataattatagaaattgaaatcatttgccccaaggatcttttctcccttgtttctcataagtaggaaacaaaacataggatgaaaaaatatgtacattttgaaagggcttctattaattgaaaactgatgagactaaagtacaatccttagagttagagtaatctgtactagaattccttttatactcacttcttttaaatttagtcttttaatcaatggtttaaattctatgcatgccttcccaaatgtagggtaatataaatatccataaatatccacttattgcctgaaaaacctctctaaaatatccagatggtttttttttttttttttttttggagatggagtctgactgcaggttggagtgcaatggcgtgatctcagctcactacaacctccacctcccaggttccagcaattctcctgcctcagcctcccaagtagctgggattataggcgccagccactacacccagctaatttttgtatttttagtagagactgggtttcaccacgttggccaggctggtctcgaactcctgacctcaggtgatctgcctgccttggcctcccaaagtgctgggattacaggcatgagccaccgtgcctggcctccagatggttcttaagcatcatttttatagaatgaagtactagattttgatataaaatataactttctaaaaactatattatttgattaacacaaagaaagtacatctctcaagaggcaattgtttgaaacactttatgtttgtgattgacttaatcctatatgctatttgagtaatccaattatgtttaataccttggatatgtcttttagtattactttagattgatgttgaaggtacttataatgaaattagcctattatctttgtaattttaaagtgaaaggcaggttattcttatgtgtctaatacaaaatgacgccaaactctaaaaaatgacctaattagatactaattgaatacatgtctgattacttttctggtttcttttaatagggtcctcttgggataccaggctcttctggttttccaggaaatcctggaatgaaggtaagatgttaatgttaatatacagtatttaacgctacatgattacatgagtcccaaagtgaagaatgacatttaattaattgaaaagtgtgaaagttacttttaactaaggaaagagcctagagtatgctcatttttcattattacatggaaaaagatacattaaaaaataaaattaactgtataaatataattaaaggagaattacttataattgtacccttataatatcaaagaacctgatgtgttaggactctaatgccagccagtcaaaacaactataaggaataggagctttaaactgaataggaactctattctctattcttgaatagagtacctggaagtaataaacagcagaatgttccaaacaataggaggttaggaggttaaaataaattagatgctgtcaaaaggcatctaacattttcacctaacatttgttatcactctgcactcccccagctccacaatccaattctatgaagccattaaaggagtgggcacggagaatatttggctcttcatgtgggaatggattaaagtattctgtgggatgacttaatatttgtagtgaatcacaattggttctttctctcagtactttgggataaattcaaggatgacagtagaaggacattaggattacattagataaactggtgaattaattcagaacacctctttcaaattgtaagcaatataacacatctgatttcccctgatgccatgtttccctttgcaaagacattcttaatcctgaagagattatgcacaagattatgctgtacaaaaatgactgcggtcacggacagtcacctggcccctctaaactttgttttctcatggaattttgttgaggattatgtgacaccatctatgtaaactcatcacatagggccttatgcagaggacaccctcaatgtaagttcgtgcttcttattagttgtgctactcaaattggatttaaacttagaaacaaaccagaagaaaaatgtctgtagctgacatttcagatattccttgaaaatgtgagaatcaccaagtcaaattattctgtaggctctctctaatgacatattcaaacactgtgctatggggatgccgctgctttaaaatagtgccttaattcctttccctgcattcactgagaactcaatgtgaactcaagtgggtgggatcttgttgggttctcctctgaatctgatctgctccctgaagtcctaataatgtcactaccacagactctggcccagactctctatatacccctatcaaaacatgcaaaatcccttccctctttttgtgagaccctccgtccccaaattgagttctggttaaggaaatactcacaaatctatgaattagcagaaagaggtttatactacaactttcatggggtttactttaacttcactagcaatcatagtttacacaaccattcactctggttacttctctctcctcctgggtgtttgtggtactggttgttggctactgaaaactgctcaataaaactcaaatatctagcaaaactgtttctgttagaaattttctgtgttttccttcttgcttctctccaccataaaattcctggatctttgtttttggacaggatcctgcttttcctacaaagttctgccatggtctctgctctctgactaaagaataaatttccaaatccagttctttgcatttcaatgaagtgaaacagagattcaatatgctttactgatactgatgagattcctaaggcttagaattttagttttccaggcctctttaggattagatccacataggtacataataagccagataaaatacagaaaccaagttaagtttgaatttcagatgagcaaagaatacatgtttagtataagtatgcctcaaatattgcatgggaaaaacttatgctaaaagttattgttgtttatatgaatgaaaactcaactaggcatttttatttgccagctggactcactatcttggcttgaaataaagggagctattaagttaccttaaccacttcactctgctcttaatgttgcactttaaaaagtatcttttaattcttatcaaagaagtattgtttctttggtttaaaaatagatggtattttgcttataatgctgccaaaaattaagttgattagacttaaataaagttgtagcccagatgtttttcactttactgataaatgctttcttgaaggtcggtggaactgagtttttacaactcaaatcttatattctgaaatatgatttgttatattgcttatatagcaaggaaacaatttattgttctgtaatgatggtatgaaattttatatagactttttacagtgagtttcacagatttggaaaactattgtctaatcttgcagcacattttagctgatattaggttgttttataaatattggaaaataatatgatttatcctctgatgattgcatgaagctttaattttgtagtaaatttttagacttgaaatatctagctttacattgaacagaaacaacctctttaagcacagtgggttggtcagtttttctccttcatttgatttgtgttaaagagtccgaatgtatacactgtttatacagaaatgggcttgaataacctgagtatttatgtaagaacatactaaaagtaaaccatgtggatttaagaatatctattctttgataaatatcttaaataaaagatatttaagactatcttattctttgagtagactcagtgtgcctgaggtgtagggctgtttctagtttttctttatgaacttagattatctaaactgtttaatatgtaataagtgtaaattctgataggtgtgggaagaaaaatctcagattttgtggaggttcagaggagagggaacttaagctaaccctggtgtagggcttcttcaactggagattggatatggagaatattcctagtgaagaggccaccagcgtcatcccttaagaaggaagtgggaaagtgagtgcgctccttaagcttggttgggcacgcatctcttgtaatcctctttggcctctttcagtatttgggtttcaaatgtaaaattccaaataagcggtcaactttgtacaatgccactctcgtatttttcttaaattaacatttccctttgcacccttttagggagaagcaggtcctacaggggcgcgaggccctgaaggtcctcaggggcagagaggtgaaactgggcccccaggtccagttggctctccaggtcttcctgtaagtttctagcatatttaagaaccagcccagaaagctggacatttcttgtaacatcagaacaaattcaacctatttttttaattgatacataatatttgtacatatttagggggtacctgtaatgttctgttatatgcctaagatgtgtaataatcaagtcagggtatttaagatatccatcccattgagcatatatcacttctatgtgttgggaacattttaagtcctctttttctagctattttgaaatataaaatttaatatattctctgaattctgaatgagtgcttacaactgtgaaaaaatatatttcccttgtcaactctgtaagttttacctattttatgtaaaggagaagtagtcaaaaaagtaatttttatgatataatggtggttgatttttaaaaaatgcttctacttcctttttgaagatggctggacatctgtatactagcacatttgtatctatatattgcttaatatttcattacatacttttaatgtaccttttagggtgcaataggaactgatggtactcctggtgccaaaggcccaacggtgagtactgcatttatggcatgtgaagctcaaatgggcatgattctttagacattggccccagactgctacctgtgtctctacttaccacatcactcttgctgtttaatagggctctccaggtacctctggtcctcctggctcagcagggcctcctggatctccaggacctcagggtagcactggtcctcagggaattcgaggccaaccggtaatgacctttgaaagaactatcatcctttagtgtaatctaactacgagggccaagagtaataacatgtcatgtgatgcaatgaaacatagataacgtgacttatccaaatgtgggaagatgggagtctttgtgaagtgaaagctaaatgttgaggtacaacttagatgtttaaattctaagtggaacattattgcagtatgttaaattttagtgttcttttatttaaaataataaggttataactttatggttcacctcatagaattttatgaataattgaataataaatattatgaaaatattatgcaagccagtgtgaggaatatggagcttcaataggaatttataatgacaattaggctagggttcaacaactatttcttcagagttattgttaaagagtgattcaaatatattaatcagattgaatgtcagattgaatgttttcatattttacagaaattatttattagaaaaaatattttgatgaacccataacaaataaacacattgagaagttgtgcttaatagcttttagcttgatgtataaaaataaatatttaaataaatatttacaattctgttccaagtaatgtggtcatgctgataaattctcttaaagtgctggtgacagatttattaaatcattagtgttgctagtgtcacatttgattttaccaagttctgaattttgcaatccagttcttacaacttaaatttcagttggtatttaaagacacacctacagaaaaccctctaacattccaagagtgaaatgccctatttgaagttgctaaattctcaataaatacggcataaatataaaattattttgattctgggtaaacaagttcacatcctaaaatacagcctaaatgtatttatctatagaaattgtcattgatagttccaattttaattttcaaatttgaataataactcaataattctatttattctactacacatgataaaaaacatgattttaaaaataaatctcttaaagaccactataaattaaatggcttccaaattatactgaattttataaaaatttacacatattaacatattcacatgcattcatttaaaaatgattatattatactactgatgcaaaaccgactcagctggagagaatttttaaagcctatttattgtaactaatttgagcagattggactagctaaatgtcctggttcttacaaatatcaatatatttttttcagggtgatccaggagttccaggtttcaaaggagaagctggcccaaaaggggaaccagtaaggtttcattgttttaatgataagtagaacatagtattgtctggaagtgtacagctcaaaatgctcaagggtttaaaataataatgagaattataatagcttgagatgaaaatatctcattgttccatatactttaaaatttgtgactgacttcgttaaattaggcttccaactataattcactggttggatgggtctttctggtaactgtccttctgtttttaacaggggccacatggtattcagggtccgataggcccacccggtgaagaaggcaaaagaggtcccagaggtgacccaggaacagttggtcctccagggccagtgggagaaagggtaaatttaaataatacaacacattcttacagttgtgagggaattatgtgtgtaagtctgagaacagtaaggaaaactagaacagttaagagaaatgcttgcaggttccctgcacagttcagtacagttatgtgcaaatagaaagagccaactgactaatcattattcatacattcaactaatattggttaaatcactagtctatgccaatttgagccatctgtgcttggaattatatcagtgaacaagaaggctatggtcctagtcctcatgtggagactagtaaatagttgtttattttagtggagaggtaaacaataaacaagtcaatgggtaaataaaaatatatgtacacactttaaaaaatgccatacacacactaagtaaagacatgacacattggagagtaactacacatatatgtcagtgttgtaatgttagattaggtggttaggaaagaggatcctctgagaagatagcattttagctgagacctgaagatgatgataagccagtagaaaacttggaaggaagaacattcttagcagaggaaaaagcaaatgcaaagctgggagggcagaaaggacctggtgattttaaagaccagaagaggtagctgtgactggagcacagtgagacaggtctgaaaagaagaacagtaatctcacatttatctagagctttggagaatgcaaagcgtttcacaaaaatgtcactaatgcatgtcattgttgacattttaattgctatagatggtacctatgcctctcatctctagatatcagttttctctgtttaattttactatgaatcgttagaatatttccttgcttccttccttcctttcttccttttttttttctgacatagtcttgctgtgttgtccaggctggagtgcagtggcaccatcttggctcactgcaacctctgcgtccaaggttcaagaaattcttgtgcctcagccttttgagtagctgggatacaggcacttgccactatacccagctaatttttgtatttttagtagagacaggttttcaccacgttggccaggctggtcttgaactcctgacctcaggtgatctgcctgccttggcctcccaaagtgcagaatatttcttgatttgaggaattatttggctcagtacttatatattcttcaaaattttaaagtttttccatcgagtcagatttttctcatgcatatctatagccatgttggcttgatgatggctcctaaaactttatagtgctaaaaataaaaatcacctattcattacatattgcaaaaatatcaacaacaattaagaatcacattttggtcatttgtagggtgctcctggcaatcgtggttttccaggctctgatggtttacctgggccaaaggtgaggttgccctgtcaatgttgatacttacgtggggggtgctccagaagatgccatttttcagcacggtgatctagctatggcctgcatgggctcagatccagaaaggagatggatacaaataccaggcctaaccccaatcctctcttgtgtaattcctgtattaagaggcataggggggaaggatgctagttggcggaatgtggtgacaaaattttatacgttatatcagtgccttgatttgtatgttatattagtgccttgatttgtaaaacgataattttacttctgcttgcttttgtttttctatactctttttcttcatgcatctgctttgcctcggtacagggtgctcaaggagaacggggtcctgtaggttcttcaggacccaaaggaagccagggggatccaggacgtccaggggaacctgggcttccaggtgctcgggtaagaatatagcaagtgtttgctacatcaaaggggagaagtgctcctgagcatgcattggtcgggtttttgtttgtttttaaatttagtttgtttttacagtttagaacatttctttgtttttatggttttgatccaattcattattttaaaaaatactggtttgttatttttatcatatatagaaaacacggtaacttctagtctctctcaaagcagtatgtattaatagctttatcacttggcatgagaaaaaaatcctgtttgtcaaattttataacttgttagcaagtaaagaatttataaatatttgtaaatatacttttatagcaatatagcaaataaagtaattttggcagagaaattctgaaaaattttaacaatacatcacttaaaaatttatttgatttacagaaatgtcattctattcagttgacaaaaatgcaacactatttttactcttaagaatctttacttcaactgcatatcagcaacaaactgacagttggttttttattttcagggtttgacaggaaatcctggtgttcaaggtcctgaaggaaaacttggacctttggtaagtaatttaaacagaagtccacaaccactaatatttttcaacagacatgcaacttaaatgatatttatttaggttaatgtttttgattatatggatgctggtcatattgacatatttgtaccaacttctggaagcatattcttaggatctattttcaagttgacaaaaatgtagatcaaatttttactaagataaatatttgagattgaattgcttccctgcctgacatcagtgaaaatgttaaaatgatatagtttttaatgttggtgaaatttgtctattagcaatgttctcatttttatatccttctaattttatatgtttaagagataagtaggtatgaattttgacaacttatatattctaagatcttcccttgttctgcaatgtgaaatagaagtcctgaattttcattaccacaaaccagagtaaatgaaagaagaaagatttcccctattaatatgactgtcaggagacatcatgaggaagctcatatctagaataagaataaaatctctcttctagttacttaaaatacttcagtgttttttaaaaaacccattcaactgtcctgattctttaacatgaaaatgcaagataatttaaaatttatgtaacatgatagtaagcaaaggtgacactttgggtgatgctatgtttagaaacaacttacatgaaacttacatggctcctgtcaattctatagggtgcgccaggggaagatggccgtccaggtcctccaggctccataggaatcagagggcagcccgggagcatgggccttccaggccccaaaggtagcagtgtgagtacagtgtataatatgttggccacctcatcatgatcctcatttggaggaggtatgtttttgacaaattgaaggaattatacaaaagtttcatttattctttagggtgaccctgggaaacctggagaagcaggaaatgctggagttcctgggcagagggtaaatatacattttctgctaaagaaaaataatgtaggtactatttaaattatcatagactcacctcacaaatatctgtgtgtgatactagggagctcctggaaaagatggtgaagttggtccttctggtcctgtgggcccgccggtatgtgatttttgtgtgtgtgtgtgtgagaatatatatatacacacattgcattttttcgatgatgtttgttcaagacttatgggtaagtttcagggaaagtgaataagaatgtatgggaatgaagaatttctgttataccttctcttttgatttctgtgagataatgtcttctgcctttttaaatataatgattgatctttttactttaaacttctgtaaaactctgactgcaaaggtttttatatgtcacagttaaggactatatcaactgaagaaaacagtgtgtaacaaatattttataaaatattttatttaaaatatttagatactcaattatttaccttctctcaataatgcatcttataaaaatttatgtaaggccgggcatggtggctcacgcctgtaatcccagcacttagggaggccagggtaggtggattacctgaggtcaggagttcaagaccagcctggccaacatggtgaaaccctgtctctattaaaaatacaaaaattagcctggcatggtggcatgtgcctgtaatcctagctattcaggaggctgaggtaggagaatcacttgaacccgggaggcggaggttgtagtgaaccaaaattacaccgttgcactccagcctgggtggcagagcaagactccatctccaaaaaaaaaaaaaaaattatttaaggtattttttaggacataaaaggaataatacttattctttgaggtctattttcattttaggactttcaaatgaagtgtttatccgaaatattttggcatatttttttgggggggtggggcagtttaaatctttctaaaatgttagctttgctttctttagtcattctgtttttgaagtcttgataaataattcttaagacattcagaaataaactataataaaaatattatgtttttagattacatatacaaaagtaatgggttttcctatattcaatccaatttccccataagtttacaattggctccagacatttaagtttggatcaaaaaataaatacatgttatcagttactggctttagaagatattttctcacctccagagacttcaaacaataccatttggttactattaatactagtttattacctggctaaagagaaaaacatgtgattggaagaaatacaaataaatatcagtacttctagtggttcacgtagagaggaagcagacaaagatctggttatattcacaattattttctccttcacaacttagggtctagctggtgaaagaggagaacaaggacctccaggccccacaggttttcaggtatgcactaattcggttttccatttcatcttccattaactaaaatgctttttttttttaaaaaaaaagatatggtcagaagatttgaaattctacaattttcaaaaagtcatccctcttttagtagatagtatagacatttggataaaatcgaacatttttgttcaaagtaaaggaatgggcttctaaaaaaactgatcaaacctgcaaattatgaacaaaacaaataaaaaataacaaaaaagtaataaaaagatatcaggaataaaatgtttctgatagctcaacaaagtttatgaaaccattttaaggctgattttgttttatcggcacagtgactagaattttttattgaacaaagtttcataatttatctacatatatcagtatgtacattatttaataggaggaagatcataatttgtaaaaaaaactttctggactgactttaaataatattctagcagtctaaaatattgttcacagagccataaaaactctataaatatgaagaagctcctgttacattatctctttttttgctaagtggtgtgcagatgaaaatacaatcctataaattgactagctgttgtgttttattggtagtctttttttaatgcttctgaacaatattttttacttaaaatgtctgaacaatatattttcattgaaaatatagtcttggagaccccatgaattgtaaaaggtaaactgttaacactggtagcctgttaaacttacacagattcacaattttattttcttacttttgttttaggggcttcctggtcctccagggcctcctggagaaggtggaaaaccaggtgatcaagtaagtgtttaaataataataatggcaacactatacattgctggctcaattatcactttttatgtgtgaggctctgttgtgctttcctttacatacattatctctttgagttctcaaagcagccctatgtactaggtactatcattatctccattttgtagatgaggaaaatggggcatacagatgttagataactttcccaaagtcacacagttaatagatttgaacccaggtcatctgcttcccaagatgtgttcttaaccactttatataaacagttatggacaaatactaacaattttattctgtcgttttcctggctcatagatttatttatttttctttgaatgattcatttgttcatttaatcatttaataaatatttgctgaacactctgtgtgcttgcctctacaaagcactggcctgaaccagctgaacaaaatggatttggaccttgctgtccttacagtatagtaggattcagagagtataggacaattacaataatagcatgctctaaatgctataataagggaggtactatgtttatggaaacaaaaaagatgcacctaaataagacttgggggttttaggaaaggttttccagacaaagtaatatcttttatgagatctgagagatgaatgatgataatgatgaaggagggaagataggaaaaacctccaggaaatgagacaagcttacaaatcagagtgggtaatgtaatttggggaaaatagaaagggggctgcagggtgactcaggggcctgattatggagggctttaatttgattctaatttgttcttcatcattagagtaatgggaagctaaggaagagtttttaggctgggcacagtggctcacacctgtaatcccagcactttgggagactgaggcaggtgaatcacttggcatcaggagttcgagaccagcctggccaaccgtctgtactaaaaatacaaaaattacctgggcatggtggcacatgcctgtattcccagctacttgggaggctgaggcaggagaatcactttaatccaggaggtggaggttgcagtgagccaagatcatgccaccattgtactccagcctgggtgatagagcgagacaacgtctcaaaaaaaaaaaaaaaaaaaaaaaaaaccagaaaagaaaaaagaagggtttttaaggaaggagtaatatgataagattagggagatcaggccacagtgaggacagtccatttcggagaataagattggaggcctatttgataaagttatctttatcaaagaaagaaatttcaaattgacaaactttcttttatgtaagaacaaacaaacttttaatttagacatgactgcactggtttgaatgcacaatacctagtagagtgctttgtccatattataggctcaagaaagatttacttaattgagtagaattggattggttctatttaaaagaccaactctttagccctttttatataacttttctttatttaaactttttcatcttccattagtttaaaaaaagacatttagcatgtattttgttgcctctaaaaaactaatgctctatctttgtgaaatagtactttgcatgttctcattgccaaaaatcaaacattcaggtataatacaaagttttttggaaaaatgttttcatctaaaacatgtaatattccctcatttataaaaatatacgtacttttctttctttaaattgttggcttatgcagccttctaatggcacattaatagaaactaggtgtatgaactggaaagttttctgataaatgcctaaactcaaagctcttgttccattaaaaaaaaaaaatgtgtttatagggtgttcctggagatcccggagcagttggcccgttaggacctagagtaagtattttaatcttcatgattaatgttgtttcccactggcttcagttttaaaaggtgtcttttaaaatcttaaactgggatttattttaacctataaattctttgactggataaaaattaattttatgagaaatattttgtgctatgaaactagcatatccttacttcaaatttatttcttatcactaaattagaaaattgagatttagtaatgtctcatttctgaatttttccgcagtagaagccatttctcagaaacattttgacctatttttagatcaagtattgagattatttgacatcccaattttgtgctagggagaacgaggaaatcctggggaaagaggagaacctgggataactggactccctggtgagaagggaatggctggaggacatggtcctgatggcccaaaagtaagtgtcatagtgatctcagtgttttaaaatgctttaaaattactgcttaataaacgcatgatggtgtgagaatgcatttgtcttgtttttgaaagataatttgattatatcattttcttcttccacaaatatttaatgagcgcttactaggctttttccttgcaactaaagtgtcagctaaaaagaagactctcttctttgatggggattgtagtttagtgcacatggtgatagacttccatatacaaacacatttctaatgtttatgtacattttattagtggcttctatgaataaacagaggaaagaaatagaaaattacataatttattaggaggcttttctaataatatgctccattttccttgtctcaggtttcacaattctgcttactacatatgtgaaaatatggaacttttaaaatctgaaaatataatgcatcataaggcagaaatgtgtgccatttagtgattggtagaaaataatgtggccaacttcagtataaacaattgaagtagaatttttcatggtcatgtgacatgagaccccttattattttcagggtttagagtgattgatgcagtctactacaatttagacactatattagcctgaaaaccaggttaatatcaaatatcagtttcattaaagagagaatgaaatatttctctaaatgtaatgtctttctttcttaatatattccattatgttgccaacagagggaaaaaaaggcaactctatcctttttatttgaaatagcgttcaattgcctcttaagagaaaagttaaaaatataaagcagcaatcaaaaacaaaatctggtttttttaatttcaaaatatcaactcactcagagacaactttctcagatgaaaaatataagcactaagttgaactacatgaaattgctgacaactacttttgacccactaaaaagcaatttcattagtttaatcttaatattattggtatggtcacttaatgttggttcattttagggcagtccaggtccatctgggacccctggagatacaggcccaccaggtcttcaaggtatgccgggagaaagaggaattgcaggaactcctggccccaagggtgacagagtaagtcctttttttttttttttttttttcagttcatttattcagactttctgctgaaaatgaaatgatttcttgagcaggcttttatttctaccatcctgagtcactagtcattcatttttcattcttctaataaacatttactgagaaaatgcacagtgtgaggcaccatcccaggctcacctggatacgactaggaaaatgacaattagccttcactctcatgaaacttacacacaagtgtgggaaagagacaattaaatgaatcaattgtattttgtgtgttttcccagggtggcataggagaaaaaggtgctgaaggcacagctggaaatgatggtgcaagagtaagtgaaagtattccttttctagctgggctaggaaccaacattacagtatcatatgagtttccctgaaccttccaaaataaagtcagtcatgtttccttggtagtcaggagttggagaataatggcatgtgagatctgctgtgattcaaccacggtttattcattttgcttaccctgaattaaatgaaacttaaataaaaacatatttattgtgcctatgagataagtgccttaaggggatgggggccctctttatctttctctatcatctttttatttcatacacaaggtttatttctgttaaaatgctaatctagtgagctggccaatacttcattccagcatagacaagtagagctttgtggagtcaccaaagttgtgataaatgtttctcagtatattggatgttggggtgagaaatttactgcacagtgaatcgtcattaatgttatcattaataaacagtttgaacaagcagaatgtccagaaggatggtcaactgcaaagcattgtttaatgtcatgtcagaaattgacatttaacaagcgttaggtctttgaaattagaatgcatttacaattccaaggacaatcagactcgaaggacaatatattttcagacataaatgatttcctcatgtaagagtggctagtcacaatggcttaaacatccatcattttctggaatagtacctgatatttgactaatgatttctgtttcagtatgacatggtttgctgttagttgtcatgtgtgccctggcaattacagttgtaacataataaaagagaactgctatttggttctgcacattgagtcattgttaatacattggttataatagctttagattaaggaaatatagtgaaatgtagtagaaaattttcatcttaagggtaattagtcctttttatgcaaatttaattaaggatgcaccacttcttttaacaaattatgcacaaaagatacaccttgccttttagttaaatctaatatttaatttaatatttcaaaaatagtcaagtaaatctggcatatttttaatattttacatcatggatgtcctggaatgcataagtagtgcagtactatttataggaacgatgcattggcagtttgttttaagggaaaatctaaaatacatatcaattgtgcctatgaactaactttgaaattgcaatgtgataggaccaggatgtaagcaatgactgctttatttttaatgaggacactacattgttgcaggaaagaagcagagcaaagcacttactgcaatctcatagtagggaaaaaatgaataacatgttttctctgtataaaaaatctataaacataagtaatgaagtgatatttatatttcatcaaatcctttaaagaagtatattacataaattattggaatgatatcattccattgtagatccagagactataagaacacagatttcttatgttcttgtcaaatctataaaattaaagtcatttttgttccttaagtttctttagttgtacatacagaaattaaacgatgaaagaatatttgggctgcatatgaagaggcaagacacagttataagatagagaacttgttttaaagaggacttcaatattcccacagtttcaagtttgtgattacctgtcaagaagactcaggttgtgtccccatgtgttagctgtactgtcctctaagtgttagctctcctatgcccataaatctcaaagtagctggggttttaggctgtaaactttagctacttttccttttcatctcaaaagaatgaagaaaactggctgggcgcgatggctcacgcctgtaatcccagcactttgggaggctgaggtgggcggatcatgagggcaggagatcaagaccaccctggctatggtgaaaccccgtctctactaaaaatacaaaaaattagccgggtgtggtggtgacagacgcttgcaatcccagctacttgggaggctgaggtaggagaatggcgcaaacccgggaggcggagcttgcagtgagccgagatggtgccactgcactccagcctaggcgacagagcgagactccgtctcaaaaaaaaaaaaaatgaagaaaactaagtcaggcatagtggcttgtgcctgtagtctcagttactctggagtctgagatgggaggatcacgtgatccagggcaagcgttcaaagatgcatgtgctgtgatcacatctgtgaatggctactgcactccattctgggcaatgtagagtggagaccctgtgccaaaaaaaaaaaaaaaaaaaaaggaaaaaacacctaaaatgccttaacacaatttcaatttttaaaagtaaaaaagtgatattttgctattataatttaagaatataatattatatgcaaaagaaggaaagcctcttttcaatttgtggtcaaatgtccgaataaatattagcaaagctaattatgctaagaaatagaaacatttttgtagcttagcattaatgtagtgctaatgcctgaaaacagttttatgtatgcatgaattaggttgcatgaaagagattaaaacactgtgtggagaaaatatggtggaaatggtattaaactagacagaaaactcttgaaaatatatagattatatcatttattatagataatgatttgcaaaggcagccaaattataacaaaatagtcgtttcttttttgtttgttgatttgctaagcatgaagatttctgtgcattttttacctcaatatgcctatgttctgttaattgacagggtcttccaggtcctttgggccctccaggtccggcaggtcctactggagaaaaggtaagtcacaagttgttaatttgtacactcaaaattatgagtcctgaatagcaggctctttcataaatcttttcattttataacatatggtatctgagcaagatcatttcagagttcttttccactatctcctcctacacagtgaccaatgtcctaaaattatgtttagctactgttttggacagtaaccatctaaaatctgctttctagggtgaacctggtcctcgaggtttagttggccctcctggctcccggggcaatcctgtaagtgacagtattttggtgttctttagtgtgagattgagcaataaaacaattaatcattttgtttttatatttatataaaacaatgcttattggttttaggttatgtataacttcctggtttttagcttttgcttttctaattaaacttaaaaattatctgctatacaatctattaagtgtagttaggcagcttgtttactaactaatttggaggctcctttgagacttctgaccttgggaattttgttctatgacctatatctttatataatccttaaggaccttccttaagcaatatgtgtaatttttctatatttacatgtctaactatcagatttatatgatcatattttaaaatactgttcctgtttaggataatgtgtgaaagctacagtaatctttgtctcctcctagggttctcgaggtgaaaatgggccaactggagctgttggttttgccggaccccaggtataattttcaaatatccctaatttacaaataaacacttatcttgttataataagtttaatgatcattgtcatatgttttgaagtcgtattctggaaaatttacagttttctagacaatattctcattttcaatacatttttttatagactggcacaaaacttgtttgtgctagttgagcttctataattatttgttaaaataaaaatgcagtgggatagcttattttttaggctgttttgaaagatctcatcagagtactttttttcctttagtatgctttaatactgattataaagcactgtttcacaatatatgattaattgatacattagtaataattactctaaagtaatttgtctataagtcttataatcaattgcttgtttgtataattttttatagggtcctgacggacagcctggagtaaaaggtgaacctggagagccaggacagaagggagatgctggttctcctggaccacaaggtttagcaggatcccctggccctcatgtaagttaacaagaaaaaggcataacttgagtcaagtgccccatgtttggagtgtacattcagcctcttttgcttcactatagtgctcttttgtttgtttctattcagggtcctaatggtgttcctggactaaaaggtggtcgaggaacccaaggtccgcctgtaagtttatttgatgctctgcaaagtatgcacagctaattctagttacctagtgcttcctggtcatgtaaaagataattttcatctgagactgaaataacaaattattacctgtatcaactgtactatagtgcaaagggcacttaactcagatggagatttgggttaaaatcaagtttgtaatcttggagacccaggtgcctcacctgtaatgtaagtaacatactacctatataaaagagtaaataaacaatgtgaaagcactttatttaatttgattgtataaaatatcaatgtgattctagtactacctgcatggaaaaaggaaaatagtgcccttcctaccagttaatctagattaattccccaaaatatgggattcgtacgaagaaaaaaaaatattgcttacaacatgaaaggaaatctaaaggcttcagtcttcctgtgaaaaaaaatcccaggaaaatacatgtaactaatttatattaccttaaaaattgcttatatgatattctggttctagggtgctacaggatttcctggttctgcgggcagagttggacctccaggccctgctgtaagtcaacttagtgagacaagtcactgataatgaaataattacacacacacgtatacatttgagttaaatttattattttatttaatttcttaatggtatgttttcttatttaacaactcttattccaataatgcatgctggtatttcagcaaagcaaatcatccttaataatctagtatttcttggaggagctaatttgcaagttctttttagccccaatgttttattattattccgtttaaatactgaatacttacagtattatgtgctaataatcattctcttcagttaagatgcaactatgaaactttctttaataaatgtcattcattataagatcaaatcataagaataaataattatctcagaataaagtattatatattcatcattggagtggagctttaaataagtttgaaaattcaagttagttgcaccactctttaaaaattattcaaagggaattgactgcaaatgatatttagttttccccctggggaatgaatctacagctgtgttttcttttgttttgttttgtttaaatcctatagaatgactgattatctaacaggtaaaatgaacctgcgaggcttggacatctgcatctgaggcagacagcgttatgtcaatcactcttacttgccttccattttgccctccttggtgtttctttctttgttatactagggagctccaggacctgcgggacccctaggggaacccgggaaggagggacctccaggtcttcgtggggaccctggctctcatgggcgtgtgggagatcgaggaccagctggcccccctggtggcccaggagacaaaggggacccaggagaagatgggcaacctgtaagtttggcgtatccgttccagaccaccttcaactgagatatttacaaatagaaacccataatgatcagtgtcacaaaaatgcttaaatattatgctgggcacattcctaaaatttttaaagtgcattaaatctataaggctttaggaaaaacgtgtatatatatagattttaaaaatagcagtaatagatatggtatctaaaaactaaacccaaaaaaattatttgttaaatgttcattgtgtatgaataactttaaaaatatatgtatattatattttatatgcaaatgcctttaaatattgtgtttagataactcttttttccttattgttaaactttctttttgtctttttataaagaagaaaaaatatttctctgaagttacctcttttattgagtcagtattcacattaatcttcagtttctttccaacggatgagctgttttcacctttaaataatgttagaggttctgtgcggattacaatttatgactactcatatgcagtatgattttgagaaacagagaacttctttttcatactgaaaaacctgtaaagctgtacccaacttattgtaaattccttgggtacagttttaccctggatagtttctgattttagtttgtcctcaacattagggtccagatggcccccctggtccagctggaacgaccgggcagagaggaattgttggcatgcctgggcaacgtggagagagaggcatgcccggcctaccaggcccagcggtgagtagctgcatcggtcaatattttatctcatatgtgcaatacaaattgtttagagaattgattttattttttttgcttgatgaatagatttaaacagtattgtagggacattaatttttgagtctcttaaaaatcttttgatcttaaatgtcaaattcttaactaccttacaaagtctttgaaaatatatatttgtttaaccctgagactagaaaagtaggcaaataaggatatggatttttggtgacctttaaatccttcttcaaagattaaaaagatcccggagctagaggagggggataatcttctggtgaataggtagtgtctttttaagtaaacatgcttaacaaaaataccatattttacagtaaaccatcaaagggaagacatagttgagctaaagtaatatttgaggtgaatgtagggggaatgctgaagaaggatctgaaggtaatctcctgttccctggagggtgctttaggattttatattccctggagtatggataaaagtttgattcaaagttagctttgaagagactaaattttattgctaaaagattacagtgcttgaaaaaaattaatgatgttttcatatggaatgtagacagagagatgtatgggatcttagaactgggagacatgtgggttgaaatatgaaaccaacaaagtaggagctaagggatgtcttattgttatcagaagtgagccaagaatgtgaaagtaaaatctctcaagagtgagatcaaagtatcagaatatagaaataaaatgaacagacaaagcagagcggggaaaaaggatgaaagtgatgcaaattccagaagggcagctagaatcacctatggtacacatgattagaacccaaaatgcacacctgtgctggtggcaacagatggttggtttttggtcccttagatacgtcaagaggagtctgataggaggtgggcaggcctctaagaaagcattatgattacatgagtgttgtaagataatgcaaaattattattatagaaggagcccagaggcaccattttgaaaacttagcctttatgggaactagcgttcttcaatttcttcacaagtgtttgacatttatacttctatttcagggaacaccaggaaaagtaggaccaactggtgcaacaggagataaaggtccacctggacctgtggggcccccaggctccaatggtcctgtaggggaacctggaccagaagtgagtactacagtgaaaataactcttctcttgttatctggtgtcatggaaacaatttttttcatttagcaattgatttagaattttattgcatatttgaccttaagaaagtttcttagtaatgttatttgatgtactctacttccctagagagttggctaagtgatgacataaagaaaaggtaataggatcggtgtctttgcactgaccttcatctagtctggagctaagtattttagttcatttaagctgttgccaaactgttttgagggtgaaaggacacatccattcatctttcccttgttattatttcattttgtaatgacatatttatcaaaattgccaagttttttggtgataggattaatatagctattccagcttgtgaaaagggcaaagttagtagagatcattttacttaaatatcactataaagtaacataatggatatcatgttcctttaggcacttttgggaggaaatcagtttttgataggcaatttgagaagttaaaggctggaatatcctctgttcaggattttaaggagtgaatcatcaaacagttaatgtaacattttattgaaagaaagaatcaatagcctttggaacaatttttgatcaaatagcaaagacatatttatgaaaaaaatcacaataaaatagaaaaggaagactatttcttaaagtagtttaatattgaaacagttattttatttcaaaactttaaggatatttgaataatcttaagaagtaaatgtaagaaaagcctttcattgttaatacaagcaaaacataaagtggcaagaatgtaattgttatctatttcaaaatatttgtgggttttttgtttttcaaaataagaaatataaatgaagaatatggattaagtaagaatatgttaattttacagtaattcaaaataatgaaaaagaggtagaaaccgttcttctgctgacatttgcataaatgctaactgacagtttataaaacacaggtgtaaaacatgctgtcattttttgacaattggaatgaggatttttttcattactcagttaagtagtttttcaaaccattattctttatagggtccagctggcaatgatggtaccccaggacgggatggtgctgttggagaacgtgtaagagccatttcacttattataaaatctaaagtcatgcaaatctgaaatctttttaatttacactaaaaactgtcatttttcctgatagttccaatacacttctgatttttctgaataacaactgtttctgtaaagccataatttttatatcttgtaaatgaaatgatatttgaatatgcaacaaattaagatggtattttttcagagcaggaagataaaattgaagccatctttggtttaacataaaggctttggatgaggatatatatgaagtgttctaaattttaaactcattaacaaaagcatgaaagccaaaatagtgctgtgtaatgtctaaatttttccattcaccatctaaagtgaatgccgtatgagaatataagccatgtggctttttaaacactgtatattccatgatgtgttttaaattagaatgtgctgaactgaacatgtccccaactttctctgaagccccagtcccttctggcagttgcacagtcatctcatgctgctgagatgggccactgaaggcaaaatcactccccactccaaagtctgttatgatgtaattaaagctcatcatgtagcagaatgggctttggagccagtcagacttgatttggaatattgtttccctaagtaattagctgtgtaatcttaagcagattttctgaacctccattttcaaatgctttaaatataattaatacatatgccattgggcatttgtatattaaatgacatgtttaaacactccactacaggatagacactcaacctcatattgaaaaaaaaggggaagaaaggatttggaggaagcttgggctaagtcccgctcatctactataatccacagactgcaaattctcttggcaacttgggctttttcctttgtcaatatatactatatagtgcaaccatcttcaaaggttttgctgaagtaattatgaaaatcggtaaatctctctacttattttaagttgccatcgcccttttaaaatcacaagtttaaatagttgcaaaggaggtgattcctggtaaattctaaatgtacaagtgctttaagtatttttttttttttttttgagacagagtcttgctctgttgccaggctggagtgcagtgacacgatctcgtctcgctgcaacctctacctcctgggttcaagtgattctcctgcctcagcctccccagtagctgggactgcaggcatgtgccaccacacccagctaatttttgtatttttaatagagactgggtttcaccacgttggccaggatggtctcgatctcttgacctcatgatccggccgccttggcctcccaaagtgctgggattacagcccactttgtgagccactgtgcccgggcaagtatttttttttttttttcaaaaccttgaagttgccaattcagcttattcaatgtattatgtgtctgttctataacctaattgccaaagtttatctaggttgataaatttatcagtcaaataagacaattttttgtcagaaaatacagtctgactcaatttttcaagtcaaatatttatgtttagacatgttcatataacgcttatctcacctctgacttcttaaggagacaagtaatatttggagccttgtcataattgtgtcatctggataaaataaaaaggagcctctttattttccaaatccttcgtagctttatactcaagtaaactatgcattctggaaaagtcccttagttcagtgcctagaggtatttattccttgggacattgcatcataataagattgcagatggtatgatttctgcttttcttttacaaaatgagagaaggtggattatttaggggaagtaaggaaggataatcaaaatatagttttctgaaagaatacataaggagaggaaaatctagaaggtggtttccttaaaattttctttgttttcacagtctttggaaagtctttgtgtattccaagtataccaatattccagcttaaagattggtgctctagaaaacatgttaaattctggaggtgatcactcctatactccaatgatcttgacgtgcgagcaatagggagtaggtgagggaaaggatgagacttgaaattaggaagaaataactttattcttttcaatttgatttattaattaataaatataagtaaaatagttaaaataataagtaaaaataagttttaaagggtattttttcccattattaatactataagaataacatgaacatatggaatattgttgttttagaataaatgttaaaaaataatatcatggttattcttgttagggtgatcgtggagaccctgggcctgcaggtctgccaggctctcagggtgcccctggaactcctggccctgtgggtgctccaggagatgcaggacaaagaggagatccggtaaggagggagtcaatttcacactgacagttttgcacacccatatgctatgttataagctgcatataggcacacacacatagtcatacatgtgcacttcgttaaggactctaaataatgaatggtaaacagctaattatgaactactatatgtttcttagtctgaaaggcaaaatttcatttctaagagggaatagaagatactgatgctttgacttccatcatctgaaaatgctgtagtttgaaaatgtaataagtatgcatcatgttaaatgtcaatgaataatgtcttactgtattcaactaaggtgatacttattcaatgaagtcaatgaataaaattgaccgtaaaagtgtcattgaagttatagtgaccacagtcttatctacacatggacatttgcctgatttcaattaattaatcataagagtatgcacacacacacacacacacacacatatatatatatgcatccaactataaacgtattgttgacatcctgtatctatgtaatatgtgaatatcttttttacatgccaattttttttgttgtaaatttcttttagggttctcggggtcctataggaccacctggtcgagctgggaaacgtggattacctgtaagttctctttttttgttttttaaaaaatgttttcttatataaaatatactcccaaagaagtataatttaagattcataactgaaaaatatgaaattcctcaagcttgaacaaaaatattaattaaaaattataagtttactcttattttttaaagtaatacgagtttatttttataattttaacacaattcttctgaatttaaccatgaattatatcaataatcatggaggtttttaaagtcacaggtttctcctaaaataataggaattatagtgcatttctctctgagctattctaaaaactacataggaaaatggatttgaaagctctctgtaaacttgaaaagcactattcaaatattatgtttcattttcaactagatttttctttctatgttctgatctttgtgctatttgcaatcagtgactttcaggttaacattattatatagatgtcttaccatgaatgaatcatctcatgtgtaatctaataggtcatatgcttttcatgcccatcaggtaaatcaatgtctgttctcaaaaagaacaattatactttgaaaatcatggccatattattaaataattctcctctttaatttgagcttgactggcaaatattttatagttgcatagcatgtcaagtgaacagtgttttgagcagttatagaaacattgtaattttgttttctatgaataaatacattgtagttaataattcaaataggtgccttctgatttagtttagttttaattatgaaactttgggtcatcccccaaataaaagaacctttcgaacattatgaaaaacttcaggctgattttgatagtatttaaatttatattgttatataaaatatgcaaaagctactgaaatcatcttctttttattataaatgggttcctatactgtatgataattaggaaatataaattcaaaatcaaaacaataagggaaaaattaacctgagagccaattgatttgatgactgcagtcatcttccaaagtcagataaatagggattcagttatcttttgggaaaacactaaaagcaacagaatccggttctatagtagatgactctatgccacttgtcagtttactgtgaaccactcgttccctggagctgtttttaatttcccaggacttaaaacaaaacaaaaccaacaccaccaccaacaataacaaaacatctgagattgatcagataattttcacctcttctctgggtatagcttctatctcaaaataagatccctaactacggctttctttgtagccgtagatcaagcttagcatcaagatcactggatttggttacagatattgcagatatgggataacttagagttgctttgttctttagaggaaagtggcttaaagatgatatttctgtttaatttgttcaagcaagtttttgccaatttcttaatatagttgcagctgtcatagccagctagtttatttgcatatgtaaatttaaaatcatttcattgttacacacggcaagtatgaaatgttttaatttaaaagaatctatatatggtagcaatatttttatataataatatcaactaaatatgtgaagcataatctttaaaaaacatttcagataggctagatcaaacaaaaatatctaattttagtatgaatgtaagataaacatttaaaaaataaatcttcagaaaagtattcttattatatcttttttcagtgatcacctaccattctttgggaaaaataaacagaaatttctaggtctaatactatttttagataagtaaatatattaatccatataaaataccaagttcaaaattgtagtaaatacaattataaaaagtaaaattttagtaaattttagtctcaacaataatatgtagcaagtaattttcatgccatatctctatttctagggaccccaaggacctcgtggtgacaaaggtgatcatggagaccgaggtgacagaggtcagaagggccacagaggctttactggtcttcagggtcttcctggccctcctgtaagttattcctttaagtattattctgccctgtagttgaaaatacacgggtatcttgacacgaacatttatctgtctgtaaaataggtggatatgtttgtatcttattttcagttcaaagaatatcttgatgaataacaagtgataattgccaataataagctataattttgtagggaagaaataaagcaaaagctatatgcactgttactcctacaggtgtctttaacattggtcaactcatgtagacattgcagagattggtgactttatcaaagtagttcatgctgctaaagtcaatgatagcacatttttgagaatggcacaatgcaggatccaaatattttggcaacattttttattgtattcctacttagggtccaaatggtgaacaaggaagtgctggaatccctggaccatttggcccaagagtaagtaacaaaaagtagtaagttgcaggtgtaaataataatgcctttgttgatgtactgctaatgcttgagtatcgttttcctggtattgaagctggagttggctcatcttctctgaggttggcaacacacatatgagacaagctatttagcaattaattttaagtagaaatatcttgaaatatgatatattacctcatgggcccgcaataaaatttattacctagggtttggatatattcctctgttagttcattttgttacattgtgttaatttaaatttctattcaactttcactttttgagatgatgtaatagcatttactatgaagtggagacagattttgaagctaaatatattttgtcttttaagtaatagtgatagttcctcagaagtagtttacataaagctaatttggaagtaaataataaaatgaagccaatatttgaagcttttagaaattctccattagtattaatgttgcttgtaataagtcattgatggcataagacaattggtggacataattatttaggaaaatagaaaatattttgtagaaaaaattagaaaaaataatttaaagaatcttggtatatctgaatacagtgtaaacaaagcatacataaaattcagaataatagtacatgatggcattctgaggcataagcacagaaatttcacttaaacactccaacttctgtcattttcttatttcaagttaattgaatttctaagtttacaatatgtgaggtttaatgaaagttactaccaataaaagtaggtgattagtccattaaagatgtaaactcatatttgtcttttaccatgcatggatgatggaaaattcttatgtgatgaaatcataaatgttacaaagtaccagaagttcatttattaatcagtaagaaaatgaatcttagaaatcactgttacagctccatatgtaaaatagttctttgattagagaaaggcattgtaaaatttttccttcatagaatctaaactacagtctttgtttcttgcagggtcctccaggcccagttggtccttcaggtaaagaaggaaaccctgggccacttgggccaattggacctccaggtgtacgaggcagtgtaggagaagcaggacctgaggtaaagtcacaaaggtttacatgcaagaaatgctatttattcaatagctcagattccgtccaagaaatgtctgtgcagcccgattgacaagagacttaagggaccccgaaaacaaacgtagaagtcacacaagagtataagtaactatttcaagtattttaatacagataagttagagcacataaaatcagagtccaacctacccagacattaacataatgtgatactaacaagagcaaagaacaagttataattgtatttataattaaagttatgaaaatgttgatttgctctcaagggcaatattttaaatgtctgtgaggtatagttattacttcatgaaaactccatagaaatgctggacaatgaagagtatgaaattgaagtttttctccattgaaaacattcagggaggactttgattaaaactttttgtaaaaagtttcagtagtgttgacttgaggatgatacaaagctgtatactatgttagttagatccttgcttctcaggtctgggaaacatcttcatacatcttccatgcacaggtgtactcatgtgcgtgtttgtatatgagcttatgcttctctctctggtgtttcttcctcattggtctttaccttctcttccttacttttcctttgcccttcatagcaatactgttaagccagatatttacttcttatgtggatcaaatagtcttatatttcctatggacaagagatatgttttctactcatttatttctctaattgtgaataggaaacagctagaaaattggaataccttcagcttatgtggctgttgattgactttgtgattcagtgggccttgatatattagaaaaaagtcttttcttttctcttaaaattagtataaaggaacgcatgaactcagtatatgaccttagagacaggaagaaaaaaaaattatgtaacagccctttgagagtgaggaaacattggcactgaaggtaaaagcaacttgtctggagccatataacaagtggcagagccaatagtagaactccagccttctggagagttcttgctcccagatcttgctctctacatgagatgtggactatgtgtctcttcaggttgtcacctggttctttcaagttgctgagttcttccttggggaagtgcagaagggaattaatagagaggatccatttcgtagtctctgccactttttgtgcttatctccctctcatttcagtgtgtcttatttggcaaaaaaaaaaaaaaaaggcaggagggctctttatttatgtcaattcaaaggctaaggctaggaatactgggcaccttggcacacacctgtaattctagctattcaggaggtgaaggtgggaggattgcttgagcccagcagtttgaatccaacttgggcaacatagtagcaagaccctgtctctaaaaaccaatactatttcttcagtttttcttaggacagagaatttttatctgtacaggaattaatgcacataaaaggacttcctgtgtttctctccctctcttttagaagtaggagtataattctcttgtgggtgtttcctgtgggtattttcttgttattgacatgtaatcttatagaaccagcagccactattcccctgcatgctttgttcagcttcatccaaaaataattttaaaacattttggttgtaccttgacgaaaatagtttgcaaatgaacatacatatctgcatgctattaacataaaatatgttgtatcttcaaggtaaacacctgagcaaatattttgtgctttgatctttatttatcttggatgctgacttgaagatatgtttcctgaaaaatgattgagcatcatttctcatccttgaatgttacagcctgttagaccacccccatctagttacaaaagggcgcgagtcatagatctccctttactgtcaaattggagtgtctcattggaactccctatgaaccaagttctaccagttaagtaaaacaaaaacaatgtgttaaatgtctttccaatctctttttaattagggccctcctggtgagcctggcccacctggccctccgggtccccctggccaccttacagctgctcttggggatatcatggggcactatgatgaaagcatgccagatccacttcctgagtttactgaagatcaggcggctcctgatgacaaaaacaaaacggacccaggggttcatgctaccctgaagtcactcagtagtcagattgaaaccatgcgcagccccgatggctcgaaaaagcacccagcccgcacgtgtgatgacctaaagctttgccattccgcaaagcagagtggtgagtagacagcagcccatttgagcaaaacccgttgtttctgattgtttattctcaactgcattccaaaatatgttactgactttctacttagtgatagatttgagataaaaatagtaaacatatcatggagcttataatttaatggtggaaacagtcaattttgtgaaaacatgaaaaaaatgctcagcatcactaattattagagaaatgaaaatcaaagccatagtgagataccatctcacacgagtcagtatggctgtcattaaaaagtcacaaaacaggccaggtgcggtgtctcacgcctgtaatcccagcactttgggaggccgaggtgggctaatcatgaggtcaggagatcaagaccatcctggctaacatggtgaaaccccgtctctactaaaaatacagaaaattagtcaggcgtggtggcgggtgcctgtagttccagctactcgggaggctgaggcaggagagtggcatgaacccaggagccggagcttgcagtgagttgagatcgcgccactgcctgggcgacagagcgagactgtgtctcaaaaaaataaaaaagtcacaaaacagatactgacaaggctttggagaaaagggaatgcttatacacttattggtgggaatgtaaattagttcagccactgtggaaagcagctggagatttctcaaagaacttaaagcagagctaccatttgacccagcaatcctgtgatttggtatatcccaaaggaaaataaatcgttctaccaaaaagacccatgaattcatgtattcatcactgtgctattcacagtagcaaagacatgaaattgacccagatgcccatcaatggtagattggataaagaaaatgtggtacatatatatgatggaacattatgtggccataaaaaagaatgaaatcatgtcctttgcagcaacatggatgcagcgggaaaccataatcctaagcaaattaatacaggaacagaaaaccaaatatcatatgttctcatttataagtaagagctaatgagcacacatggacataaatatgaaaccataaacactgcaggctactacaggggggagggtgtggatgggagcaagggttgagaaattacctattggatactatgctcactacctgggtgacaggatctgtaccccaaacctcagcatcatacaatatccccatgtaacaaatctgcacaggtaccccttgtatttaaaataaatgttaactttaaaaaaaatgtactataatagatgatatatcctattaataatccagtttcatgatggtagttccattttcatccagaaatcttaaaatattgatatttttgtggaataaaagcatttcgtggaaatgtggaaaatgcttgcttaagtattgttcaaaatatttatttacttgcatgacctataagtgtcttaatgttaacatattgctggatcatcaagcatatatttcccacatttaaatatgtaattcctttcatgtagtttaatgttctatgagtcatacttttggaatctctgctggcaggattatattattatgaggttccaagacattttggaatcaaatagttgttctgccctagttgcatgtaccaggcttaaagtttaccttattctgtcattttaattaatccaatatgacctagagaagagggatcctaagtcacaggagacaaatgagctacaaagagcctaagaatttaagttaactttgaaatgacattgacaggaatagctaaaattattatcattgaagaaagggcaattttattaactctatacattacattccgacactttcatttaaaatgcaattctcacatactatttatataatatacacacaaatatatgtatacacacacccatgtatgcaaatgcatattaaattgtgtatttgactgtatgcctaccaccaggcactgccttggtatttcctattttaagagtctcttatatatgagaagagtaattttaaaaagatctaatgaaatgattcatagcattctaattgtaattcaacttatttattcactttactcatagttttgatgttacattattttattacattatttacattattttgttacactcattctaatttgctttaaaatattggaaacacatctattttggtaaagccgcttactatagattttctcttttcggtatggttttctcatctataaaatgggggtaatgatatttccttcatatggatgttttgagccttaagtacatggtttggcaaagtgccttacaatagcgactagaatgtagaaaggcccccaatgcataccggttacttttttcgtaaggggcactctcacttaaaagaatccttaatcagtgagtgtatattttcaaaccctctgttaattcttttggagacttatagtcatgattgagattgtctttatttagtaaaatttctattttgaaaaataggtgaatactggattgatcctaaccaaggatctgttgaagatgcaatcaaagtttactgcaacatggaaacaggagaaacatgtatttcagcaaacccatccagtgtaccacgtaaaacctggtgggccagtaaatctcctgacaataaacctgtttggtatggtcttgatatgaacagagggtctcaggtaatttaatatgtttacttaaaattgtattctttactttttactacttattacatatttttgatttatttaggactttgctatttttttaaaccaggcttattttaccatgtttattttgaagtgatatagtctcattagttacaattgtaataccattgcataaacaaggttttgctatgagtgaagttaacataaattttgaattaaaaattttctcatggatgaaatatagaaaagtaattatttttactgtaagttcctctaatgtatgtgacatggactatggagtgtaccagaagtgataaactatagtgccatagttgataaacagttatttctgtatattcagcttcagcagacctggttacctcacggggatcttgtactgactttggggccttataaagtctctgaactttttggagactcagttttgccagtttaaagtaagggtgataatatttattccatagtttccatgtggatataaaattcttagtttagggtctcttgtactatgggatagatggtaaattaatattagataactactataataatgtctaaataattgaatcattttgtaaaatttttaatattatttaaacttaaggcatttttgtaatgttatgaagtcaattgatatttttctgagtcccagtctaccctgtttctatcatggtctggtgttcagacaactgtctggcctttccactgcctgttgcaatgtgaatatttcattctgcatctctttatggcagcctaattgaaattttcttctcacttctgcttctgaccttttcctagaaatcacgttcagaataaacattatgagaacattatgggtgtatacaagataagctagtatctgtcattatttaatgagcacaaaattttaaattttaaatataaatagttgaaatataatttagctaatataatatgtaaaataaaacccccaaatgggagtgctgaaaccaaagctaaagtagaaggtgagtaggaaagagtctctagaaaaatttttttgattatttttgttagcacatggaaaacttttaatatgtatttcctacaattgtgtaatagttggggtcaaaagattttatactactagttaattctaatttttattataattagcaataaaaatgagttatttttgatacatgagtgaagcagatttaaaaatacttatgcttgttctcgtgaattattgttattattggtttcattaccctttgggttaataaggacagaggttcttttgagtattcatagacattttaagatatgtttagatgtacagctagaatagcttactttatgacaagaattaaagtaatactcttcaaaattgatttatctgaaatcaatttatatatttatctatacatgtgtaaggcattatgaaacccttcagtcttgtgtatgacaaagactctttgtttttctagttcgcttatggagaccaccaatcacctaatacagccattactcagatgacttttttgcgccttttatcaaaagaagcctcccagaacatcacttacatctgtaaaaacagtgtaggatacatggacgatcaagctaagaacctcaaaaaagctgtggttctcaaaggggcaaatgacttagatatcaaagcagagggaaatattagattccggtatatcgttcttcaagacacttgctctgtaagtactttttgatctacattgatctggttgaggaaaaaaaattatttttgttaaaaatactattacagcactagaactgggggcaattttaccttgtatatgagcataatagcagtttgtttatagtcattccttagggtaaatgtgtgtgtgttagcacatgaagcatgatagaggtttgaatccatatagtaaagaaagaactggatccctaagatctgatccagttcttctgcagactttctttggttcttttccaagttatttaacttactgaatctcagtcccatgcttaaaattccttatttctaaaatgcgtaattaatccaagatactttattttttccaccaatttgtaagtaagtctccccgcttgcatattgagatataaaacgaaaataatactaaatggtgaattatagtttcatttgtgaaaaacaaaaaagctttcataatttatgttgctagtgaccatttgggaagctgcagaagaacaaaggaaatttacttaaagcatgaaagaaattctgttacataagtacactaatatttcactttatgttttcattccttttttttaagtagtactctaaaaatcattgcctttacattataaaagtgtctgggaaggttgctgtctaacatacttggaaaaaattgtatgtacatttaacccattgcatcatttaatttcagaagcggaatggaaatgtgggcaagactgtctttgaatatagaacacagaatgtggcacgcttgcccatcatagatcttgctcctgtggatgttggcggcacagaccaggaattcggcgttgaaattgggccagtttgttttgtgtaaagtaagccaagacacatcgacaatgagcaccaccatcaatgaccaccgccattcacaagaactttgactgtttgaagttgatcctgagactcttgaagtaatggctgatcctgcatcagcattgtatatatggtcttaagtgcctggcctccttatccttcagaatatttattttacttacaatcctcaagttttaattgattttaaatatttttcaatacaacagtttaggtttaagatgaccaatgacaatgaccacctttgcagaaagtaaactgattgaataaataaatctccgttttcttcaatttatttcagtgtaatgaaaaagttgcttagtatttatgaggaaattcttcttcctggcaggtagcttaaagagtggggtatatagagccacaacacatgtttattttgcttggctgcagttgaaaaatagaaattagtgcccttttgtgacctctcattccaagattgtcaattaaaaatgagtttaaaatgtttaacttgtgatcgagacctacatgcatgtcttgatattgtgtaactataatagagactctttaaggagaatcttaaaaaaaaaaaaacgtttctcactgtcttaaatagaatttttaaatagtatatattcagtggcattttggagaacaaagtgaatttacttcgacttcttaaatttttgtaaaagactataagtttagacatctttctcattcaaatttaaagatatctttctcctcttgatcaatctatcaatattgatagaagtcacactagtatataccatttaatacatttacactttcttatttaagaagatattgaatgcaaaataattgacatatagaactttacaaacatatgtccaaggactctaaattgagactcttccacatgtacaatctcatcatcctgaagcctataatgaagaaaaagatctagaaactgagttgtggagctgactctaatcaaatgtgatgattggaattagaccatttggcctttgaactttcataggaaaaatgacccaacatttcttagcatgagctacctcatctctagaagctgggatggacttactattcttgtttatattttagatactgaaaggtgctatgcttctgttattattccaagactggagataggcagggctaaaaaggtattattatttttcctttaatgatggtgctaaaattcttcctataaaattccttaaaaataaagatggtttaatcactaccattgtgaaaacataactgttagacttcccgtttctgaaagaaagagcatcgttccaatgcttgttcactgttcctctgtcatactgtatctggaatgctttgtaatacttgcatgcttcttagaccagaacatgtaggtccccttgtgtctcaatactttttttttcttaattgcatttgttggctctattttaatttttttcttttaaaataaacagctgggaccatcccaaaagacaagccatgcatacaactttggtcatgtatctctgcaaagcatcaaattaaatgcacgcttttgtcatgtcagtggtttttgttttgtgaaattcctttgaccatattagatctatttcatttccaatagtgaaaaggagatgtggtggtatactttgtttgccatttgtttaaaagatacaacggataccttctatcatgtatgtactggcttataaatgaaaatctatctacaacattacccacaaaggcaacatgacaccaattatcactgcctctgcccttaaaaatgtcagagtagtattattgataaaaagggcaagcaatagatttttcatgactgaataaactgtaataataaaacatatgtctcaaagtgtatcacatatgaatttagcctaattgttttcagtttcattctcaatatttagtttacaacatcattttcccctaaactggttatattttgacctgtatatcttaaatttgagtatttatatgcctaaatacatgtgtgagttttgtttgacttccaagtccaaactataagattatataagttcatatagatgaatcagaaatatgtggtaatactattaagtcacaaacactaacaatttccaactatagaaataacagttcttatttggattttgggaatgctaccaataaaagcctgcccagaccatt

SEQ ID NO: 53 - DNA, 154392 bp, Homo sapiens
ccgtccgggggcgttcctgggagctgggggccggcgaggctggacccgacgcgcccgggaggagccggccggcggccacgtgacccaccgcggcggggccggcggcccagaaatagcagcggcggcggttccgcccgcgggcggcgcgagcgaggggcagaggcgagagacgccggcggggcgcgggcgcggcggccccggaggatgctgctgagccccggcactgcctggctgcgagcacatgatggcgatacgggagctcaaagtgtgccttctcggggtgagtcctggccgccacccgccggcggaccccggcccgcgctctcgcgccccttcgctcccctattccctgcgcgctcagtccccgtgatcccctcgctctccgcacccctctcgtagcccccgtccccctcgtccgcgcgccccctggttccccgggtccccctggctcccctagtccgtgcgcccctcgctctccgcgcccctcgctctccgcaccccgcctgttctccgcctccccgccgtccgtgcgcccctctggtccgcccccgctctcaccctgccggggtccgggtccgagcctgccccgggcttactccgctctttcctcccggcccgcgagtccccggatccgcggcgacctcgcggggacccccagcggggacggggcagtggcggcgagtctggggccccgagggctttctcctccgcttttgatagtttccttccggcagaaagtttaagttgctcagccaagtcgctgagtgctcttttgcctcctgggggcaattgatttactcacgtaaaacagaaaaataaaaccaaaagcgaacccagccaagggggtgaaagccgagggcgcggccggggtggaaggtgaggcagtgacctgtgcggagcgcgccctgcaaacttccctgctgcgggtgaaagaagctgcctgggaaagtcctccccaccatcactcccctaaagtggggttttctccgcccgaagaagccttaaagcagccagaaacaaaaaagcagtcaatccgtgcggcccggggactgcagacaggggacccggcgaggacgcagggagccgctggcgaaccgcccctgggaattcagataaacgtagggtcgcttcctttcgggggcccactccgcattccagaattccttcttctaaaagaagagccggttctaagggcgttttcagcagccattagcatctggtgtacccgcccgtgtcattggcaaagctggtctcatgaaaaccatttcctaaaaaagggcagcgaaagggtcgcattcttgtgcgaactgatctgtcaagatgggggtacaagaactgtagaaagaggaaatgatttcggtgaggactgaattgtgccagcgtctctaggcttcctctaggctcttgtggaacctccggcaggctcccatcatcggctcccatcaccggcctcttccaaaaccatcccttacgctaactcgattgtccggttggcttagaattccagaggatctgggaaggccctgccctccctgctagcccctggcacagatccgcacagatccccacctcccccgacttgctcagccacagccaggatctagtctggtctttctctgttgacctttttgtgtggcaggagtgggttttcctgttccccaggccctctaatatttccagacataaattccaggaatcccatgcttccctcttgaggggccatttcagcctcaggaaaggccttcagagacttagaaggaatgtcgtgttccaaggaatgaagaggcagccttgatgtgccgtgtttgtcaggactggccttgggaaaggtgaaataggacatatttttgcctttttttctgcaactcttttctcttgacttttactgaggtggtccaagccctgccgtgtcacaggaccccttattttcagtttcggtgtttagggacaggtctctatgtcctcctaccaggacactgatcaggtggcaagaaccctgtgtcaagaggcaggaaacctaggctctcgttctttcccaccaaagagctgtgtcgttttagcaaagcaactcagtggcctcatctatgaaatgggcataataacatgttccccctttaggcagaggactacaccagatgatctcttaagatacatgttaccatttcctgctaatctatgagttcagggtgccaattagcaaacctgggagaggaggaagctggaggaaatctctttacttcttttatctccaagaaagatacacactctttgagtggcttcctgcagacagtgccttacctttgccagttctgtgtgtaggaatttgaacttggagttggaagaaccatgccaaagcagagaaagaagaggtttctgggcagacggaggctttgaaacatcaatcgtggccggtcgcgttggctcacacctgtcatcccagcactttgggaggctgaggcggggggatcatttgaggtcaggagttcaagaccagcctggccaacatggtcaaaccccgtctctattaaaaatacaaaaaaaagttagctgggcggtagcggcgcatgcttgtaatcccagctactcgggaggctgaggcaggagaatcgcttgagcctgggaggtggaggttgcagtgagccgaaatcacgccactgcactccagtccgggcgacagagtgagactctatctcaaagaaaagaaaacaaaagaaaagaaacatcagtcatatcacaccacatttgtggcttcctttttttttttttgagggtggctgtaagtttcagttttattgaaatcagaggacattttatttgaaagaccaaatgaccttgttgtccacactgagtaagatttgccacatcccctcgtttggctggctctttcctgggtgagatgtgtgcagcaggctgtgtttctagctgctcatccaattaggctgattctctgggtgggataacattgagggagatcaaaaccatttgactgtcttcggtttactctcttctctctctctctctctcctcttttttgttttgagacaaggtcacattctgtcatccaggctggagtgcagtggtgccatcatagctcactgcaccctccaactcctgggctcagtggatccttctgcatcagcctaggtttattctcttgattcgagagaccctgtggatcagtcagtgctaagtccaaaagtcctttaaaaaatatatgtatatttttgagatagggtctcactctgtcacccaggctggagtgcaatggtgccatcctggctcactgcagcctcagcctcccaagctcaggtgatcctcccacctcagcctgccaagtagctgggaccacaggtgtgtaccacccagcccagctaatactttttattatttttgtagagatggggtctccctatgttgcccaggctctttcaacattttaacaggaaccttgggctcatttgtgctttgcgtagggaggtctgtcttttctgggtgaagttttgtgtgtggctggcattcagcttcctgttttttagccatgagacacctccctgaagtcttgctatgaccaagaccctgacagccacaccttctttctgcctgttagaatcactttctgtcgggtttcccttataaggtgatagagaacatagacttcataacaaaatatcactctcactgggaaggctgaggggttggtctttttgtgcctggtactgtgctcagtggggacttggggacatgcttcgcatttaaggtataggttgttttaggcatgggcagtaggcgctttcagcacaggctccctgctggtcactctttgctgtagtttcctgctccatccatggggtcggaggtcttacctcctgacgttagagtcatttgcagcaggtgggagtgaaagtgggccgggtgccaggtcttctttacctgaacctctcctgtcttcctggcacattaggaatgtccaagcttatttctattggtgaatgctcccacatgggatggataatggcctgtggaacattctctgaatgctttgtgttcttggaaaaccaaggactgaagagcgttgggtttgtttaggttacctgttataaattcttggctcacatttcatgtgtggactttcttgggtttattccacatggggacagcccagcaagcctttgtgaacgccctttcctggcctgagccgagtcacctgtggaagtcagccgtgcaggagggtgtgcttgatagggggaagcaccctgggcaggaccccatgagtttccttcttaccaggaaagtgtcattcgtcccactttgtgatctgaactggtattatgaaacatgaagcttaaaggcaacaaagtatgttaacaacaacaacaaaaaatacttaacaaaaacaacactgaggcagcagctgcttcaaccccaaaggtggaaaagtttcccagtatgcatttttaacacacatcaccatgtggcaagaagcaggaggaagggagagagtggggaggaggagaaagagaaggaggggacctttgttttgttatctccttggggtatttgtgtgcgtgcacttaaaaactgcgtgcacttaaaaactgcttcctgatggaatcccaaagagatttatatttggactttggttgtcttgacaacaatttagaaattcctaccacttcctcaatagctgagtgatcagttaaaagagccgatggcttccctgcttctggtaaggagcttgttgaagcatcttgtgatctttgttggaatgtatatggtggctcattaaagagcagtcaaatacctgggatttggtgagacatctgggtaatgggtacttcacctatgtccagggccttcgcatggaaggcctcttgtctccccagggacactaggacgcaagagtagaacagatttatactcacagtaaggcagatcatcagaactgtgcaacctcacatgagttgctatgagcactgtatgacagagtatccaataaggtgataagaatttgttagtgttattgtggaaggaagtaatgcataggatagtgggttgggctaggtaatgatcacatttgctttccaagtctgagattctagtaacttactattttttctcccgagactggcatttcttggggaagggggatggtggggagggttgagtggctagccacagcatttatttcttggcacaactgattcctctactaaattgaaccatttgtggaaagtatgttcagcattggtgactctgggtacgttctatgttacacgagaataaatatgatatagtgggctatcttcccagcagtgcctggcatatggtaacactgtgtcttatgcacccatcccaggctgatggaatccatcagggtccctttgttcctcctttgttcagggtcagcattgctgctttcatcctccctcagctttcagagctcagtgcatctctggagtgtgtatcagaatcatttgaggagcattttcaagcttctcatggtcccttcccccatcccttatgtcttaatttgagctgctgtcacaaaaataccataggctggagggcttaaacaatagacatttaattctcacagttctggaggttgggaagtctaagaccaaggcgctggcagatctagtgcctggtgagggctcgatttctggtttgcagacagctgccttcttgctgtaacttcacatgactgagagagtgctcggtctctttctcttcttataaggacgccaaccccattcatgaaggctctaccctcacaacctaagcacctcccaaaggcccacctcctaatatcctcacattggaggttaggcttcaaaatgggaattttgttggagggacacaaatattaattccatagtaccttgtcaatagtgttcaggcatgtggcctctacttttgccctggcccaatgacactgttttagtgagtgtgatatatcctttaggtctgctctaaggccacagccatgagaaaataggaaactttacattttaagatgctaggacagtggtccccaacctttttggcactagggatcagttttgtggaagacgatttttccacagatgggagcaggaggcgggggatggttttaggatgaaactgttccacgtcagatcatcaggcattagttagattctcatgaggagcatgcaacttagatccctcacatgcgcagttcacaacagggtttgcactcctgtgagaatctaatgtcaccattgatttgacaggaggcagagctcagctggtaatgctcactcactgttcacctcctgctgtgcaacctggttcctaacaagccatgggtcagtaccgccccaggggttggggacctctgtgctagaacgcaaaagcttttgagttcactaattggaaaagacctttaaaatttaattaagcctggtagataacgcttatttggtgtttgcatgcctgtgcagattttacactttcatttatcttagtttttatcacttatgacatgtgtttgaaaatggaataggtattcattcattcagccattcaccatttgtggagtgtttcttttatgctgggagctgtgggtggctgcatgtagacaggatggcagtgattgttgccttcccaaagacacgaacacaccagcagtgagctctgtggcattgactggattcttattatggtgcttaccatggcccaccatgcggaacagaagtagtgtgttgtgatgatgagaaatactgactgtcatcccgcttagtagacttgacggcatgggagggacagaaagttcttgctccaggtctgtcttgggtacctgctgtcgcacagtgctgtgctaactctgctagagacagaaagtaggtcaggcagggatctggtccctgcctgggatggagaggcttctggttggttcctgtgccacacgcacaggaacacggcccttgctgatgggtgtgaggcaggaggtgttgcatgtatagtgggatatggtgggagtcaaatacagcgggggctgtgaagtggggagttgggaaggtttcttggagtaggaaggatttgaacagtgcctaaagggacagggaaggaaaggtgggtgtgcactccaggccctggcagggggcttggatctcactgtattttctggcacagtccctcccctcccagcctgcccactcttccattgacaccccctactccctgtctctctagcactgggtcttttatttttaattccctttgccccctttttttttttttgaaaaatttaaaacttacacagcagttgaaaggactatgaatgtcccctagattcagcaggagtaacattttgtcacttgtcctttgtctctctctctctctttttttttttttttttttgacatggagtctcgctctgtcaaccagcctggggtgcagtggcacaatctcggctcactgcaacctccacctcctgggttcaagcgattctcttgcctcagtctcctgagtagctgaaatcacaagtgtgcaacaccatgcccagctaatttttgtattttttttagtagagatggcgtttcaccacgttggccggctggtctcgaactcctggcctcaagcaatctgcctgccttgacctcccaaagtgttgggattacaggcgtgagccactgtgcccagcctgtctttctgtttataaataatactaaacatttttttttgaaccatttaaaagtaagttgcagacatggtggcactttacccacaaatacttcagtatgtgtcttttaggaaaaagggcattctcctatgtaaccacaatactatgctcccatcccctaaattgaacatgaacacagggtatcaaacatatggtccatgttcagatgtttccagttgcccccaaatgtcctttccagctatttaaagggtccagttagagatcatgtatttcatttggttgtcctgtctctttagtcactgtgcatctaaaacagttccccttcttttttccccatgactctggcatttttgaagaagccaggccagttgtcttgtaggcggtcccaagatctggaagtgtctgattgtttcctcattacttctttcaggttcattgtttgggtgagaatacaacgcaggcgatctcgagtggtcttattttttaacgtgatcatgtataatattaaaatactctttcccacttatctctgtggcatttatttaaaaaaatttcttagcttctgcaagtgtcaggcagtggtgtgtctgacacagaactttgacctcttggagcctacattttagcaggaaggtagggaaaataaatcatatggtctgttaggaggtggtatgtgctttatgggaaaagaaggcaagaggtgggagtgggctggcgggggtgacaattgagtgtgctcagtgtcttcagagcccaggatggaggcgtctgcctcttatttacccggggattgacgctggtcctacagcttcctcctgtggtaagctgctgagctgtggagaggagagtatgtcctgaggagccagagtggtcttttttgttacctaactttgtcagcagaaatgaggaaaagaaaaatggaatttttatttgagacggagtcttgctctgtcacccaggctggaatgcagtggtgtgatcataactcattatagcctcgaactcctgggctcaagtgatcctcctgcctcagcttcctgagtagctgggactacaggcgtgccaccacacttggctaattttctttctttctttctttcttttttttttggtagagatggggtcttgctgtgttgtccaggctagtcttgaattcatgggctcaagcgatcctcccacttcagcctccccaaaaatattgggattacaggtgtgagtcactttgcccagccaaaaagtgggcttcttttttgtttttttgttttttgagacagggtcttactctgtcatccaggctggagtgcaatggtgcgatcacagctcactgcagcctcaacctcccagtctcaagtgatcctcctgcttccgaaaagtcggatttaacatcaggtcaccaaatgggtttttcactgtgggatcttttgatgagtttttttcgaatacatttccttggtttagatgtctcagacctgcttgaattctctagaagtcatgaatgtggcttctgtttgcaccatatttaacccagaagatatcttaggctactttcagttcccccagaggtgcctaggagactcgagttatcagaaaattgaaggggcctgcaggacagcaaacagaacacagggaggtcatttcccttctattttctcttctttgaacaggatgtcacagagagctagatgcctttctatcaatgtatttttttttgaagaaaaggatacctgcattctccaggactactctctgccttcatggaatcactttcctaactaggatctgcaaatataatgtgtcgctctgggagggaaggacagagggagaaagtggagagaagaagagagaaagaggagaagagaagaagaaagacagagagacacgcacgtacacacacagacacacgtacacacagtatgtggagtatcacataaaatttgcccactgctggcaaggagaaagagcaaggtgttcttgtgtgtttgtttgttttttaaataatcagattattggccagggcatttacatttatggcaaggttaattaagaaagttttatttatttactttttatttattttatttactttttttgagaccgggtcttgcccaggctggagtgcagtggtgcaatcacagctcactgcagccttgacctcccgggttcaagcaatgcttctacctcagcctcccgagtagctgggactataggtgcccaccaccacacttggataatttttttggtttcttttgtagagatggggcttgccacgttgcccaggctggtcttgaactcctgggctcaagtgatccacctgcctcagcctcccaaagtgctgggattagaaagtgttttttaaagttcatctcatggcatcaatactacgtagttaatttatacttcattttagcagctaaaatattttctgaatttttttgtttgtttgtttgagatggagttttgcttttgttaccaaggctggagtgcagtggtgtgatctcgactcactgcagcctctgcctcctgggttcaagcagttctcttgcgtcagcctcccaagtagctgggattacaggcatgcgccaccatgcctggctaattttgtatttttagtagagatggggtttcactatgttggtcaggctggtcttgaactcttgacctcaggtgacccacctgcctcggcctcccaaagtgctgggattacaggcatgagccactgcaaccagccttattttctgaactttcataataaacttctaaagagctaattttttaaattatcaagtagtttagtctttttgggctgttatagtaaagcaccatagactgggggctgaaaaacaacagaaatgtatttccttcagttctggaggctgaaagtccaccatcagggtgccaatacgggcaggttctggtgagggctctctaaggggttgcagactgagtcttcccattgggtaagggagctccctggggcctcttccataagggcactaatcccattcatgagagctctagccttctgacctaatcaccttccaaaggctctacctcctagtattgtcactttggaggtcaggatttcaacatacaaattttggggatcacaaatattcagaccataacataaagtgatgcatgctaattacaatttgaaggccaggcatggtgactcacgcctgtaatcccagcactttgggaagccaaggatggtggctcacttgaggtcaggagttcgagaccagcctggccaacatggtgaaaccccctctctgctaaaaatacaaaaattagctgagcgtggtggcgtgcgcctataatcccagctactagggaggctggagcatgagaatcacttgaacctaggaggtggaggttgcagggagccgagattgtgccactgtactccagcccgggtgacagagcaagactctgtctcaaaaaaaaaaaaaaaaaaaaaaaaaaaaaatatatatatatatatatatatatatatataaataaataaatttgatctaattatgagggaggggaaatgatctagtagtgaaatgatacatgctgttgtagttttagactgtagaggtgaggaatacaggatgatggctttaatcccattttttaataatgacacatcattgtattagctggcaatatcctatttgttctcctctttagtttgtttgtaatcccacagccaaagataagtcatcctgcttgccctccttttctgtaacactcacctcctcatttaacttcttttttttctgtcttttgtttcacgttcggaggacggctttatattttaggaccaatgtcaacctcaccatcctgccctgtatttcttctgttatgtcgctgctttttttctgcccctgcaggatcattttcttccatcattttaatttattttcttattctctccacttcacacgatgagtcatcagcccgacctccttgaaagaggcatccaaggcttcgcttttacaggaaagtgtttctaaccctgcttttcacttgctcccaccctttcagtgggagtgtgccaaactccttcccgccgtgccacagcaggcactcagcaagccgcggggcacagcagggtgctgccagggatgccgtcaagcctggccaggctcaccttttttttttagatggagtcttgctctgtcacccaggctggagtgcagtggcacaatctcggctcactgcaacttccgcctcctgggttcaagcaattctcctgcctcagcctcccaagtagttggaattacacgcatgcaccaccatgcccggctaatttttctatttttagtagagatggggtttcgccatgttggccaggctggtctcgaactcctgacttcaagtgatccacccgcctcgacctcccaaagtgctaggattacaggcgtgagccaccacacccagcctgaaatctttagttatcaaagttgtattacatgggtgctatgcggtagtttctgtccttgaggtttacagtctaacaatgtccttggcctgctagggcgtacatgggaaaagttaggtaacagtaccagacatcccagtgggatatcgccagatgcttagttgccagatgttcagaaggtgagggctggtggagtttggggtgaccagggagagcgtgtggtgtctgctaatgaaccagaagaagggctgatgtcaggtgaggtgcggagggggcgtgtctgggagccggtgggagtggcttcacttacatgagacacacacacacagggagaaggttccccaagattcggtgtcagagtggttacctgcctggtgcggggggtagatttgggcctataagtaattttctctttttttttttttttgcttctctgtattggtttatttagtgagcatgtattactttgtgtaatttcgttaaaacctgcaaaatgtgttgcaggggacaaggagatgcttgacagggcgagatccatttggttcttactggaaataagtggtacactggtaatgaaattggaaagtgactctaggtccgattataaaggggtcttgcagtttgagtttatagcttcggtgaaatgacaggtctggcatcaacaggatgcagatttggcttagcaggtagtgctgtgctttcacctgtgcaggtcgttctctggggtccgtggtccatcatgggagggcagccacctccttttggggaatggtgacctcttcatggggtgatatttgggctttttcaccattctctgatttcctattcctcaaaatggggtctaggaaagttatgagcctgtctatccgtcttagggttctacaggttttctgtgtgtggcatatctgttttctgtgtgctgttatttgaaaaataaataaaagtatatcctgtatcttccaggtcatcatcctgtcacagaattctgtgtgacaacgttaacgtcattaatactggctaaggagaaaataaccgatgtagagttagtatacaaataattggggtcgaccggggacagtggctcatgcctgtagtaatcccagcacttcgggaggccaaggcaggcagatcacttgaggtcaggagttccagaccagcctggccaacatggtgaaaccctgtctctaccaaaaaatataaaaaattagctgggtgtggtggtgcatgcctgtaatcccagctactcaggaggctgaggcaggagaattgttttaacatgggaggtggaggttgcagtgagctgagattgcgccactgcactccaacctggctgacagagcgagactccatctaaaaaaaaaaaaaaagaaataactggggccatgtgaagaccatgtgattctgcagcacatgcagcaggtgtttactgagtgcctgctgtataccaggcagtttctaggggttgggggaatagcaggtaacaacatggactgtccctgacctcatggagctgatattctagtaggggtgacaggcggtgcacaaataccgagtgtggcagatggtgaggggtgctgtggagaaaaggaaagtgaggaagggccctgggcatgctggttgggaggagtgtggtttcaggtaggggcttgagaaggcatttctgaaaggaggcatctgagtgaagatcaaagagacagtactcagggcagccatgtgtgccaccagacagagaggtctgtgaggctggagcagggtggatgtgcctggtgagtctgaggaacagcaggcgagcagtgtgactggggcaggaaagagaagggagggagaggagggtgtagaagggggttaggtcagggaggtttggggctggatcaggcgcggtcttgcgggctggtgtaggaactttggcatttccttggaatcaagtgagagagcttgctaaggttttggtacagagcaaggacatgatctgacttagcttttatgagattgccctggcagctgtgtgagggctgaccacaggaggatgcagaaggaacatgggagcggtggtgacttccagagtgtagcagcaaggtggtgcacatgatcccatgtaagctgtgttttgaaggtagagctgacaaacgttgctgatggactgtgtatggagcacaagggaattaaaccatgacatggtgcatgatgcgtacctcggaatccagccacagtggagcaacactgttcatcatgtgaaactaatgtcaagtggaaggtcgttggctttatagtttaatttgtatttaatcaatgtatctgtgtctattttgtagtttcagaatagcacagtttatgtgtacccttattatttgtgtatatttatacagtggaatagttaatgactacctcagggtccatgagattgtttttccccttatgaaagtatgtggagtcttaaaggggcctgagaaaccctgctctaaccactgtgattatccagggactgatggaaccgatctgttcccttacgaagtgtcacagtattggcaggactctggacaaggacaaggaaggctgcattcctgtggcaccaccaggtggaagatggaggtatgttctcaggtatggccagtgtctgccaagatgcaattcctcagctctacagttttactactttttctggtatgacacaactaatagacaaccttgcaaatcctagctactcccatgactagatgcagatactattgaaacctcagaagtctgtgttgcaaaataaagcaaagaatgcaataggttttgttcataaaagcattttttttttgagaccaagtctcgttctgccacccaggctggagtgcagtggtgtggtcttggctcactgcaacctctgcctcccgggttcaagcaattcttgtgcctcatcctcccgagtagctgggattacaggcgtgtggcaccatgcccggctaatttttgtgtttttagtggagatggggtttcaccatgttgtccaggctggtctcaaactcctgacctcaggtgatctccctgcctcagcctcccaaagtgctaggattacaggcgtgagccaccgtgcctggcctgtaaaagcatttttatgagcatgtgaataatgaactcagtcatttcaagatcttccaaaacaattcatttgttagggaattgttagtaaatatggcaaataaaaatttttaaaaatacctctatttaaaaagatgagttatatatattatttttcatagattaatcttagcaagacaattttcttagtccattttgtgttttgtaacagaacacctgcgactgggtaatatataaagaaattggctcacgattctggtggctggaaagtccaggacggggcagctgcatctggtgagggcctcagtctgcttccactcatggcagaaagtggaagcgaagtgggtgtgtgcaaagagatcacatggtgagagaggatacaagagagcaaaaccaaataagccagactctttaccaaccgattgtttctggaactaatccattcctgctagagtcagaactcacccaccccagtggaacggcattaagtgtattcataatgatccatccctataacccaaacacctcccgcgaggcccacctcccaacgctattacactggtgatcaaatttcaacacaagttttggtggggacaaacagactacatctaaagcatagcaagaacctagtgtgtaatattgtataatcaaaatataagtatttaaaaaacattattcactttgggaggccgaggcgggcagatcacaaggtcaggagatcgagaccatcccggctaaaacggtgaaaccccgtctctactaaaaatacaaaaaattagccgggcgtagtggcgggcgcctgtagtcccagctacttgggaggctgaggcaggagaatggcgtgaacccgggaggcggagcttgcagtaagccgagatcccgccactgcactccagcctgggcgacagagcgagactccgtctcaaaaaaaaaaaaaaaaacaaaaaaaaaacattattattgaaatgatacttcacataatgtactgatttacacatgttgctactgttaatgagaattgcatgactggacacttcatttgcatcagcgctttgcttctgacttgttaatcttaactgttgtgtcacaaataaccagatgtgcacattcttatttgtgcttatgaacaaagtagttacactctacttgtgccttctttatatgcccttggcttcttccttattaaaaatatccgtgggtgaaagaaaaacagtaattgtagactcacaggcactataataatttgtaattgcttctgctgtgaatctcggcaacatcaggaatgattgagaaggattggtacatagccctggaatgcacgcctttcttttaaggaagcgcttcagaatgcctttgattaagaaggatgtcattatgcagatgagcttgtaattgttctagtgtttgaaaaaggtaatagccccataatcctaagcacgtagacttgtactgagtataactcatgtgccagggactgtgctcagtgtttgctacctattgccgcataacaaactaccctgacctcagtggctccaaataacaacttgttaatatttctcacagttctgtaggttgactgggctcagatgagcagtggttagttatctgaaggctttgttgcttacctgtctggtgagcggaccgggcaggctgggtcggttgggtgctaatcaagcaactctctccaagtggcccctctacctgggtagcttgggcttcctcatagcatggagtctcagggtggccagtcttgtcatatggtggctggttgagttcacagcaagtgttccagagccttgggaggtgggtgctaaaagacttcttctgacctagcctcacagatcccagaatgccatttctaccacattttattgatcaagcattttaccaaggtaaatgctttgcttcagcccagaagcaaagagaggagaattagactccacctcttgatgggaggaatagcaagaatttgtgatcatccttaatctaccctactgaataagtgctttacataaattatgacattaataggcttataagggcaagttctattctcatctttatcttgctaatgaagagactgcagcacagggatttaagtaacatgctcaaggactgactgctaataaaggatgcttcgagcaatagaactagctttgtatgattctaaatcccaatgcacataataacttaactgtgccacaaaccagttatttttgttattgttatatgttacaaattatttgttcaaaactggcatgtagtagggagagcaccactggtctgatagaatggactttttaaaaataaggggtcttgtattaaaaacataatttaataattttattgaataatttgaaccaggtttgaagcatttccgtggaaggaaaacatgcaaattcccacaatgttagggtcctggtcaggttctttggagttacaggtaactgtttgtcatttctgggaatgtatgagatgtgcagaggcaaagtccagtatcagagatggtctcaccttgatggcagtaaaaggctcaaatgcgtttataataataccaacagcagcagcgacaacaatatatttgtttagcactttacagtttacagtgaactgtcctcatgttatttcatttagtcctcaaataactctatgtggttggctttttgtcttcgatctgcaggtgtgaaggacagaggcttagccatgtgaaatgtttttgctcaatgtcataaaggccatgtgggaagtggaccctaagccaggcagtgtgactgctccagggttcccagctccacagtgcaggaggcaaccatttccagttcttttcttcctttactttctcataggatactttttaagcactataaattgggttcaggaaatgtcagtttgtgaaatgtgatcaatccagaaggccaacctgctggactgcaggggactgttagagatcagaggttcccaggtctgctattacagctgttgggtcactgtgcaagcactgctgtcagggtggcacagtggagggcagatgagccctggcagcaggtggacttgggcacgtattcgctgtggcaaatcatgtaatctctggggctcacttttctcattgcaaaatactgacagtttgcgtagataatgcctctaacggggaaccttgcctggcatgtaatattcaagatattaccttagcagcctcttctcccagactgttttacatcctcgtaactttaaggcttaagggagtttaagtagattgtttccacaagaggagctctggctgagctgttctctttatatactttgctacggggtctggcaagtaaaaggtgctgagtaatagctttcaattcactaaatgaatactgtagaacatcattattttcattcattcgactaaatttataacatactctaaattttttattgaagtataacatacaaagtgcactaatcttcagtttaatgcacgatggactttcacaaatggaacagacctatgtaaacacctgggtcaagaaataatgttaccagctgtccagaagcccaccctgttcccccttccaagcattaccttaaaaaaaaagtaactagttgtcttgacttctaacactgtaacatttatttttgcttgtttttaagttgtagcagatgcttactgtaggatctttgttttttttaggtacttatactaagatggcattaatagacgttcttaggaccaaagggctggggcagaatgtgctgccattgggccacaagtgtgcagagacatggatgctggcctggggagatgggctgggtaggctgtggccctttggcttcttccagctgtagccatgtgggcccgtatgccctggtgctatgtagataatagcactttctctgtttgctgggatgtgaataaggttggaaagcagtgtcttcagaggccttgtaaaattgattaaaatgagaagcatattacttttattttgctttgttttgtttagagacagggtctctctctgtcgtctaggctagagtgcagtggtgtgatcatagcttactgcagcctcaaactcgcaggctcacacaatcctcccacctcagtgtcctgagtagctgggaccacaggtcctccagcacacttggctaatttttaaattttttgtagagacagtgttctcgttatgttgtcgaggctggtctcgaactcctggcctcaagggatccttttgccttggcctcccaaagtgctgggattataggcatgaaccactgtgtccggcctgagaagcatgttaattgtgtataattaagccattttaaagtgctcaagggtgtttgaaaacagttctctcaaatattaaaaatgtcttgtttccatttttaatgaacaaaacctttctatgaagaaaatctttgctaagatcagtctttcctcttaccccagctttactgaggtatagttgacaagtaaaaattgaatgtccacttttaaggtatgcaatatgatgttttgattgtatacattatgaaatgattaccacagttaagctaattaacacattcattatctcacatagttatcttttttgtggtaagaatactttgagatctactctcttagcaaatagatcagtctttttaaagttgtttttaatgactaaacttaatgtatacttgtaaagaataaaaaaggtacacataggtataaaatgaaaagtaaaaaagaccacctttctctactaatgtcttctatttcttgtgtattttttaagctatggtctatgcatatgcaaacattttcttgcctttttcctctaaaggtaaaccttgagtattattccttggccccatgtatagagcaatcccacttattttaaaagtcacatagtgttctctcacaacagtatatcatgatttacttaactggtgccctaatgataaatgttgaggtagttttcattttttggctttacaaacaattctgcaataaaaatctttgtacctgaatcttaatgtacgtgaatgaaatgtatttgtgggattttctagaaatagaacgttgggtcagagaataggagattgatatctaaaaagatattgcaaaattaacctcaaatattgcgccaatttacactccctttaaatgtttgatgacatgattttctacacccttacaacacaaaatataacctaattttttgtttgtttgtttgtttgttttgagacaggggctcattccatcacctaggcaggagtgcagtggtacaatcttggctcactacaacctctgcctcccaggttctagcgattctcatgcctcagcctaccgagtagctgggattacaggtgtttgccaccacacctggctaatttttgtatttttagtagagatggggtttcaccatgttggccaggctggtctcgaactcctgacctcacgtgatgcacccctccttggcttcgctaagtgctgggattacaggcgtgagccaccccacccaaccatgaatataataaatttttttatttttgctaatattatagattaaaaatgataatctattttaatttgcatttctttataatgacaatggatattttaaaaatttgtttattgactgactatatttttctgttacctgccccttcacatcgtttacccattttcaactgggttgtttttgttactgatttgtgagtaatctttgtatattaagaagctaaactctttgttatttgtattgcatatgtttttcctcagtttgttgtttcatgtttcactgtttactgtcttttaaaaaatcataccgatatttagaaatcttcatttagttaactatatcaatcttttgtgattttgatgttttatgtcttgcttagaaaatccttctctactctaatattataaaagtatttagcgcgatggctcatgtctgtaatcccagcactttggaaggctgaggcgggcggatcacgaggggaggagatcgagaccatcctgtctaacatggtgaaaccccatctgtactaaaaatataaaaaattagccgggcgtggtggtgggcacctgtagtcccagctactcaggagactgaggcaggagaatggcgtaaaccagggagggggagcttgcagtgagccaagatcacgccagtgcactccagcctgggggacagagtgagactccgtctcaaaaaaaaaaaaaagtgtttagctatattttgtcctagtactttcatattttcttttttacattttaaattatttgagcacgtggattttgggataaagaaccagctagggatttagtctcccctcccccacccccctctaaatgcctagctggttgctttaataccatgtattgattaattcataatcattatctactggtctgacatgttatctttgtcataaatgagatttccatgtgtatgtgtgtctgtttttggactctatgttctattaaaattttaattaatttctgaatttgagaaaaatcagagccagtagtgtccgaattatgaatttacccctggttgtttttttactcttctcttgatgtacttctcacacactgcattctgttgcataaaaagaataacatggtgttgaatgacagatctaaagatggacatttgtctatgtggtaaatacgtggtagattctgggtgatttttcatatgcttcatataaaaaatgatcgtacataaaataacttttttggaaggaacataatctgagccattcagatacaacgaaatccagctcctctctatagcatcgctgtgggtgtagctaaaatatgagattttaagtttaaaaacaacttctgcatgttatttggaaatattttttactaatttcttacgcagcccaaaacttaatgggcaaatttaaaatacgcatttagtgtcttagtattttacaaagtccttcgagcctcaccttatcttttttttttttttttgacacagagtcttgctctgttgcccgggctggagtgcagtggcatgatcttggctcactgcagcctctgcctctcgggctcagacaattctcccgtctcagcctcccaaatagctggaattacaggcatgtgccaccatgcccagctaatttttgtattttttttagtagagacagggtctcaccgtgttagccaggctggtcttgtaccccgacctcatgtgttcccccatgttggcctcccaaagtgctgggattataggcatgagccaccacacccggtcctcactgtatttttgaaaacatggttacagaattagttgcatgtggagaagctgaaatgctatatgtaaatcctctttcctgattaccagcattctcctaatgcaaagtgtgtgaagtgacagcagagaagatatcaaagggtttggtgcttgggacattctgtattgtcaatgtgagatgcccagtgagatggaagttctgcacagggtggctgggcggcaggcattcatttccgtaagcctctctctttcctcctatatggtatgtgatgagtttgggggaaagcatctgcatttaagctctgttctggtggagagagggaagaggtctcagtgtttatcgtctcccatgagttgagtgtgcaggatctgtagccaacaactcttgagttttgagagttccatgtgagcctcactacatgctaagtcagaaccacagggtgagtgaatgctctttctctgctccatctggcttctgtcttcttaacagcatatctgctgtttcacatagctgcatatcaagccagttttttgtttttgagatgggggttctcactgtgttgatcaggctggtctcgaactcctggactcaagtgatcgtcccgccttagcttcccgagtagttgggactacagatatgtgcccagctacaagctggctcttttatttttggggcagtttaaccacttggcattgtcaggtcttccctaagcttcccttggtcttttcttccattttgctgtttttttggacattaaataatttattacctctaccaggtgcttggacagaataaagtaaaagagagaatcgttatgttagaaaattaacttgtgcaaggtgacataaaattctctctgctgttgattcatccatgctggctttgccagtggtcatgagggtaaccagtgattcaactgtatgggagggaatctgccctttctgagtggatctcacaaggtgattcctgtgtgatgatgtaaagatgagaacctttctgggaatttgctttttttttttttttttttgaggcagagtctagctctatcaccctggctggagtgcagtggtgtgatcttggctcactgcagcctctgccttccgggttcacgattctcctgcctcagcctcctgagtagctgggattacaggcgtgtggcaccacgcccagctgatttttgtatttttagtacagacagggttttgccatgttggccaggctggtctcgaactcctggcctcaagtgatctgcctgcctcagctcccaaagtgcctggattacaggcatgagccaccatgcctggcctgaatttgctttttatctatgataataagctcctcacccaaacagataggaattgaactcagacaaattttaatgtgcacacatttgcaaaggtaggcttgcatttttcattcactttctcttttatatatttacatgcgcagaggacaaaatgcagaagacacacaggatgagcagcgagaaacgatgcccagcctccgtctccctcagctctgccactcctctccccaggggcaccagtcactagtaatgccctcagagctcttgggttcatccagcatgggctctgctctgcctatgcaggtaccagaccatcttcgtccagggggacgtggagtcacacgcatgcaggcaacaaggagagggccggtcaccggatgaggctgggcccctggggcaggggtttcatcagagccctaggtctgctctgtctccagagaaacctccccagaggcccaagtcctgcacccactgcagcagggcagggctgtagccaggtgagcagagggcagaatcctcccctggaatacattagaccctgtggtgacattagttcatgctcagtgctctgttcacaatctctggtcctcacaacggccctgttagcgggttaggtgtgggcatgcagtgaggtgggtcctggaacttgtacccaggcttgtctgacaccagagcccatgctctccaccacagccgtgtctccaacctctccctagtgcttggtgctactgcaaggacttctttttccttctccccttaactgtcatgataaagtgacagcatctcagacaaatttaaaaattccctgaaggaatcagctggttggcgctgaactttgcagggtgccgtgaacaccctgggctggagtctgaatgcattgctttcctcatgcaacagtattgactgagccactgtaaacacacaagagttttgctgggtgctgagtgtattgtgagttttcatcgtctgtgctaatgctcatcttactgagcataataacctggagcatgacctatattgaattcacttggtggttgctgcaggatgcttaaaggaatgaaacttgagggtaggttaagggaagcaatggtgatgagctgagctttcaccaggtggcacctggctctggatgctgatgtgtttggatcagtggtagaaaacaagcaaatagaatggcgagttagacagtttccactgcgcacagcacttgggtgttttccatgctataaatctttattttttccactttggtttgagtgggatcacttccattggagctaatccagaaattgctaattcagtgggaattgtgagtctataagttaggaataaattgagcttaacatgcaatatattggaaatgatcctagatcctggatccttcctcttcccaaacagtgagctgtgagggagtcactcctcccaccaggttagaaccatccgacgtgtgcagatgtggcatatatggtgtatgttctgagggacaaaatgacgacccctgactgcagtgtggctccagcattgcttgcttccaggctgaccagggacaggtgtcctggaagatggctcttcctgttcccagagctgtcccacccttcagtgtccacaggcattctggaagcccaggttctccttcattctgcttaatagctcggcctagaattctcattcgtattctgtgcctggagacccaatccaaactccaagcctcattccattttcctgggctctggttccctccaggattcggtccacaggtgggtgtggacaagactgctgggaccacggccttggttccctgctctgttgatgaggttcttgggctcagacaccacctgcagcccttctgcagccagcctctccgttgcctgcaaacccttgcccatccttccctcaagactccctcagagacattgtaccgttgttttctagtgatccttgaaatttgatgcagtagctcttagaaagaagagactagaaaaaaaataggaggcatggttactggggagggggggcttggttggtaaaaataagtgaattttgctggcatgggtcaaattcctcccaactgaaaagaggggagtatctattaatacaaatgtaaagaggggagaaaatgtgttctgttacatgggagaggcatgccctgtagtcaggagcctgtgtccagttatgtgagatggaagctggggggcagggtggcggggaggagggagggagggagggagggaggaaggctaaactaaggtcatgcactcaggtcctcaggtacataagagctagtatctatcgcactctatatactgacactggacgaactccttccctgcactgtcacagccctgtgaggtgttgctcttcctgtcactattgtgcaattgagatggaagcctggagaagttaaatacttgctcagggccccgcagccagtaagtggcaggacctgtgcttacctcctggcctatggactccagcgattgtgttgtgaagccaccacacccgctgcctttcctgaacacggacaggaagcgttacatacctaacgaggagaacatgggcaaaaccttgcgagtttaagttgtgagtgagctaagggtgagccgagaggatgactgtagccaagcctggcagcctggggagcctatctgcaggtgtggaggggtgaattgttagtgaaggtgaggaacagcagaaaggagaggcaggcagggtgcagaaaggatcccggatacgatgaacaaagcggggcccgaggagccacccctgcgggggagcagtggggtggggaaggactcgagtctctggcgcctcagcactgtgtgccaggtgagagacaagttgtgtgtggttttattctttccatatccatttctttttgtttggttttgtttttaaaaagtatttagcatttaatgaacctccttccctgcggctgcaagccaccagcacacaggccccccagcattcttaatcttctcagctcatcagaattgggccttcatgatgacagactgctttgggagctttccctttcccagaactttatagtagcccagttgcaccacagcagtgatgggaggagcctcttggtggtggcggtggttttttgttgtcgtcgttgttgttgttttgtttttttttgagatggagtctcgctctgtcgcccaggctggagtgcagtggtgcaatctcggctcactgcaacctctgcctcccgggttcaagtgattctcctgtctcagcctctcaagtagctgggattataggcgcctgccaccatgcctgcctaagttttgtatttttagtagagacgtggtttcaccatgttagccaggctggtctcgaactcctgacctcaagtgatccgcctgccctggcctcccaaagtgtagggattataggtgtgagccaccatgcccggccctcagtcttgtttttagcagcatttgcctgtgtctgctcacggatcatagtccacagtttgtcaaagttgacagttgggctgaagctctgtttcctctttaagtggtaatgcctcacaccagctttcccacataacctgggtgacatttgtcaaagttgatcctgtggtggtgcacaccacctgcattaccacagcctccacggtgcttccgcactcggtgatgtggccatggccgtggctcgtgtggccctgaagtttccggctcttcctcagtctggatggcatgtcagacaaaagaggaagatttctacaaagtctcttaaggtattgagcacctatttctccttttaaaaacgggcaagctgagcacagttgtgcatgcccataatcccagctacttgggaggctgaggtgggaggatcgcttgagcccaggagtttgagatcagcttgggcaaaggggaatttttctttcattatcattttgatgtagaaaatcagtaacatcttctttgccaatatgaaaacatgtttttctttaagcagagtcttgctgtcagccagattggagtgccatggtgagataatagcttaccgcagtcttgaactcctgagtacaagggatcctcctgcctcatcctcctgagtaggtgggactacagacatgcaccaccaagcctggctaatttttaaaatttttgcagcgatggggtctcactaggttgccccggctggtctggaactcctgggctcacacaaccctcctgcctgagcctcctgagtagccgggatcacaggtgcacaccaccatgcctggctaatttttcattaaaaattttttttagagggtcttgctaggttgcccagactggtattgaactacttgcctcaagtgatcctctcccctcagcttctcaaagtgatgggattacagatgtgaaccaccatgcctagcctgaaaacatttccttttgattctagcatttagatcctaaacctaaaaccgttgccctagaattgcgctgcccacttttgctgctgatcttattccctgtccagacctttgaggaccagagttggttgggcctccctcccagatgatgctcagggtactggatgctggagtgcagggactttctctggtgactgtggggaagcccctgccctctcccctccctttttttttcatttgttgattggcaaagctgagatttcccagtgtatgtgaatttggtttggttcatttgtaaaccccttgacaactctgtacatcagaataatggcattcctcttgggagtattttgtaattatttgctcagtgtgtaatatcccattaaatatccaaagtcaattcagcaaatgtttattaataataagatttgccgaaagcaagagaagtcttaagtgggttatgcctacagtttctagaaagccttcagattgtggtggtaaaaaaacttggctttgtaaattttgtgtaattcgtattagaagatgctaatttattttaaaagcacagtactcttttgtggtaaatttccaagtttgcccctgtcatttgaaaagcttttggtgtgagtgttttcagatgttattgggtggtaggggcaaggactcgttatttttgttttcaaatatgtattatctctttcaaatagctattaaaatttattatgtatttgcacttataaatgttttatgtaccaatttaaaaaatggatcaatagatttctgtgtctagcagagaatcgattaatgagttttgaatagtgtgccaaggtgactcagctttatgactttccatggatgacagattctgcccctgcgacaaggtcaagcccataaaaattccaatcagataccacaaaaagcacagtttcataggtcagtttaattctatagcagtcttttttgtcagcatagctggcgattccatctgttttaatttaagattcaccccagccatgcctctgtagcaggtgacacgtgcacacacacacacacccccacacccacacactgtttccttatgtaacatacatgatgtaaatatgtaatataaatgtatagttatgtagaatataaatatatttacattgtagtagaggctgagtcggtggtataatagagcatctgcaattcaatatttagagtataaagctgtttttcctttgtgaaaccatttgttttccatacactgcttggtgttgggcggggaaataatgcagttacttatctgctacactaacgagcagatgactgtcctcctctcctgcggctcttctgcagaaatgagtcgccacagtgaattgcttgtgtttattattctggtcatgggttagcaccaggtgtcacagtgaatcaatcttggattggtaaaaggttgtcacgacggcagaaaattgcaggctagagcaaattgtcctatgcccattacagaatctcaagtaatgatggttggttatgcatggaggggctgaaatagtccatagcataaggaaaccaagcaggggtctctaaataggtcagagggttctaacagataccccacccccttctgcttttaaaagctcttgttactgaatggtcataaagagagttttgtctgccccccacgctaaccaacaagacaggcttaccaacaacgtggtcctggcaggcagccagccggccggcatttaaatgatgcttgctgctgtggcaaccccacgggcctttaatgggtgagcgtggatgcagcagctgaaggccaagtgcatcatggaaggcagcggtgcaagcacagccctggttccaatgacttaacgccgcctgggccactgcaagaccggtgtggcagacagaccccctggcgaggagctaactgtggggtgggtggtgggatattgtgaaatgtgtatttggtcttcatccctgtttcctaaaacccttagaatctctggagcaaagagtattttttgcctgctcatgatggactgatagctggcagcccccaggtagctttaggatggggctggtcacaggaaagaccaaggcaagatgggagggttgggacttttagccccaccaccaatctccagggaagggacctccagggaagggaaggggcggaaggttgagttgatcaccagtggccattggtttaatcaggcatgcctacgtcatgaagtttccataaaaacccaaaagggtgagtttggagagcttctggatagctgaacatgtggaggctcctggagggcggcgcaggggcacactggggagggcatggaagtcccacaccccttcccacatgccttgccctacaagtctcttcatctgcatcctgtgtaacatcctttataataaactggtgaatgtcagtaagtgtttcccggggttctgtgagccactctagcaaattaatcaaacctgaggaagtggtcatgggaaccctgatttgcagcccatcaatcagaagcacaggacaccttcctccttgtgctaggcctctggagtaggaggaggcagccttgtaggactcagcctcccgctgtgggatctgacattatctccaggtaggtagcttcacaattgagttgaactagagaacactcagagaactagagaacgctggtgtccgctgaagaatcagtggcttgcttggtgtgtggggaaaacctcctgtacatttggtcacagaagcattttgtgttgtgagagtagactaggagaaaaaacattttgtttttctactcaggtggcatgttccaaataaaaacactggaaagaatatgagtttaaagaaatggattgtaatgcatgatatagttgcatactatataaatacatctcgtaaatttggatttcattgccttagaatttctaagaatttggccaggcacggtggcttacgcccgtaatcccagcactttgggaggccaaggcaggcggatcatgaggtcaggagatcgagaccatcctgactaacacggtgaaactccgtctctactaaaaataaaaaattagctgggtgtggtggcgagcacctgtagtcccagctactcaggaggctgaggcaggagaatggcgtgaacctgggaggcagagcttgcagtgggccgagattgtgccactgcactccagtcttggcaacagagggagactctgtctcaaaaaaaagaatttgtaagaattcagactcagggtgcaggatgaatttactgcttaggaagatgtaatgtgctaaaaaaaaaaaaaaagtaaacaaactatctggatgattcttagcctatggagagtaaagcacaggtttttaagtttcttagatacactgtattgatgaggatacagactaagctgctgaaacaggagatcccagattatagtgacttcagctttttcagtcctcctggtggctggttcagggcttgtttggtggcttgtggggtcatcacattgtatactctcctgtcctgtgtgccagcacctggtcacatggccacccctgactgcaaggaagatgggaaaatgtcatcgttagctgggtaaccaggggcccagctaaaactcagggttctttttctaatagttgaaagggagagtgagtatcacagagccccagcagtttctctcctaagcatcttttattttccaatgaggacactgccaggccagttgtgtcttccttggctagagctttgatctgcaaacttggagctgattctgacctcagaccctggggtgacgagaggagctctatgattctagttagaccagcctaatggatgaatcctgactccctcacttgctgtttgtgtggccttcagttcggctgttgagcctctctgacattccgattcactggtaatgataactgtctcacaaagtcattgtaacaagtattttgagaacatccaggataatgccagtcatatgatgagttttcagtaaaagttcctttgttccttcctctataggatgaatcatagaaatcatctacttacctaacgcttccagtgaaacaagttaatttgctcagagcctgatttaatttgcattattgcatcaggatgacacctctttacagtaaagttatttatacttctccaaatgcaaaatttaaaattattttggctggacgtggtggctctcgcctgtaatcccagcactttgggaggccgaggaaggtggatcacttgaggtcaggagttcgagaccagcctggcaacatggtgaaaccctgtctctactaaaaatgcaaaaattagctgggcgtggtggcgcacacctgtaatcccagctactcaggaggctgaggcaggagaattgcttgaatctgggaggtggaggttgcagtgagccaagattgcaccactgcactccagcctgggcaacagagtaagactctgtctcaaaaaaaaaaattcttttggtgggttaatgttacccagaagcagatcatactgtgctcacacatcttctgtccacatcataccaatgctagaataaagggggtaaacagaaaaacaggttttcttgggaaatgacatatggaagttgctgcacaggggtctctaatggcagaggtgcctccagggggctttgatatgtcagcagtagcagcgcacactgcaatgccttccttgcttgtagtaagtggcctctgggttcttaaaacaagaccctattgtgtaagatgctggacttgggaaaacccctggcaggggctgcattgaggctggtgactcctgttggggcattgtgtgctgcatagtgtaataggcagccactctaggcccagcatggtggctcacgcctgtaatcccagcactttggaaggccgaggtgggcggatcacttgaggtcaggagttcgagaccagcccggccaacatggtgaaactccgtctccactaaaagcacaaaaattagccaggtgtggtggcgggcacctataatcccagctactagggaggctgaggcaggagaattgcttgaacctggtggggcagaggttgcagtgagccgagataacgctactgcactccagcctgggcaacagagtaaaactccgtctcaaaaaaaaaaaaaaaaaaaaaaaaaaaggcagctgctctgggcacccctggattgtggcaaacttcagaattgggtgtcagtgctaagtgaccaagacaataccaccgtggatggatcacaagggctggagttgcagagtcagagctgatggagctttcctgccagccacgcaccatctgtccagtgggaagtcctttctgtgctgggaggaaggggccagcaggaccacttgtcctgcgccagtgccagcctctctcagcctgtgtgcagcacgtacatgtccatggcagccctcggctggatctcagggctgtgggcaggggtggaggccactgctaggctgtcctgctgctccagcagccccctcaggggccgttgacttttcacaggaacccaggcctgccattgagggtggagatttcatttggaaatgctcgcctcacttcccatgcggttcctctgtctgctttatgagcgggacatacccctcatccactgcctcatccaggtttcctggtgtggcagggtccccagggacccagagggagccaggaaatgtgagtcagtggcttcccaaagtggctgcctggcctgtggtgtcatagggctgctgctgtctgccctttgtcctgtctcacgctgtccccagccctcccagcactggccgttgagaagacagagttgagttgactgtcactgttgtcttggggaagaccacccggcaaagcactggcagggctcgaagtgggaaggcaaggtcagactggattgagagttgcaactgtgattgaaggcggtctttcaaagcaggctcttggtgagggttgggtaagaatcgcgatattgcagcgcagagttggtggaaacagcaagcaagggtttcgaggacttcaaagactcctaggggcaaacttctactgcttcctactgaagagtggatgggccttcagggaagttcctggcaggaacagtcctcccatttgtctgggcggatggtccggaagagcaaagacatgctaatgagacagaggaatagcaagtccccttcaagccgacaggaaggggcctcagttctcagcgccagcctgagtgtgggggctgcttggctcggcctgtttccacgctagggacgttctacgtgttttcttcttcatggctttttgttttctaataaaagatgtttctattcataaatgttgtagatgaggataatgtctatttgttttattttggaggggcagggttggggaaggctgaggaagggggctgtctgattgctggctcatgcccaattacagtttatttcctccctgagtgccctctttgatgtgggaaggaaagggaatgaaatccttctcttttactcatgagcagtgcagacgccttctccggacagtttggcttgacctgtgcagagtgctttttccccagcgaaatggaacaggaaagctcacggcagcaagtggcagaggggtggagccacaacttggctctttttccttcttcttttccttcttcttctttttaaaaaaaatccagtccactaaagcacgaatgtttttcaaagtcgcaaatgaaatacagtaggattttaaaaaaccaaagctgtctttcaacatgttgatgttctcggactgtagcaaacatggtttggacttgtccatttagaaagcagtgtaaacaggctctgaaatgccattgtaccaagggaaatgaggacatgcggcaaagctttaagaattcagcccctagacctgcttttgactgaaatagttttgcttgaaataatttattttccttgaattttttgatttttatttcttcagttctgtctggtcaccttccctgtataggcatgaccagcacctgaggaagaatgattaacacatgtacaaataacttaaatgtactcgaaagctataaaacaatatgtgtgttactgaaaataaacagatagtgtaatacctggattataaacatcttgatcccttgaaaataaagtattgccttaattcaaataataatacctcaatgtttatatagtgcctatctgaaaagtatttaaagttactgttattttctagatttcctggcgggttgattcactggagggctagttggttagggaggtagcacctgagctgccaccctctcacagctcccagatggacatggagttgggcgctgggtgggtttgggaaagctcctgggtccggccctcccggatatgcttcctgccccagggcttcaggggatctgcgttctcaggccacatgcaaaaccagttgttaatcatccctgacacactctgagtcaccaccaccctctgggaagccacagggagaccttggctgaagccaccgcagcaccatgtttcgccatcttgcagccaagtctgtttatttgtctgcctttggcacctccaggacctctgtcttttgattgttggtctcagtttgcagacagatctaactgtggactcccgggtgcggtctgtgcctgttgggaagatgggcagctgactcacttcactgtcatcccctcacccatcttctgtggtcccaggctccacttacctcctctatatgaccctgtaggcgcagtgggtgctttaatcatggggcacagtgggtgcattaatctttcctcattttagtttgcatttttatttagcggtggagttgcctccatgaatttctgttctcatccacacctttagtttttctctttttattttccatgtcatagtaggaggaaatttggaattagcagaaaacattactgagtatttccagtggaaaactatgcattgtgtagagcatacccttccaaggtatctgattgtagcctttgatccatttcatacctccgtaagttgtaggtaattggtagcaatgcaaaataactattgcctgtagacatgcaaaaatgtctgttagcatggctaaaatgaccccctccaagccgtaggaaaagcaaagttcgtatttgtaaattcatttcaacattcctttactccatatatacttatgcttctctgacttctccttttaactggttgtaacatcttattaattccctaattaatggtgaagtcaataaaatctttgacatgttcattttgtatctgtatgagagttgattttacctttgattattatttttaacgtaatattttatggtccctattaaaaataacaaaggcaccgtgcttcctggttaaccagtgacaagaatgggccctaacaagaggaacttggatgcaaaaagcagaatgaattaatcctgagggcttaagacattggaagtttttctcttaatattgtaaaaatgtgtagactcataaacaaccaatagtcaaagaagaaattacaatggaaattggaaattaccttgagatgaatgaagacaaaagcacaacattccaaaacttcagagcagtgctcagagggaaacttatagccataaacacctacattaaaaaaagagaaagacttcaaatcaataacccaattttacaacatagggaactagaagaagaagagcaaaataaactcaaagttacaaattgtaggaaatacagagtgaagagaaatgaaatagagaatagaaaaataatagggaaaatcagtgaaaccaaaagttggttctttgaagatcaacaaaatcaacataccttaagctacattactaagaaaaaaagagaaaagaagtaaatcactaaaattaaaaacaaaatgggacattactactgaccttacagaaatgaaaaagattataagagaatactatgatcacttgtaagccaacaggttagataacctagaagaattagacaaattcctagacacacaaaactaccaaactgtctcaagaagaaacagaaagtctgaatagacttaaaacaagtaaggagaatcagtaatcaaaaacctcccaaaagaaaggctcaggaccagatcgctctactggtaaattctaccaaacatttaaagaagcataacatcagttgctcttaatctcttccaaatatagaagaggagggaatacatctaatttattttatgaggccagcattatactgatgaagcctgacaaagatattacaagaacactatagaccaatatcccttacaatatagaagcaaaaatcctgaatgaaatactggcaaactgaacccagaagtatattaaaaggattatacaccatgaccagatggggtttatcccaggagtgcaagggtggtttgacatactaaaacggatcgatgtaatacaccatattaatagaaagagggaaaaacaccacctgatcctttcaattgatgctgaaaaagtattgacacattccaacactctttcatgatgaaaccactcaggaaactagagatagaggggaacatgttaaaggacatttgtgaaaaacccacagctagcatcctgttcaatggcaaaagacttgaaagcgtttcctcaaagatcaggaacaagacaaggatgcccactttcaccgtggctgttcaacataggaagtcttacccagagcaattacgcatgtaaaagaagtaaacggcatctgaatagagaagaaagaagtaaaactatctctgttgcaggtgatatggtcctagatatagaaaatttcaaagaattcacaaaaaacaactactggaactaatacattcagtgaagtcacaggatacaagttaaacatgcaaaaataagttgtgtgtttttacaccagcagtgaacaatttgaaattaccaaaatgattccatttataatagcatttagaagaataacatttaaccaaatacatttaaccaaagaggtgaaaaacatatacaatgaaaactaaagaacatttcacattgctgaaagaaatcaaagaagacataagtaaattgaaataaatccctattcatggattggaagacttcttatgggtaagatggcaatactacccaaagcgatcaacagattcaatgcaatatctatcaaaattccaaatgtgtttcttgcagaaatggaaatgctgactctcaaatacatacagaattgcaggaggccccaaatagccaaaacaatcttgataaagaacaaagttgaaggactcaacacttcctgatttcaaaacttactacaaaattatggtaatcaaaatagtgtggtactgacataaagataagccatacagaccaaggaaatagaattgagatttcagaaataaattcatacatttatggtgactgattttcaataagagtacgaagatcagtcaatagggaaaaaatagtctgttcaaccaatggtgttgggacaaccagatatccacatgtttaagtttaatccctacttacacatttgcataccctttatacaaaaatcaattcaaaatgctcaatgacctaaatataggagctaagtctgtaaaacttctaatggaaaacatagagtgaaatctccatgactttgtttttggcaatggattcttagacatgaaagcaaaagcataagtaacaaaagaaaatgcataaattggacctcatcaaaattaaaaacgtgcatcaaaggacagtattaagaaagtgaaaagacagcctacagaatgagagaaaatatttacaaatcaaatatctgttaagggcctggtatccagatataaagtacttttacaattcaacacaaaaagacaaagtactcagttaagcaatgagcaaaggatttgaatagaccttctccagagaagacatacagatggccaagaagcacataaaaagctgctcaacatcattagtcattaggtaaatgcagattaaaaccacagtaaaatatcactttataaccactaggatggctatttaaaaaaatgttggcgaggatgtgcagagattggaacactggtggggttgtaaaatggtccagtctctgtggaaaacagtgctttggtgattcctcaaaaagttaaacatagagttaccatatgacccagcaattctactcctaggtatatgccacaaagaactgaaaagaggtactcaaatacttgtacattcataatagccaaaaggtggaagcaacccaaatgtctatgatgaatggatgagcaaattgtgatataaacatacaatgaaaaattattcagctgtaaaaatgaataaactaccgacacatggtacaatgtggatgaaccttgaaaacattatactaaatgagagaaaccagacacaaaaggtcacatattgtgtgattcctttcatagggcttgtgcagagtaagtcagtacatggagattaagtagatatgtgattgccaggggtggagaaggggcaatggggaataactgcttaatgaatatggagtgatttgggggtgaagaaagtgttttggagttagataagggtggcggttgccaccattgtggatgtactaaatgccactgagttgttcactttaaaatggtgaattttatgctatgtgaatttcagcacatacaaaaattgatatggtttatatgtgagtaattagttcctagtaggaagagggtttagatcaacagtattaaatattctccccctgaaaacacatggcacatataacacctacggtcaacggcatccacacaggaaacacagtcccaggaactcccaggattatgcacaatttcgatgagtttcctgaataccacctcatcattaactctgattaattacaagttactggtggcgtatctcgcagaagcaaggtgaggtgattaggtgatggtcattctaacttttgataattttgagggacagcagtgtagggagaaaatactagtgtaaaacattatatttgtctgggtgcagtggctcaagcctgtaatctcagcaccttgggaggccgaagcaggaggatcgcttgagcacaggagttggagaccagcctggacaacacagtgagaccctatctctaccccctacccccaaataataataattagccaggcatggtggcatggaccggtagtcccagctactcaggaggctgaggtgggaggatcgcttgagcccagaaggttgaggctacagtaagccatgattgcaccactgcactccagcctaggtggcagagcaagaccctgtctcaaaaacaaaaaagctacatttatatagattagcctaaagaacgtaaaatttgtatcctaattcctctacttagatcacatctgttgatatttaaaaatataaggggaccagatgcggtggctcatgcctgtaatcccagcactttgggaagtcgaggcgggcggatcacgagctcaggagttcgagaccagcctggccaatatggtaaaaccccatctttaataaaaatacaaaaattagctgggtgtggtggcatgtgcctgtaatcccagctactcgggaggctgaggcaagagaatcacttgaacccgggaggtggaggttgcagtgagccgagattgcaccactgcactccagcctgggcgacagagcgagactctgtctcaaaaaaaaataataataaaaataaatataagaaatgtatagaattacaagattcaaatagtatagaaaggtacagactggaaagtgaaggcttctctacttagtacagttgctgttaatgcattcttgtgatttctgtttgttttcttcaaagaaccattttatggttatgtgcatatgctgacataattaaaaaaatagaggcatcattacagatttgcatatggcttttttcacttgatataccttgaagccttttccacacgtatcagcacctaaggatgtactttattcatttaagtggctgcatcatcacgataataatcagcacttattgaacatttgctgtgtgccagcactgttctaactgctgtggacacattgtcgtcattgttaatcttcaccacagccctctaagggaggtgctaccattgccccattttacggaacagagggaacagagggaacagagggagcggagggaacggaagtgcagggacacccaggaagagatttaagttctgtgtgtctgattccagagcccaggctctcaccaacacaaaattctactcctctacacagttagtttgtgggagagctgggatttattgtaatttatagtttacatagcttctatgttttgctgttttctggtccagttccctaaggtgtgtgtgccctacgtttcacatttcggtctcccaggggctctaccttactgggttttcttgattttgtcttccttaaattagaaaagaaaaggaagaaccaagaagactgaaacagttatgattgaggtttgcagaattgttcccatgaatggctactagctcttgatatattagtccagagcacagaaaatctatacttttaatagcttggactgcacacaacagtaagtctttatagacggttctgtcctgtaggggagaaaagtcctcgttgttcctctgggatgcaacatgagagagcagcacactgaggctttatgggttgccctgccacaagtgaacaggtcccagcatgaaagcagggacaagaaaattgagctcgtgacctccgtccagtgggccctttgattcattctttctttttgtctcactgtgtcatcatatctccctgaactcagctccagattgaaacgtagctgtaaccgcagctaaccaacaggcttcccttgaacaggccgaaaggtacagggtgagtctattttgtgactctgtggaggcgtgggcagcgagatggttgtctaccgggatctgtgttctggcttttgtgaagagggaagaaatgggaaacacgctgatgccagcctttctgcaactggtttgcgggagtgtaaacaactagctggtttggatctaggatcaagatgaagtgtaatagaaaactcgggctgcctttatccttaggtcagcaaaacagcaggatactgctgtctgcgtcccggttgaccctggcgttcttggccgctgccaatacagtttgccatttagatccatttagcagaaaaggacattcgtctagaaggatcccgccttgtaaaaatgcaggcttggcatgcactggggccctgggaagtcattcttaaatatatgaatccttttctgggggagaggtgccggcagttgcatgcaaaactgggcactgctctggcggattggccagtgcattcttacgtgtggtgggcactgtggaaaggcgcctttgtgccagtttggataagacaacagattcatgggtaggaaaccagtgtttgaaattaggtgctgaggttgtagagtcagatcacagcagagcagaagttgaagctatgagttcggagaaggtctgcaatatttttcctgacctctgaagttgtccaaaccactaagtgaagaaacatacttcctttggttcatctgatcaaattatcatctgcaaacttttggccttgttgcctcaatcctactgcaatcttcctgcctgcttgagagagaactgggtgtcgggggagtgggggcaatgtactgttgctccccagggtcaaaacgtgaacagaccaaagggtccagatggaaaccagaatgacttcactcctggaacgaggcatcatctttcctagcacatgtatttttctttcatgcctcttttcttttttcgttttttaattttagtctttttgagacagagtctcgcatggtcacccgggctggagtgcagcggtgtgatcatagctcactgcaaccttgaacttctggctcaaacagtcctcctgcctcagactcccgagtagctgggactatacgcatgcaccaccatgcccgtctaatttatttattttttattttttgtagtgatgaggtcttgctatgttgcccaggctggccttgaattcctgggcctaagtgatcctcctgcctcagccctgcaagttcatttttctttttaaaataaagtcagtcagttataaagctagaatgtaaaaacaaacattttctgatggattagaggatacacacagctttctgtaactgaaatgctgagtgcatgtgcaacagtgcctttaaacaatgaccttggcccgcggtgcagatttgatacactgagcataactggctgaatgagtgctcctggtgctttggctagaggcaggacttggatgttggcaaggcccttacatcgggccacagcaatctttcccagactctgcatgtccacttatttctaggtaggagacatcattcttttgatgtattgctctccaaccgcaatggtagagcagcacatgattaagtcatggttagacatataaacaatacttgtagcagaaacttgagctggtgcacgtaaaaaagtggttcatttaatgatgtaacggcaaagtgaagggacaaaatggaaaggggcgtgcccagggctcatctacaaaatctttgggacaattcctcttgggagtcaagctttagatgcctgctgtccagccatgagagaacatcagagggtcacagcataccccaaggttccgttaacagagcaaaacatcatcccttgcaacccaaaggcaggaacacagctgggccccaggaagacagggattgtactagaatcccttgcagtcctgagagtgctgtcttctggctgcttggcttagctcctctctgcaacccagcttcctctcgccttgctgactctcctgtagggagtaaaagaggctgcctccagcctctactcatacagctttgtttctgtgtgtttcccagcctctgcgtggaaggacatgctgagagccctttctccaccgtgcttgcattgactgattacatgtctgtctgtgacaccagcttggctgttttatttatttatttttttttgagatggagtcttgctctgttgcccaggctggagtgcagtggtgtgatcttggctcactacaacctgtgcctcctgggttcaagtgattctcctgtctaagcctcctgagtagctgggattacaggtgcctgccaccacgcccggctaagttttgtatttttagtagggacgaggtttagccatgttggccaggctggtctcgaacttatgacctcagatgatctgcccgcctcggcctcccaaagtgctgggattacaggcatgagccatcgtgcccggcccagctcggccctttaaatggacaaaactgtgcaacctggaggtctgagggcagctgcagctttcatcagctccagcatcccattgacgtctgtgttgggtgactcagtattgagcagatcctgactgatataacatcattcttctaaagtttctatttctgtatgttttatatattctatgatactttagtatagtagtacaggtacgcaatttataaatgaatacacacatattcgaggatgcacacaaacccttttacaactagggatgtgcaatcaaagaagtttggagacttttactttatggaatgtctacactacgtataggatgtttatccagaatatctgtgggaatatgcagtggttcatacaaggcacagatcatatcttgataaacacatactacacattttctttcttgactccaaaaaaacttaaagagatttatatccatagatcttaagatatgtacagtggaatttcatgtttcaaacatttactgatattctcacattatcatgagaaagaagactgggactgtgctgtgggattcttattaagttgtctatacttatttgcataaaatgatttttaatataaaattaaccaaagttgctcaattataagaaatgaatggctttatttgtgatactgctatgatttgaatgtttgtcccctctaaaactcacgttgaaacttaattcccagtatattgagaggtggggcctgtaggaggtaattgggtcatgagggctctactgtcatgaatgggttaatccatgacaggagtggtattaatgggattaatgggttatcacaggagtggcattaatggctttataaggggagaaagaaagacctgagctaactcatcccctttgccatgtgatgccctgctccaccttgggactctacagagtcctcaccagcaggaaggccctcaccagatgcagctcctcaaccttggactctcagtctctgtagccataagaaatagattacttttctttataaattactcagtttcaggtactataaataacagaaaatggatggagacagataccttggctctgagcttttttcttccttggcttttgaaggcctctcctggtccagtgtggattctgtaaagcttttttgaaggtcttttagcaatgaagaaagtatgtactaggagatgaaggcatgggaattggctctaaccccatttctacaagtagcgcgactgtgaattgtggtggggctcaagttcttaatgtgtaaaatgggaacgatgatacctcccagagtcatcagaagatcaaatacaaccatgaacgtgtttgtgctctacgagctgtaattcctaaaagataggtaggttaagatgaagaaaaggcattgttgagtttctcatgaacttctgatgcaaggcgtgttctagtgtatcatgcgtaaggaatcttttccaagcccgagaaaaactatccggtgccaagtgcatcaccactgggcataagtagtcccacccaagacaggaggggtgcagggctcctgccactctgcgtcatgaagaggaattgaaaacaaaactccatcctgttgaaaccttgaggtctagcactatatcttgtccttgtttgtgcatcttacgtgcttatgcaataaggtactctcagccctcagtatctgtgagttccatgtttgtggacttaacaactttggatttcaaatactgggaaaaaaattgtgtctgtactgaacaagtacagacttttttctcttttttttgagatggagtctcactctgtcacccaggctggaatgcaatggcacgatcttggctcactgcaacctctgcttcctgggttcaagagattctcctgcctcagcctcctgagtagctgggattacaggtgcccgccaccacacccggctaatttttgtatttttagtagagacggggtttcaccatgttggtcaggctgctctcgaacttctgacctcaagtgatccacctgcctaggcctcccaaagtgctgagattacaggcgtgagtcactgcacccagcccagacttttttcttgtaattattccttaaacaatatggcataacaactatttacatagcatttatgttgtataggtattataagtaatctagagatgatttaaagtgtacaggaggatgtgcatgggttatatgcaaatactataacattttatatcaggacttgaacattctcagattttggtatctgcaagaggtcctggaaccaatgcccccaggataccgagggacaactgtatgtactgttgaatctccaatgtctaacacagtgcctggtgtggcctagacatggaatatgtgtttagtgagtggaagaataaaggcattaccatacctgcttgtctctctggcacttgtcacaggattgcaagcccagatggtgtttgtgaagaggcaggagtaggtacagtatggaggtctacagcttgggtttctgaggcacagaccaggttttcccaactgttttcccagcctgttttcccaactgtaaggcgtcacactagtaagtctgtcatagaattagattgaagattaaatgaggtgatgcaaatgaaaagagtctagcatacaggaaagcttaacagaatgttaactatcatcaccatcattactaataacatgattagtggtcttaataattcatagatattcatgatgtggaacttggaatctcattagctccgttttgtcttgatgtctgtgactgccttctcttgacttttcccttagtcaccattttttactgcattttcaacccaactggccacatgtgcctgctttgtagtccaggttcccatcagtgcccttggccttaccctctgtgagcaggagcttcgtactctctagcaaggtttcagattagttttctgtgctggaggagttggaggcatttttggtaagctaaggctgtacttgaggactaatgtcacgctgtcaattttagctcattgctgtgatatccagcatagcagtaaggagctgatctgcagtcacttgccctcctctttgagcttcagctcttcttgggctggggaacagttgaggacactgtccaggaaccagagactgaatttccatggcctcatggcagcagtacatggatttaggttgttaccaggaggtttgtccacatgtgaggctgtctctgttttcattgtcagtcccagccgtcacaccccctctctcctttgaatgaatgaaagatgctagcgtgcctcatctctgacctcaggaggcctggacaatggaagaggaagtgggggcttttgctgccctctgctcagaggctgcaatgtggcgtggattcttctggcagctgtggtttaggctgccttgtgtttcctggtaaaatttcttaaactaagagtaatattttagcatttttctccaaagagcatagattgaagatgagggcttagtaatttcccttgagttggaaattcattgatgacttttatttatattttgtaatgtctgttaaatacttgcagaagtgctggatgattggagaagctttaaaccatgagaaggtcatgtgagcatggtagttgtggggatgcagtagatagggagttagggttttctcaaactctgtactccctcccttgcttccacattcctttcctcatgcagtgcgatcaagtatagaccctgatatagttaaccttcatgagtataagacaattcctaatacatcatgagtcaaaaaccattattatttaactagaacagtgtagagtcaggaaagcaggtaagttgtgggcagactgtaatatccccagcttataaataatgtggaagtgtattgactgcttgctcttctctgtacagtttgcaagtgtgcatatatctcatttgattaaatcacatctgttgtaatctagtgccctgattaagagattacagcagttaactgtattgcacaggaccttggcttggcagtcggcaaagccttgagcattaattcatatttgtgagtggtctgaggatgctgacttttcaaatttattatggttgggatttatgaactgtttcttttgtctgctctatagaagtgagcatggaatgtaagccaagctgtcattgtggagtcttagtgttgatacgatagactctggtactttaaatcaggccactgtcatctatgataatgcttggcacgtagtaggtgctcaataaaaatgcagcaaatgaatgaacagctcctaaatggcctttgtttccagttttgctttcctccagtcctcttaaaattccaccactgtgtggtctcattggctcccattgccctcagaacaaagttcaaactccctaacgaagtaactgatggtgcccttggctccagttgtataagtttaggagtctgttctgattgattggtgcctttctgcactatgggtttagctgacatgctcctaccagagtttacgtcttagcctgcagtacattcattcctctcttgtttctgggttatttctccttggtgggcatgtcagtatgagttggcgttcagtcaggaagcagagctactctgagtgttatgggaaaaggaatttattacagtaatcccacttaataccagtgtgggtggctggggaaggggatgcctgggagtcagagcccgaagatcagagaaacatctcaaaacagcagcacccggcatggtggatggttgtggctctcaaggaagctctgagaagccagaggtgcccagcagggaagccggcctgcagtggggacatggagcaggtgcctgcgggcagccactgctctgcgtagctcctgcctctacaccctacattgggaggaccgctgttgggagaagagtcagacacagaagagaggagtggggacaagtggggctctgctgggaaccttgtcatctctgtgtgctaaagaccttcagagagtaatgcccagtctttacttcctgcagattccttttttggtcaactctagtccagaactctatggagaaggggcttctgggaagtgagtggtgttcctagctttagccacgttgaacctaggatgatccaggacaccgcatgctgggtctgtgtaacagtgtctctgtgggctgtgtggacatgtgtgtgcacatgtatgcatgtgcatgtatgtgtgtgttcatgtgtgtgcttcagatcccctttggggaatgtgcaggaatgtcagaagtagggagatagagccactgggttagggcagagggcgagaggccctctttgaggccacctgtggagggctaagatgactccatcctggatgctaatccatcatgtcggcttctgattaactccagttctggcaatgcctctaagatttctatttcatcttcttccttgtgtaagagcatgtacttaccataaatcttgtccttaggtcaaaacaaccttgatgttatcgtacttaccgtaaatcttgctgtaaagcagttgttccgcacatcccttctgaagcacggacactgtccccctgtggtgcgtaagccctgggcctggggatggtagcacagggatcccccatttcgcctgtgggccacccgagacgcggctcctgttcatacgtcccattaaatgttgctctctgagaaactggatttgttgcctctttcttcgacctctcagttcccttggcttttggcagtcggtttgcaaaatgacctgctcaccacggaaccagctcattccagtcagagtgggatcagcaggatgggggagtggaaagcataacccaggcccctccatccacatgttcatggggaggtgctggcttctttgcctcctggggggaaaagccccaaatgtctgaccacgctgactcactcggacagccttccttctctgtggcctctgcttgtgttctcctcccccctcttcccttctccattcaccagtcctgcctgtctctttgctgggctagtgcatccttttggtttcagatttagtgcccctgcctccatgaagcctttcctgattgtcagatgcgggcaggtgtccctgtgcatccccatcacagcacttgtcacagtcgatgctacttcccagtttacttgtctgtgttcctcactgaaccaggagcctgtgagggtagacacatgggacttacagcaatagccatgtgcttcccttcccaatgtcacacaagtgagacatggtctggtgcatctgattctgagtctcagctgtgtgcgagtgtggcatgacctttcatccatccccctgtctatctccccatgaggacaaaagcaagggtgactacaaaaatgaccaccgctgccgaggcctttgctctgaaagtgcagcacagtggctgggaccgcaagacagtgtaactgacgacgtctgcagaattcaaccagcgtgctctgttgggtgggacaggaagtagggcagtagaagattagacagaattgataatctttgagatcaagcagtgtgcggctttgagatggagaagcagtagtagctttgtccttcccagggtttggacccagggctgccttgggaatagacgttcagacatgaggaaggtggcctgaaacatggcggctcggctatgtagagcggagggcacttagaggacatttatctatacagcgggtctttttgtttttgtttttgttttgagacaaggtcttgctctgtcactaaggcttgagtgtagtgcagcctcaacctcctgggctcaagcaatccttctgtctcagcctcccatgtaccttggacaccaggcacatgccaccatgcctggctaattttttgatttttcataaagacagtgtctcgctatgttgtccaggctgttctcaaactcctggcttcaagtaaacctcccacctcagcctcccgaagtgttgggattataagcgtgagccacagcacctgtcctatctagtagatcttaaaactatttaggtcatagattgctttgcgaatctcatgagggaccctctcaccaaaaaaaaaaattacctgctcacaaaggtttccatatgatttagggggatattggatgcctgaggtctgtgatctgtttctaagcctcatcccagaggtgtggtgatgaggaccaacaaggtatatgcttgccggaggtcaagacagagagacaggaggggtgaaaagggcaaggctatcccgagacctgtttccatacatggtcgggcctctcaacttgaatggaaagtttaattttgcctctctatggtggtagaaatagtgtcagtgacatcaagtttttataaggggaaagcaccacagaggatcttggggtgctgggggctctgacagatgatgcatgagttatcaggattgtgtccacttcagaggggacaacatggtgagaaaagggggcaccagactaaggtggtccccgtgagcacgttctcgggaagtgtgagggtgggtaaatggtccctgtttcttgccttgcgttgaaggctttgctattccacatttccatttttttgaaaaagattattttaattttatttttttaacctgggttaaagatatgcatcttccacattttctctggtgctttagaattcgtttaatgaaatgagcttctctttcttttctttttgtttttgtttttgtttttgtttttgagataaggtctcactctgtcacccaggctggagtgtaatggcacaatcacagctcactgcagcctcgacctcccagcctcaagcgatcctcctacccaagcctcccaagtagctgggactacaggtgtgcaccaccatgcccagctaattttttattttttgtagagacaaggtcttgccatgtagtgcaggctggtcttgaacttctgagctcaagcagtcctcccacgtaagcctcccaaagtgctgggattacagacctgaagccaccatgctgggccatcagctgttcttcagaacaattttttttcactctttttaaagaaattcttttttcatttagtcttccctgcatttcaaatagaatgatcttatgagaagggtcagtaggattatttaaagccgagagatgaggcagtgagctccgggaggtgttcatgcttcccttctccctctgtctgtcgggtcccaggactaaggatcctggctgtgggcaatctgcagggtggaagaacaatcctgtttcgcctaacatgtcttgtcacagttcccaaggcccccgctaaggacgcgtggaatggggaggtgagatgggaggaactgaaacagccccatcctggtgttaggttccctgttgagtcacagtgtgtggaaaggatatcaaatgaaggagagattttctactgagatgaaaaggcacttaataaaatgacataacgcttcacagggagctgttttaatggctactcaaagcaactctgaaatgtctataatgagatcctaaaagcaagttctgaaatccccaattctcttctttctgatcttggatgctgtgatatcttccctagagatttactcttagatggaatgactgcatttcatggtagctctgtagccatgctaacttcatttgctgatggcagctttatcgctattgtttaaatcactctaaataggttttgtcagttaaagcaatgtaatatctttcctttcttacagcccagagagtagactcctgtaggaatattggaatattcagaatcagtactcgcagagcagaacctcataatcctataaaactttgctctcatcaacccctcacactgctgacctaccttaaaccttaatgtcctgatttgcaaaatgaggataaccctacttcattagggttgttgaaagattaaacctgtaacaagcctggagagtcagtgcttactaaatgccctccattatgtctgtattagttgcccattgctgttgtccccaaacctaacagcttaaaacaacatgcactgattatgtcacgggttttgtgggtcaggaattgggcatggcttagtaggtcctcgggctgggggatctcttacaacactacaacaggtgttagctgggcctgcagtcatctcatgatggaaccggggcagggtctgctttcaggctcccttggtggttgtcaccaggatgcagttcctggtggcctgttgtatatgtgccctgaggcctctctcagttccctgccttgcgtcctcttcatgcatggcagcttgcaagagcaagcaggcaaaagggagagagggagtatgaaaaaagagggtcgcaagcatctttcatttgtttatttatttatttatttaagacagagtcttgctctgttgcccaggctggagtgcagtggtgtgatcttggctcactgcaacctctgccttcgggttcaaacgattctcgtgcctcagcctcccaagtagctgggattacaggtgcacaccaccatgcctggctaatttttaatatttttagtagagatggggtttcaccatgttggccagggttgtctcaaactcctgagctcaggtgatccacctgcctcggcctcccaaagtgctaggattacacgtatgagccaccatgcccggccaccagtaccttttataacctcccccttggaagtgacatctgccacttttgctgcattccatttcttaggagcaagtcattgggtccagtccatatgggagtgaatactgggaggcggggattattgggagccattttagaagctgcctactgcaattgtcatgattcttcatccttttttgctagacatgcaactcaggaacagtaaagattgtcttgtaaaaaattgcagaatgtagcaataaaaaatccaaagtttggagcgtggtgccttgcttggtaagccaggttattccatatgatctgcgaatgctccctccaggaggtgggtgcctgtatcactcatcagtgacccatcttgcccagtgaggagctcacacatgtgttgcttgtgaagaaaggtggcaaaaagacaggtgcttccttggataggaagtatgatttaagtaagaaactgtggtaattattatttttttttacagttaaggccacattctctatttctgcttagctgcacagagtttgtacatcgggacaaactgctctctggaaatgccaagaagctgtggggctattataagaaaaacggaactgaaggagttatggaacttgctcttcttccccatttaaaagtcgtcttccttctttaactgatctgaagagtaggggaggaggagagagtggtggtgcgggcttccttaagagctgggctagaggagacatggagcctctggcactttggttttttgctcctgataacgtcagtggccctggctttcctagaactcagcaacaggagtttcctttgccaccagcagggtaggggagctgccaccattgaggccagaatgctcagtggctgaaagattgctgaacttgggaatccaccagataggccagctctgcgagaatgagagaaaaataaatttaacaatagcagaaagggacagtgtttttaaatattacaaatattttcttattaggaacagtttctttagggtggatgatgtcccggcaccgagaccatctgttctttttaaaccttcatctcagagtctgaaaagatctggaaagtgtcctggccgtaacatgtgtccttggacgagttgctttaatttcttcctttaaacttacgctaaggcctaatcaaacatgatcagagagatgaggagacagggcaactcaaatgaaaacctttcaacagacaatagaagcagacccacagagaatctaaggaatgagattatcagacatggactttaaaagatgaatgtttaatatgttcaaggaaataaaaatcaagatttaaaaattcatcaaggaatcgaaaactaggaaaggaataaaacgaaacatttataactgaaaactataataattgatattaggaaatgaataaatagggttatcatatatgatacatctgtagaaagaactggaagaaaatctccaaattcagagaaactcagagagatagaaaataaagaaaaaaattatatatatatatatatatatatggtgaaaaagtttaacgtaggcataattggagttccagtaggatagaagagacttaatggagcagaaacaatatctaatattgttagatcagataatagctgatacttttccataggaagtgcttagcttggtgcctagaactttttatattgttagtaaatgtcagcttttctcatcatcaatattattattttgctcatctttgctcctgtggaagatttacactgatggcagttttatgagagtccaaatccactaggccttttgttcaccaaagctcttacagtcctggagcttctgcttctactaaaggcctggagttggggtcacactggttgaaatctgatatgaaattagagtaagttttcctatggaaacaatgttgtcagtgaatgtgggtgtccactgtagagtgctgtagctcagcagcaagcttaggaaataatcattctttatttacagcatcagttcaatggaaaaacgcatattttagtttcacatgcgtagccaacaaatgctcacttggaactcagccatcagcaatccagttgatggagtggggattgcctgtacaattagttcggtcactgtcaccctaacctcctgcctttgattcctttgtaaagtttaagtctcatttgtaagtgtcctcactgcaggaatcaggacataatctttttatcccctgtccttgcatactgctgactgcacgtacggtgaatcagtggatgaattcgtgcatgcatttgtgcgtgcctcctggagagatggtttggctggtgaacagtgcactggatatggggaatgggaaatctgagtcttgactctgcccttactagttacaggcccactgggagaatccatgttttccttatgcgggaattgaggatgaagccatctctcctccccttgacaaagggctgctgtgaggaccaagtgagataagtgtgtgaacatgggtacacgggctcccatttgcaccatcgaatcatcttgtttttgtggcttccatgcccttcctttccgcttattttttcgtattctctggtaggatgttttacatctctcctggccatttttttgtatcttaaatgtggcaccttattctctgtatgtgggcttctgattctttcatggagggaactgtggacatttccaagctatgctcattaatgtccacggggcattaatctaaatgcttgagttcacttatgccatgtattagtttaaatttacttctgtaaggaatattttccctcatgaggtagatagataaaatgaagtctagtgactcagacccagtgcagaacccacctttttctttctttctttctttcttttttttttggagacagagtctcgctccattacccaggctggagtgcaatgccgatcttggctcacggcaacctacgcctcctgggctcaagcaattctcttgcctcagcctcccatgtagctggaattacaggctctcgccaccacgcctgtctgatttttgtatttttagtagagacagggttttgccatgttggccaggctggtcttgaactcctggcctcaaatgatctgacccccttggtctcccaaagtgctgggaattacaggtgcgagccaccacacccggctgcccagagctttttattgatactgtgttttccacaaataattttgtgttatggttttctcactacagtaacaggcctggagttgcattttcttgcattgctagctcagtttttcctagaacagagtgtgaagactgagatttactctgcttgagtgagatctgctctctctaccccaaaaggaatcttatagaatgggtggtaataacaacagcacaggatggacttgagtttgataatgttttctgcttttatggcaccttatttttggtagtggttactgtgtaaaaatcagacctttttctcttcagtgcataattgtccctctggtgaaaagtgcttgaggtacagaggaattatttcataccaccaacatagtatttagggcccagagcaaacaggcccagtaagtctgtaatctgataagccctggaatgggatccaggtgcaaagtacttccgatctctttgacacaaagggaggcctagacacagactcaagtgaggaaggaactggagctctcccgggagttcactggtagtttgaggagtgatgttcgttgttttaacctccagtctttggtccagccaactgatagaatacttcactttggggacccgagactcttgttgggtatataggattggggttttctgttgattgctttgtaacaaacctagtgtagggggccgggtgtagggggtgggggagagtgggtgggaggagtatattctcttccccttaggcaaagcttcaaaaaagtgctttgtgggttaatatggaatttgtgccatatttctgtggggtttctttgaaatcgaaaagggaaggtgcagtgcttcctggattgagcttcctgagcccgtttgtcttctgctctgagttgaccctggttttggggctgtagaaaggggaggagtagccatccagtaaccctggcctggattgctaaggccagggcccgggagctgggctctcactctttccagacagggctgaggcaccctcctgctccaagatgtggaggcgccttcctgcgtgacctcatctctgcatctgcgagctccatctgcccccggagtgggtgagccaggcaagcgtggcactgccctcattactatgcactgccttcgcttgcaggcatctccacacaaggacctgcctggcaggcggggtgggctgaggcgggcgggtggggtgtgtatgctggtgtcccaggtgcctgatgggacctttacttcttttggtcacctttggagtcagaacagtccaaactgttaaccatgcagacttctgcctgtttctctctttatgttatttctttatgcccacaaggtctgctgccctgtacaggcctcctgaattccctaacttaactccttgtcaatgctgaagatgctgaagacgttttagaagcatgtggctgggcgcatggctcacaccggtaatctcagcactttgggaggctgaggtggggatcgcttgaggccaggagtttgagaccagcctgggcaatatagtgagacctcatctctaccaaaataaaaataaaaaattagcctagcatggtggtgtgcacctgtagtcttagctacttgggagggtgagacaggaggatttcttgagcctggaaggagtaggttgcagtgagccgatgttgtgccactgtaatccagcctgggtgacagagtgagatcttgtctcaaaacaaacaaacaaaaccccaaaccaaaacaaacaaaaagaagtatgtaagccttaaagtctaaacattcaactaaatggatgactgaatacaaaaaataaatgcaaaaatccttctcatacagattatctctgattccaagaccagaaggagatgctggaattatcagtgatccccaatgggatgtcatgcacagagtcagttttgtagtgtacattataggcaaatcatattctctctctttctgaacattctgagaagaatgcactcaaggtttgaaagactatcatgtatgccataatttttgtgcttagttttttttcttatttaactacattctgaggaatggaatccctgagttgatgggtcttgttagtgttatttcctgtccataagaatcatgttgatttataatgttatcagcaatgtatatcccttaccagtttactcaaacacctcaccacctgaagatttctgaaagtctgcggagcagtgcttagtgagtttgtagtaaaggagtcagtaggagtatggtggatgtcgtgaagagagaccagagaggacagccttttcttctcagtgcccactttgatcgagtcacaattattccctgcagggctgggtcgaaaagattttaaggcccttttcacgttcaataagataatgtgtcttgaattgattactgatgtctgccatgagagcaggattaagtagtcgcgatctatttgcctgggaggtatcattcttttttaaaattattatttttattattattattacactttaagttctgggacacatgtgcagaacgtgcagatttgttacataggaatacacgtgccatggtggtttgctgcacccatcaatccgtcatctacattaggtatttctcctaatgctatccctcccctagccccctgccccctgacaggccccagtgtgtgatgctcccctccatgtgtccatgtgttctcattgttcaactcccatttatgagtgagaacatacagtgtttggttttctgttcctgtgttagtttgctgagaatgatggtttccagcttcatccgtgtccctgcaaaggacatgaactcatccttttttatggcttcatagtattccatgatgtacatgtgccacattttctttatcaagtctatcattgatgggcaagtctttgctattgtgaacagtgctgcaataaacatacgtgtgcatgtgtctttatagtagaatgatttataatcctttgtgtatataaccagtcatgggattgctggatcaaatggtatttctggctctagatccttgaggaattgccacactgtcttccacaatgtttgaacttacactcccaccaacagtgtaaaagcattcctatttctccacatcctcttcagcatctgttgtttcctgactttttaatgatcaccattctaactggtgtgagatggcatttcattgtggttttgatttgcatttctctaatgaccagtgacaatgaacttttttccatatgttttttggccacaaaaatgtctttttttgagaagtgtctgttcatatcctttgcccactttttgatggggtttttttttcttgtacgtttgtttaagttctttgtagattctggatattagccctttgtcagatggatagattgcaaaatttttctcccattctgtaagttgcctgttcactctgatgatagtttcttttgctgtgcagaagctctttagtttaattagctctcatttgtcaactttggcttttgttgccatcgcttttggtattttagtcatgaagtctttgcccatgcctatgtcctgaatggtattgcctaggtttcttctagggttttggggttttaggtcttaggtttaaatctttaatccatcttgagttaacttttgtataaggtgtaaggaaggggtccagtttcagttttctggatatggctagccagttttcccaacaccatttattaaatagggaatcctttccccattgcttgtttttcaaaggtttttcaaagatcagatgtttgtagatgtatggcattatttctggggcctctgttctgttccattggtctatatatctgttttcataccagtaccatgctgttttggttactgtagacttgtagtatagtttgaagtcaggtagcgtgatgcctccagctttgttccttttgcttaggattgtcttggctatacgggctctttttttgttccatatgaaattcaaagtaattttttctaattctgtgaagaaagtcattggtagcttgatggggatagcattgaatctataaattactttgggcagtatgaccattttcacgatattgattcttcctatccatgagcatggaatgttcttccatttgtatgtgtcctctcttatttcgttgagtggtggtttgtagttctctttgaagaggtccttcacatcccttgtaagttgtatttctaggcattttattctctttgcagcaattgtgaatgggagttcattcatgatttggctctctattattggtgtataaaaatgcttgtgatttttgcacattgattttgtatcctgagactttgctgaagttgcttatcagcttaaggagatttttgagctgagacaatggggttttctaaatatgcaatcatgtcatctgcaaacagagacaatttgacttcttcttttcctatttgaataccctttttttctttctcttgcctggttgccctggctagaatttccaatactatgctgaataggagtggtgagagagggcatccttgtgccggttttcaaagggaatgcttccagcttttgcccattcagtgtgatactggctgtgggtttgtcataagtagctcttattattttgagatacattccatcaatacctagtttattgagagtttttagcatgaagtcgtgttgaattttatcaaaggccttttctgcatctattgagataatcatgtcatgtagtttttgtgattggttttgtttatgtgatggattacgattattgatttgcatatgttgaaccagccttgcgtcccggggataaagccaacttgattgtggtggataagctttttgacatgctgctggattcagtttgccagtattttattgaggatttttgcgttggtgttcatcagggatatgggcctgaaattttctttttttgttgtgtctctgccaggttttggtatcaggatgatgctggcctcataaaatgagttagggaggagtccctcttttctattgtttggaatagtttcaaaaggaatgttagcagctcctccttgtagtgggaggtatcattcttaatctggagggataggaagcttgaaggccgttgcaggagtccaggaatgaatcaagtgttagtgcttggttttcacagattggtggtgcctagcgttttgtgtggcagcagccaaaactttgtggttcctgatttcataattatagatttacatgtgattaataagtgtgacaattcaaacagcaggggttgtcatttcagaataagtggttgttctcagagaggaatctcatatgagggatccatttcccaggaagtagatggaaccaattgctgggcatgagtacgtctctgatatcgactatacaaatgattatacaatgaaacactatctggcccacaggtagggttttactgtactttatttcaggttctggagtcagaatcgggtttattctaatgtctccccggcagtcaataatttgagcccctttcattactgttaaggctgcagcggctatcttcagagcctgtcaggctatgagtaacttgagctatgcaacgtgaaaccagaaagcactagtaaagtacttgtgagttctagaaatttgactttttttttttttttttttgagaaatttaggccagtgtggtgactcaagcctataaccccagcactttgggaggctgaggccggaggatcatttgagcctgggagtttgcgttagcctgccccacatagcaagaccttgtctctgcaaaaaaacccctaacatttaaaaatagcagggtgtggcggtgcacacctgtagtctcggctactggagaggctgaagcgagaggatcacttgagctcaggagttcgaggctgcagtgagctatgattgcaccactgcattccagcctgggtgacagagcaagaccctctctcttaaaaaaataaaggaaaaatgtacacttagcagggaagttgatttaacctagtgagagccttaagaggttttgactaggactcaaaagagtttggttctgactctaccaaccagctatgtgaccttgaggaagtcacactgtttcctctttaccaaaacgaggggactggacaagacggcctgtggtattctcagaatcttacgaaatggaataatatatacatagatgggtttccgtcagtgtggccctaaagacaggcctctctgatcctgtctctctcttccaaggctccttcttcacccagtaggcttcattctcttttctgagtcctacctctgtgtcttcacatgcgacagccactattaccctggcactttccttgtgtgtgtgtcacagccctagcgagtttcctgcggggaagggcattcccagcgcggagtgactccttagcctggctcctggcctgtcctcagcaaaccgcgggtagggtgtgcccctggtggccagccgaggaacagcagtcgcccctggaggtcgggaactgcatccacttgagcggtcccaagccacgggtcagagaggattcgatggtggtgttctttgcagaaatgtttccctttctgagacaaactaaaactttgtctatcctttcgtcctgttatttctttcctatcaagtgtgtaagaatgtacatttgacagtgcattctaaaagaggtgagagttaaaatgtttcaaaataaagagacagtgactttgttgtttgaaaaatcagtgcttatatctaaatttgagcagacttgctgctgtaactcttcagacaagttggcgttgacgcttgagccctttgtagaggatgatgagtaaagctgaacattgagcattgtcaagtgacttcttcccttttccgccttcaagggcgttttggggctggccttgcaggattgatttgttggctgctttgagacttgtgtccattgttttgagcacatcccttgggagagtaaatgatagattccaaaggggtgcttttcagaccagcgcccccaccgagaagatgcaccctcagccctgtgccccaggggcacgtgagggaactgagcaagcacctgcagcctaaggaggaaggccccggggcacacagaaaccaggcgaggtttgtcactgggtgatagggtaagcctgggtatcaaggaatgaaaaaaaggagcaaatcgaggagttgtctcctgagctcagaggggccacaggtggggcagccccatcaccactgtgtgctggtcctcctgccgtgtgcctggccctgcttaagaactcctggaggccagggagggtggaatggtatctccccgccaatggggtctagcctgctgttggcatgggaaagggagggtttggggaatgcctgttgggcgagtgaagaatgagtgaatgaacgattgaatggaatagccctgagaaggagaattcctaaactgtgatggagaaaggtagaaatgagcgtggtcggtgttggggagaggtccccaccctgcctccttggcagtttgtaggaatcagctggcctcatgaaagtgtgctgcctgctgtaaggggcaatttcctaatcttcaagggcagggcagggcaggctgtcacagttcctcagtgtccagtttcttgggggctacgtgggctacagtctggcaaggatttgctcctccacagggggtcttaagaacaactgagatgaaaagagttgtggtttgggggactgcgagggaacatgagccagaatccatacttgaggtgcagctcagaaatagcagcggcatcaattggcatctcaggagctgatgttttgattctgccgtcacctctttgaactctgtgcatcgatttgcacgatgcagataaacagcagctttggtgctgtgtttgttagggctcagggtcagtgcaggctgctctccttgggaggcgagaccttctggagaggggttttctgatgagtattaaaagccaagtcccctgttgccccaggtttgctggaattgtcccccaaacacagggctgagaaggagtaaaaataattcagattgccaactggtatttcaaatcccacttcatatttcagtgtctgaagaaaaccacatttctctgaatttcaacatttcatccttgatcttttggctttcaaatttatacctttaatgtaagagaactgaatcagctattttttcattctctcgataaatcacttgttcccgttttgtgtatagttttcagaacgcctccacgatccttccagtaggaacatgttggcaacggcgatcggtgttgataaagccttgggtcctgtgtcctctgcccttcctgcctgtctcagaacagcagccattaacaattgagggcagatgcttttttctactttcttctacttttggggcaacttcctgactttattttctaactcctccatgaaattttaatttctgccatcatatttttaatatatatattttttgagacagaatctcactctgtcacccaggctgagtgcagtggcacaatcatagctcactgcacccttgaattcccgggctcaagccatcttcctgcctcagcctcccaagtagctgggactacaggcccatgtcgccacacccggctaatttttacatttttttgtagagtcaggggtcttgctatgttgcccaggctggccttgaactcctggcctcaagtgttcatcctgctttggcctcccaaagtgctaggattactggtgtgagccactacacctagccatattttaaatttctaagaggttggttgtattctcaacgatcttttaaaataacatcctgctgttttgtgtgtgtgtgtgtgtggaggggagcatataaatgtcaggtatttcttagtgagtgattatattgaaaaagttaaaaatgtaagttgaaagctctgtttgtattggggcttgtcaactgctgcacacatggcctttggttaggggatcccaaatatcgggaactctagagctttttttctcctacctaaaggggagccttcactgcttctgtgtgggcttatccagcttagggtgaacagcacctggcccctcccttacctgtgcctgatgtccccaagcccagctccgtccgatgcaggcttcctggagagtaaagctctgaccctggttatgtggcctggggctccaagggtatgttgttgtgtggcctttcaactgatctgttttcagccctccattgcttgatgtttcctgaggttctgcggcatgaattgacttgcttctttattggcttctctccctgccagcagtttggtttcagcttcttcattctcagggaccgcttgtcctcctggattttgttgatatcacttgtctggtgttgtctcttctcctatctctttgactttgtgaatttgtgtcttttatttcttaaaccactttacaagggctttggaagggagtggatataaatgcgtgcattgaatttccagtgtgtaattggaccctcgtcataatcagctttaaagaattatttaagagagaaagaactgagacaagaccattatataattaagcaaaatttggaagttattacccaaccatcagattctacagagaaaatgctagaaacatagaaactagaattaataggtcttaaagggtgatgcctagagaaacagattacgtgtcttttgaatgcaaggttttgaacagaatgaattctgtttctgcccaaacaatgtggtatgttcacgtacttcttctctagagccctcccaagatttcagaatttctgaaaatacatccatagtgaacatgttcatttttggttaaatattgtatacatgtcagacatgtttctgaaactgatttttaccatacttcttttctttctgtgaaagcaatacaattttattatagaaaatattggtgagaaatagaagaaaatatccccccactccctctcccagtctcatcaaccagaaatagccagtcgtgtcctctggtaatctgtgaggtcagttaacctcacaacctgtgagttgccgcccttcatcttcacggttgtatcctcattctttcctaggacactggggttgggaaatcaagcatcgtgtgtcgatttgtccaggatcactttgaccacaacatcagccctactattgggtaagttcctgtatgtcattctccttcgcgttgcttcctttcacggcatcagaatgaccactctgtctgtgcctgagccttcaggcagggccacagttttcatcccagccagtgagaatcaatcccagctgtagaccgacagaaattcagggacttctgagtatgtgtccaggcttactgtccctgtcggtcattttttttttcctagtcagccttcctcatgctacctcctaaggtcatttccttgatctctgagagcattattctgcaaatcttggcgttatttccagttggaagacgatatgcagagcaaacccctgatagttctgctttaagttgcctgctaataaaccctgaaaatgccatccacccgtacctcagcactgtctgcaaagtctgtggagcagattgactttccttttctggaattatctttttttttacttcttgagactgagtgttgctctgtcacgttgcccaggctggagtgcagtggggtgatcttggctcactgcaacctccacctccagggtggattctcctgcctcagcctcctgagtagctgggattacaggtgcgcaccaccatgcctggctatttttttgtatttttagtagagatggggtttcaccatgttggtcaggctggtcttgaacttctgactgaaagcagtccacctgcctcagcttcccaaagtgttgagattacaggcatgggtcactgcgcccagccccttttctggaattatctaatgccagcatttccactgtcatgtgtggggaggggtggaagtgcattgttaaattctcctgagcttgggatgcaaaattgttttcctgttcatctcccctttccagtgggctccttggccgcgtgtgctttggctctgctgttcgggaagtgcctgctttttcattcttagaacgtggcctctgcttatttttcaccctgaagatatcaagtctttgtaggcaatgtatgtctttgtctgtatgttttgggaaacctgtaggattgttgagaatgggagagtgtatcagaagtggagaaaaatcatggcagggaataaatagatgctcaagagtacttggctgataggccagtagttggaactgtgtagctgagaaaacccacattttgtagattaaaaatgacttaaagaaacatactcatgaaaatatcaagaattaggaaaggtctgagattttaccctaattgcagcctgcaacttgttaacaagttagcagttgtgacttgttagcctgactcagtttcagggatgctggcagaagacagaagacccccgagtcacagacagaggcaatagcaatagccagagtattcacaaaatagggtgacattagagtcagacacctcacatgcagggggctgtgttacgggagcggaaccccaagctgagggaacgcaagtcttctacatggggcagtgagcacatctgtcctcagctacagagagagactctcccctccaaggatgcttgctgtgcaggttgagcatccctaatccaaaaacctgaaatccagaatgctcccaaatctgaaacttttgagtgccaacatgacgctcaaaggtaatactcaaaatgctcattgggatatttcagattttggaatttcagctttgggatgctcaactgggtaagtataatgcaattattgcaaaatttaaaaaaatatatatccaccggaagcggtggttcacgcctgtaattctagctctttgggaggcctaggtgggcagatcacatgaggtcaggagttcaagaccagcctggccaacacggtgaaacccctctctactaaaaatacaaaaattaaccagatgtggtggcacgcgcctatagtcccagctactcggaaggctgaggcaagagaaggtggtggttgcagtgagctgagattgtatcactgcactccagcctgggcaacagagcgagacttcatctcaaataagtaaatagataaataaataaatccaaaattcaaaataattctggtaccaaacattttggataagggatactcaacatgtacaagcatccttgaaaacacaatccggaaaaaagtgtttacttgcaagatgtgcacgttgtgagagaccataaagaattgtctcccaacataggcgcgcttgtatgataggtatactttttatggaagaaattggtttcactctgctctgaatgtacttttttctctctctctcttatttttcactttgtgtgtgtgtgtatgtgttttaataataaaaagcagaactgataagagtgattaactgtgaagtatggttccagaagatggaggagagatttgtgccttctactttctaaacttttgtttaaaaatttttttaaaataaaatctttttgtaatgaccttttttttttttttttttgagacggcgtcttgctctgtcgcccatgctagagtgcaatggtgtgatcttggctcactgcaacctccgcctcccgggttcaagcgattctcctgcctcagcctcctgagtagctgggattacaggtgcccgccaccatgcccagctaatttttatacttttaatagagatggggtttcaccatgttggccaggatggtctcaatctcttgaccttgtgatctgcccacctcagcctcccaaagtgctgggattacaggcgtgagccactgcacccggcctgtaatgaccttttttaaagtaaaaagacagtgcatactcataccacaaattatgggcagtacataaaaatgacaagcgtaagtgttaagcataggtataggcatcgtaaatagggtagttacgtaattttggtcacaatctcttggtcaaagaaagttgctgtgccagcccagattaaagggggagacacaggctgccttgtggtggcaggagccgtgtgtgcatggagggagggtcggggatggattgctgctaccattttggaaacaaacacagttgacagtgttttgtctagtaaatgcatttcggtggtttggagttttaaaaaacttatgtattacaattgacccttgaacaactcggggattaagggtgctgagccccgagtggttgaaaaaccacctataactttttgtttttttgagacggtacttggctcaaaagtcttgctctgtcacctaggctggagtgcagtggcaaggtctcagctcactgcaacctccgcctcctgagttcaagcgattctcctgcctcagcctcccaagtagctgggattacagttgcacgccaccatgcccagctaatttttgtatttttagtaggaacggggtttcaccatgttggccaggctggtcttgaactcctgacctcaggtgatccaccccccttggcctcccaaagtgctgggattataggcgtgagccactgtgcccagccacacatataacttttgactccctcagaatttacctgctaatacctgaccattgacctgaagccttatggagaacatagtcaattcacaaatattttgtaagtgatgtgtattatatactgtattcttacaataaagtaagctagataaaagaaaatattactaagaaaatcataaggaagcgaaaatatatttactattcattaagtggaaatggaccatcataaaggtcttcatcctcattgtcttcacattgagtaggctgaggaggagcaggaagaggaggggttggttttgctgtcttgagcgtgggagaggcagaagggatcgaattagaagtgggcccatgacattcaaacccatgttcaagggtcaacggtctatggaaactctctgcactttcttctcagtttttcctgtaaactaaaagtgctctaaaaaactgttattagtttaaaaattatgtcttagtttttaaaattatgaaaaaatttatactatgtagaaatatataaaataaaaagtgaagtcagaggattttgctagctcttcaatcccgtattcttcaatttacataaccaatatttagagtccaaagtgcatgttaaacatatttcttataagtactttctgtggacatgcaggtatacaagctaaaaatgaaaacgtatcacactttacctaacaagccacaacatacattcccagtccacttaggtcctccttattctttttcactgctggttgccagcctctgggaaactgagtcaggctgccaagtgatgactgttaacttgttattaagttgcaggctgcaattagggtataatacaagtatgccccgtgcaatatttgggacatgtgtatactaaaaatttattagttctttatctgaaattcaaattgaactggcatcctgtatttgtgtttgctgaaggtcacaacccttacctcacccctcctttgggcttaagccaagctggttgggtttccgagtcttgcaaccaaagggacctcaatagaagcaggcagttgtgcaatagggcttacacaggtgactcaactttaattgtgacacagacaagattaaagtctaattgttttgattataaaagttcatgttcgactgggcgtggtggctcctgcctataatcccagcactgtgggaggctgaggcaggtggaacatttgagcccaggagtttgagactagcctgggcaacagggcgaaacttggtctctacaaaaaaatacaaaaattaactgggtgtagtggcatgtgcctggagtcctagctacttgggaggctgaggtaggaggatcacctgagacctggaggttgaggctgcagtgagccatgattgtgccactctactccagccagggcaacagagtgaaatactgttccaaaaaaaaaaaaaaaagttcatgttcactctaaaaaaaacccaaagaacacagaattcatgaaactaggaatcttagtgtacatacagtttttttttactctgtgttttctacttaatatattttgaacattttttacagtgtcacataatcttcaaaaacatgttgaaagtattttttctgattataaaagtattatatactcatcataaacaactgaaaatgaaaaaaacatgaggaaaaatattttaaaaacccataatctacctcttagaggtaattactgtaaacattttgttattttcttccagcccttttcttgtataagtgtgtgtatgcgttatttattcaacatcattttgtgaatttcatgccattaaatagtctttaaaaacaatttttaatggttgtatttttcacttcaggcatttaggttgtttaaacacttttgtacttttataaataatgttatgaggctagacacggtggctcacgcctgtaatcccagcactttgggaggccaaggcaaatggatcacctgaagtcgggagttcaagaccagcctggccaacatggtgaaaccccatctctactaaaaatgcaaaattagccaggcatggtggtgcacgcctgtaatcccagctaccttgggaggctgaggtaggagaatcgctcgaacccgggaggcaaaggttgcagtgagacgagattgtgccactgcactctagcctgggtgacagacagagtgagactcttgtctcaaaaaacaaaacaaaacagaacaaaacaaaacataaataaataatgttatgatgtacctcgttgggcatagatacccatgtatactgctgattatttctttaggttaaactcttagcaatggaataatttagtccaagaataaaaatctatttaaggctctcaatggatattaccaaattgtttttcggaaaggttatctctgtaccagctttaggtatttttttttgtacaatttttaactttataaaattgtaaaagtttgtatgattttgaattctattcttttcctctaacttcaaatgttcgcattttctcgtagcttaatgtttctttgttaaaacaattttacatgatggcagcatggtattgtgtgctgttcttttttctttttttttatttgagacagagtcttctctgttgcccatgctggagcacagtgacgcgatcttggctcactgcaacctttacctcccaggttcaagcaattctcatgcctcagcctcccaagtagctgggattacaggcactcgcctccacgcctggctgatgtatttttagtagagacagggtttcaccatgttggccaggctggtctcgagctccttacctcagctgatctgcccgccttggcctcccaaaggagtttacaggcgtgagccaccgcgcccagccctgttcgctttctacctcgtcccttgcttttcctctggagtcaatgttaggctcagcccctccacccttatgtattgtcttcttgatataatttaacttcttgatttaaaaattgatgaaaattttccctctggaattttgagaaaatgttttcaaacaccagttgcagaaaaataaagctagtgggaacactttctaagtgacacatgcagttttcctggaaggtggcataaatggaacacttttaaaacgtttgagtgctttcccaaaagctggtaggttcggtgggctgaggaactggcttatattaatatatttgttttgttcagccttcacagtgctgtaaagactttaagccaatagagaatcaggagactggcacgtaataaacttgcattcctggtttctcttgaaaaatcagtgggtttggagccctggtgcccattcccatgtggtgggagccagccggtgccactccgcatgggtggccaggcctcccggcttcatgccattcccgctaggtattgttactattatgttcatcagtataaacgttcacacctagcctgcttcactcatttatatgtcctgcctggtccctagacatttcagttcctggccctggcactgccttcttggcggtaaccctgctggccacccccaggcccagggcggttaggggacttgcctaggtgcacacagcccgtgagcagcccactcatggctcacaccagtgagtccactctcaaagcccacccttgttcttcccactggaatcacacgaccattggtacaatgccatgggctgtaaaatgccattgcttcagcattaaaagagttaactcttatggcctctctgactcacactgaaaaaccttggctctgctattcaagcagattgcattaacatcttgagtgtgtgtgtatgtgtgtgtctccctttttatttcaacttttgtaaggaaattgtgtaacttctctgccagattttggtttccacagataatgaagtcagtttatcagggccagtgcgcctcctccaccagtttggagggtaatctacacagaagaaaagatgcctgaggttcttatttgtttatttgtttgagacaggatcttgctctgtcacccaggctggagtgcagtgacgcaatcatggctcactgcagcctccacctcccaggctcaagtgatcctcccaccttagcctcctgaatagctgggaccacaggtgtgagccaccacacctggctgtttttaaatttttgtttttaattaaatctttttatttttgtggagatgaggtctcactgtgttgttgcctaggctggatgaggttcttaagatcaaaagctagcaaagacttaaaaaccaacaacaaatctcagtcaacaaaaaaaagcaatgattgtcgtggtcctcatttcaaatactgagagtctttctcctagtggcgagagatcaggaacacagagggatatgtgtgtgtgtgaggtgtgccttcctactattactaaagttgctcctcacagctcactgtgaaccaaggggaatttcgcaggtatccatttccctatatgtccctacaaacaccttctattcaatgcagagtaggtattggccccatttcacagaacaggaaaccaaagggctttacgggctggttcattgagtctggcagtgagggcctctgcttcctcttcctggttaggccactgcactcttctttcaccaggaaccaggcagtcttctgggattttggttccccccccttacctgcactgtggaggggttggactggatattttatattttttccaagattttaaaggcatgaactttgttttctaaccctgaggagaactttttaagggtagtagggttgctgtattatttatcgcagcacctagaatatactgaagaataaatgaaaatctgactaacatcaaaagtgaaaacaaaaacaaaattttgatagagttgtctaataaaatttttaaatgagtttatggaaaaaatctagaacaaagttaaagggcaaatgttaaactggaaaaatattatttaaaatgtactactacaaaagtttagtggaaaatagtcaaaaaatgaataagaaaaggatgaataccacagttgaaaggtgggccaaggtcatgaacttgagaaaaattcctttacaaagaaaaatgcaagcgaacaataaatgttaaaatgatgtttaagcttgtgataagcataatgaatataagaataagatattttctacctaacacattgaaagagatttgaaagattaataatggtgaggaaaaggccatctcatacaccattatggacatgtaggttggtaccaactaagtttggcacatgtagcaaaagtggagtgtatctatttttgttttatttgcttatttatgtatttttatacatttatatatttttagagacagagcattgctgtgtcacccaagctggagtgcagtggcacaatcatggctcactgtacccttgacctcctgggctcaagggatcctcctgcatcagcttcctgagtagctgggactacatgcaaaagccactgtgcctggctgatttttttttttcttttgtagagccaggggtcttgctatgttgccaaggctggtcttgaactcctggcctcaagtgatcctgccaccttggcctcccaaagtgctgggattacaggtgtcagccaccatgctcggctctactttttaaaaattaagtctaaggatatagttgtacagggacacaaagatgtaattataaggatattcactgaatcattgtcgtaatagtgaacaatagataaccaaaatgtccatcgttagggtattgaataattccataacatgatgtatgatcttcagtcattttagatgatattgatgtatattcatagaaatggaaagattttaggtgatttttttttttttttgagacagagtcttgctctgtcacccaggctggagtatagtggtgtgatctcagctcacagcaacctctgactcctaggctcaagtgattctcctgcctcagtccccgacgtagctgggattacaggcacacaccaccacacctggctaatttttgtatttatagtagagacgtggttttgccatgttggccaggctggtttcgaactcctgacctcaagtgatcctcccccatcaacctcccaaagtgctgggattacaggtgtgagccactgcgcccagccaattttagatgatattgatctatattcatagaaaaggaaagatttccaggatatataaagttgaggaaaagcaaaatttagatagagtatgatcaattttcagagcaaaagttatgttaaaatagagcgtcctgcaaactcggaagcagatcacaaggggtggtcacactgcagtgtgattgacataaagaccgatgttacttgggaagaagcctggaagaggaggaagaggaaagaaaaagagtcgagaacagctcttactcagggatgctggactttcagggatgtggctataaaattctttgaggatgagtgggaatgcttggaccctgcacagcatcctctatacagggacctgatgttggagagctacaggaacctggtctccatggcaggaaattctcttcctaacctgagtattatcttcttggtggagcaagggaaagaccactggacagtggagagtcaagtgaaaatagcaagaaagccaaaagagtgagaacgtatcaaaggtgtgatcagactggtgctgcagctcaaacagaaacacatgcaaagatcttatcatggtggacagctttcatctggtagggtgtcatgatatatatgtcatatttgcatatatataggttttcacttacagttcctggctcctaactcccaaacccttgttataatcttggggcactttaggcctcagaaaacagaatcactatctgaccttctcctgtcctccttttacctgcccaaggcaggactctaatctgatcgcaggtcattccagagagagtcctgccccatcttctagaggaaggatgctactcagagaggccaagaagaacctgaacacacaggccttgctgggttttgatcatgcactttttgtccaatcacatttttacaagattgttaagaatgcctgtgtaggtcgggcacagtggctcacgcctgtaatcccatcactttgggaggccgaggtgggtggatcatctgaagtcaggggtttgaggccagcctgaccaacgtggtgaaaccccttctctactaaaattacaaaaattagccaggtgtggtggtgcatccctgtaatcccagctactcaggaggctgaggcaggagaatcgcttgaacccagttgcagtgagctgagatcatgcgactgcactctagcgtgggcgacagagtcagactctgagaaagaaagagagaaagagaaagagagtaacagagaagagaaagaaaagagaatgcctatgtaatgaagcctctgtcaaaaaaaggaaaggaaagaaagaaagaaagaaggaaagaaaagaaaaggaaagaaagaaaagagaatgcctatgtaatgaagcctccataaaaacttaaaagaaaagtgttcagggcacttctggagagctgagtttcctggaaagtggcgcccagggagggcatggcagctctgtgcccctgtctgcttaccttgccctaagcgtctcttcatctgtatgctttgcagtatcctttatgagaaactggtcactataagtaagtgtttccttggtttctgtaagccgctgtagcaaattaatcaaactcaaagaggggttggtgggaaccccaacctgaagcctgtcgatcagaagttctagaggcccggacttgggactggtgtctgtggaggagcactcttgggtactgagccctcaacctgtgggatctgacagtatctccagggagagagtgtcagaattgaattggaggacacctagctggtatctgctgctggtggtgggagaaccccccacagatttggtcatagaggttctcttctgtgttgatggttgtggtgtgagaacagaggaaaaacatggttctagagagttatctcctacacatctggcttctggcaactctgcttccttctctcggagggatatctttcctgtatatgcaatcaaggaattatctgccaaagagaaaagtaatacaggagaaatattccacacagtgtcattggaaagacgtgaagccatgacgttgaagacttgcttcagggaaatccagaaaaatagaaactactttgagtctcagtggagaagtgatgaaagcagttacaagagtgcctcaaaaaaaatctcactgttagaagagaccaacatgatagaagggatgcaggcaacaagcctattaaaaatcagcttggattaagctttcagtcatatctgcctgaactacagctatttcaagctaaagggaaaatttatgaatgtcgtcaagttgaaaagtctgtcagcaatggttcctcagtttcaccaccccaaagaattccttctaagcccaaatccatatttctaacaagtatgggacttacttaatctattcttccttacacaagaacagaaagcacacattagggaaaaaccttacaaatgaaatgagtgtggcaaaacctttaatcatgactcactctatgctgtatattagataatccatcccagagagaaatgacataaatgtgatttatgtagcagggttattagtcaaaaataaaaccttgcacatcattggagagagtttatactggagagaaactctacaaatgtaatgaatgtgacaaggttttcggtcacaattcacaacttgcaagacattggagaattcacactggagaagacccttacaagtgtaatgagtgtggcaaagccttcagtgtgcagtcagcacttaccatcaggtggtccatactggagagaagccttccaaatgaaatgagtgtggcaaggtcttcatgcacaattcacttctcccacaacatccaataattcgttcttgggagaatccttacaaatgcaatgattatggcaaacccttcatcgtgagttcaagcattaattgacatcagagagtccatactaaagaaaaatcatagaaccgtaatgtatgtaggagaggctttatccacatttcacactcacaagacatcgaaataagcatttttgatgaaaccacagaaatgtaatgtgcctgctgaggctgtcgcccaaagatcgaaactgtagaccatcagaggagtcagatgaggaatgactcagtctttagttctccaagattaactttcgacatttcatactgcagaacaattacaagtcaaaatatgttaaaactcatgacatgatatctatcaaaggtaccaggatgttgggcagtggccagttaacttcaggttatgaaatattttattcaattatttgaagattcttgaaaaggctactttactatttatgactttcaacttgaactttgaaataaaagggacgaaaatccagaatatacaagcaactcaaacaactcaacagcaaagaaaacccaaataaaatgatttaaattgggcaaggaatctgagtagacatctctaaaaagaagacatacagatggccaacaagtttgtggaaaaatgctcaacatcactatcatcagggaaatgcaaattaaaaaccacaggaagatatcatctctctccagttagaatggctatcatcaaaaatacaaaaaataacaagtgctggcaagggtgaagagaaaagggaattcttgtattctgttggtaaattaagcactgtgtacattagtacagacattatggaagacagtatggaggtttctcaacaaagctaaaaatagaactgccatacaatccagcagttctactactgggtatttatgcaaaggagagtgaatcactatatcaaagggatacctgcactcacagatttattgctgcactatccacaacagccaagctatgaaatcaacccaagtgtccatcatccatcaacaaatgaatggaggctggcgtggtggctcacacctgtaatcccagcactttgggaggccaaggagggtggatcacctgaggtcaggagtttgagaccagcctggccaacatggtgaaaccccatctctactaaagtaaattacaaaaattagctgggcatggtggcacatgcctgtaatcccagctacttgggaggctggggcaggagaatcgcatgaacctgggatatagaggttgcagtgagctgagactgtgccactgcactccagcctggttggcagagtaagaccccatctcaaaaaaacaaaacaaagcaaaaatgaattaatggataaagaaaatgtggtatatatacacactggaatactattcagccataaaaaagaatgaaatcctgtcattcatggcaacatggatgaacctggaggacatttcgttaagtgaaataatccagacacagaaggataaatactacatgttctcactcatatgcaagagctgaaaaaaaagagctcatagaagtagagtagaattgtagttattagaagctgggaagggttgggggagggaaggatagggagagcttggttaacagttacaaagttatagctagacgggaggaaaatattctagtgttctgtagcactgtaggatgaataaggctaacaataatttagtgtatattttcgaaaagcttgaagagaggattttgggtgttcacaacaccaagaaatgataaatgttcaaggtgatgaatatgccaattaccctgatttgatcattacacattgcatacatgtatgtacatatcactctgtatcccataagatgcataattattgtgtaccggctaaaaataaaaggaaacaaagaactgaatgaataatcccattttaaaagtcatataaaaataattgggaaggacatataccaatttattagcagtgactatggctgggtggtgaaatatgattggtttttattttctttctggttttttgaattttttttatgaaatacatatgttgcttttaaaatgggaaaagtaataaagacattaacatttttggaatatattaggtctccccggtagtctggatatacattttaaacacttttaaagaaataaaggaatagatgtggttttgatactactggatttgtcacttagaatacttagaattttcatttattgcaattgtaggttggtaattagaactctctaactattattagcctttggtttttgtggggatagtgtgggaattgcagtagacttttctacttgggacttcggtagttggcctcttattcttagaagatttagaggctgaggaaatattactatgatgaatgctagttgaccaggctggactatatgaaagtaaggtgaagaacccctgactctttaccccgaaaaccccagggtccatctcctaataagaacataatgaggacaccatgatcatacctacaaaattaatttgaatcagtgataatatcttgcatatagtgtgaatttaaaattttaaagttgttcttaaaatatctttttgtgggggtagggggtacagggtctcgctctgtcacctagactgcagtgcactggggcaatcttggcgcttcactaccagcctcagactcctgggttcaagctgtccttctgcctcagtcttctgagctgccagaactacaggctgtgccataatgctcagctgatttaaaaaaaaaaatttttttttttgtaaagaaggagtcttgctctgttgcccaagctggtctcgaaaccctggcctcaagccatcctcctgcttcagcttcccaaagggctaggattacagaaaaaagagccaccacacctgaccaaatatattttaaagctgttttccccctaatctgggatccagccaaggttcatatattgcattttgttgttttatctctttcctctcaatctagattctagaataatctccctgtatttttctggtttgcttctcatgacattgacttatttgaagcattcaggccagcttgtcttacagaatgtttcacattctacatttgcctcattgttttcttacaattaaattcagactaaacatttgtggccagaatgctatataggtgatgtatctacttcttattccatcacttcaggaggctctcataccaggttgtcccactactggggatgcttgctattttttaatgaatagaaaactttctgtcataaaagtcaaggctattgaacattcctggtatttttatactgttcatgagcacaaagaaaatgctttttaaaaggaaatatgcaaaaaagaaaatagtaagtgtttaatgatctactgaggctttaaaatcctttctttttggacttagaagggaggaaaaaaaatccttccttttttatagagaaaacataagtatgtgttaagctgccaatcatcgtccttgcatttatgcaagcaggttgggacttagatgtagtattctattagttgctactagtgttggtttcatattagcatagtaaatatgtaagacaactttttctttatgccattgtaagaccaaaaacattacatgccaacataccagctgctattttcactcttaattattgtaataagtttttaaaatccaaggttgtattctttcctgagatctgggggtattttaataattgaagctaactggttttagaaacacagtctttttttttttttttttttttttttttgagacggagtcttgctctgtcactcaggctagagtgcagtggtgcgattttggctcactgcagcctctgcctcccgggttcaagtgattctcctgccgcagcctcccaagtagctgggactacaggcacccgccaccatgcccggctaatttttgttttatttttattttattttattatcatatacatattttttgagatgaagtctcatactgtcacctgggctggagtaccatggtgccatcttggctcactgcaacctctgcctcctggtttcaagcaattctcctgccttagcctcccaagtagctgggaccgcaggtgcctgccaccacgccgccaccaggcctggctaattttttgtatttttagtagagacagggtttcaccatattggccaggctggtcttgaactcctgaccttgtaatctgctcaccttggcctcccaaagtgccgggattacggcatgaaccaccgcgcctggccagaaacagtcttttgaatgcctcctttgttttgttttgttttgtttcaaaacccccagttgaactaacagaaaatgagaaatattttattttgggtgtcatgagtcttctagcccttttctcgtcttagtggttcccaaggaccagggctttttggggtcctgctgaggtgtagcatttaacttgtttgatttgtgaatctttgtgaagaaacaatgcagtaatgtggagatgctgactctcttttttcagggcatcttttatgaccaaaactgtgccttgtggaaatgaacttcacaagttcctcatctgggacactgctggtcaggaacgggtgagtatatgctgttttttggtgaaaacaagatccagtgaaaataagatcagtttctgaaggtttgtttgcattagacaagactcttggttgcaggtgacagaaacctagcttgaaatgatgtaagcaaaaagaaaatgtactcattagctatgtgaaaagtctaagtgggtacctagggtgaggcggggctgagttcaggtccccaaatgtgttgtgagaggagcccatctctcttatttctgtttctttccatttagtgcagttgtggttgcactctcgatttggttcatttttaggcagactcaccctccctccttacctcaagggtggtaaccatggccccaaaagcatctctacacctaccttcagcctttttagcaactactggctgagcatgcacctcttctgcaagtgggaacatacatcttagtgcctctgagttctcactggcctgccttaggccccatgcccactcctgaacttcaggtggtaccttgttcttgggggtttggtgcccctactggtgggatctggcagtacactgacccctagaggcaagggctggtgtcagccccacctgaaccatgttggttcaggaagtcaggtaggcttagcgccccaaggaaaatctgaggtctcttactggaaaagtgggtaaatggatgctgggttatcaaaacagtggatgacttctcttttactcctaattctctgtatttgctgaaaatacttatggagaagactatatattttagaaggtcatgcctttagattcaaaaaagggaaatgacgaatactagcacagtgtctattgctggatacttgcataataactagagcgtatattataaaagttgctgtgtcttgctgtgtctcccaggctggagtgcagtggcacaattatggctcactgcacccttgacctcctgggctcaagagaccctcctgcctcagcttcctgagtagctgggactacaggcacaagccactgcacctggctgattttttttttttcttttgtagagcctggggtctcgctatgttgcccaagctggtcttgaactcctggcctcaagtaatcctcccaccttggcctcccgaagtgctgggattgcaggtgtcagtcataatataaaagttgaggccggacgcggtggctcacgcctgtaatcccaacactttgggaggccgaggcgggcggatcatgaggtcaggaaattgagaccatcctggctaacacagtgaaaccctgtctctactaaaaatacaaaaaattagccaggtgtggtggtgggcatctgtagtcccagctactcgggaggctgaggcaggagaatggcgtgaacccaggaggcggaggttgcagtgagccgagatcatgccactgcactgcagcctgggcgacagagtgagactccagctcaaaaaaaaaaaaagttgaaacggatagccagatagccaagcagagataaccaataccttgtcttagccaagagctgttagcttgattgaaattatcagagttgatgactatggagtaaaattggtagaattttcccttgtctgatccaaactcaaatgtcaccttctctacctccttgtttaaaatgtcaccacctcattttcttgccctactccactcacttcctgcttcatttttctccacagttattatcatcttccaatatattatttaattcactttattttgagacagggtcttgctctgtcacccaggctggagtgcagtggtgcaatcacagctcacctcagcctcccgagtagcagggaccacaggtgctcaccaccactctggggtaatttttaaattttttttgtagagacgaggtcttgctatgttgcccaggctggtcttgaactcctgggctcaagcagtcctcctgccttggccttccaaagtgctggaattacaggtgtgagctaccatttggggccttaattcaattattgatctgtttattgtctttctaaaaggaagaatccaggattcaggataatctataattttcattatcatctcctaactaatcaagtggtaatttatataattttcattttacctaaattcccttttaaaacaaaagttcccatatttgtagattaaaacattttaaaaacactgctgaaagaaatcatagacatagacacaaacaaatggaaacacatcctatgctcatggatgggtagaatcaatattgtgaaaatgaccatactgccaaaagcaatctacaaattcaatgcaattcccatcaaaataacaccatcatttcattcaggctgggcaccgtggctcatgcctgcaatcccagcactttgggaggctgagatgagtggatcatgaggtcaggagttcgagaccagcctggccaatatggtaaaaccttgtctctactaaaaatacaaaaattagtcaggcgtggtggcacatacctgtagtcccaactacttgggaggctgaggcagaagaatcacttgaacccgggaggcggaggttgcagtgagctgagatcatgctactgcactccagcctgggtgacagagagagagtctgtctcaaaaaaacaaaaaacaaaaaaacaaaaaacaaaaaaagcaactaccatcattcttcacagaactagaaaaaaacaatcctaaaattcatatggaaccaaaaaagagcctccatagccaaagcaagactaagcaaaaagaacaaatctggaggcatcacattacccgacctcaaactatactataagggcatagtcatcaaaacagcatggtactggtataaaaataggcatgtagaccaatggaacagaataaagaacccacaaataagccaaatacttacagtcaactgatctttgacaaaacaaacaaaaacataaagtgggaaatggacatcctattcaacaaatggtgctgggataattggcaatccacatgtaggagaatgaaactggattctcatctctcaccctatacaaaaatcaatgcaagatggatcaaagacttaaatctaagacctgaagccataaaattctagaagataacattggagaagcccttcaagacattgacttaggcaaaggaatcatgaccaaaaacccaaaagcaaatgcaacaaagaaaaagataaatagacttaattaaactaaaaagcttctgcacagcaaaagaaacaatctgcagagtaaacagacaatccacagagtgggagaaaatcttcacaatccatacatctgacaaaggactaatatccagatctacatggaactcaacaaaatcagcaagaacaaaacaaacaatcccatcaaaatgtggtataaggacatgaatagacacttctcagaagaatttatacaaatggccaatgatcatgaaaaaatgctcaacatcactaattatcagggaaatgaaaatcaaaaccacaatatgatacggccttactcttgcaagaacgactataatcaaaaaatcaaaatataatagatgttggcgtggatgtggtgaaaagggaacagttttacactcttgatgggattgtaaactagtataaccactgtggaaaacagtatggagattccttaaagaactaaaagtagatctaccatttgattcagcaaccccactcctgcgtatcaacccagaggaagtcattacacagaaaagatacttgcacacgcatgtttattgcagcacaatttgcagttgtaaaaatatggaaccagcccaaatgcccatgaatcaatgagtggataaagaaaatgtggtatatatatacaccatacaatactactgaatactactcagccataaaaaggaactaaataatgacattccagcaaactggatgcaattggagaccattattctaaatgaagtaacatactaaacatcgtatgttatcattcataagtgggagctaagctatgaggacacagtggcataagaatgatacaatggacttcggtgacttgcaggaaagggtgggagtgggggtgagcaataaaaactacacactgggtacagtgtacactgcttgggtgatgggtgcaccaaaatctcagaaatgaccactagagaatttactcttgtaagcaaacaccacccattccccaaaaacctactgaaattttaaaaataataataaaataaagctaaaagaagcatgctaaaatatagctaaaatatgcacctaatcttaatctaaaattgtagatgtggaattgctagttcagagtctctgatacatactgtaaaatccacctgttatttggacccagtgtttcactgttatgtactttcacttttacccaaattaagtattatattaaaatgagaaagaaaaaataatcctttaaaaatatatatttgctttctaatgactttaaacttctttcgtattttttagctatttcatttctgatcttaataattgaatgattatagctttacccacttttttcttgagtaatttgtaagaatctcttaacattaaattatacataatgtctccatttgttatttatattttaatttctattttaggtttctaatggtcaaacttgttttttagggttaaatcaataatcctgtcttttatgaattctgctttagaatacatgctttaaaagaccttcagaatgctaaagtaaatattaattaaagttatattaaatatttaaataaaacacattttcttaaaaatacattttaaacagttttaagaaataaattaggatgaatattctggcctacaaatgctaacctcattagaaagtcttctatttttctgctaaattgagaacacagacttctgtgcacgggaagcagctgcctggggcacctctttaactccatcagctgtgcctgcctagtcctcaaatgaggtgacccattcaaggaaaaatgtctacttagagacctcacttcttgatatacgtgtgtattacttgtagttgatctgctggttttttgtttgtattgttatgtaaacttaaacagagagagtttcttgattctctttttacctctggctatgaaatagttgcttttgcagctgcctttaatgaacacaataagtcaattttgcgaatcgctggcttaatgtcagcgatgcttctgcttctcctgctggcggacgttccctgatgacttgctgtgttccatgtactgttctgagtgcctgtgtgtactgatgcattcagccctcctcgcaaaagcactttgaggttgaaactgtcgttattcccatttgcaggtgaggtcactgagacagagacattaagtaacttgcacaatgtcgcagagctaataaggtgtaaagctgaaaattgaatccagcagtctgggtcctgagctttgtagttttattttgattgaaaaatcacacaaaaaaccatacggttgaaagtaaaactatccaaactcccactacccagatatttccactatggatattagatgatcgttcttcagatatctctacgtgattgataattttatatcaatgggattgtgattctttataacctgctgttttcatttgatattacagtgtcacaaaggaaagatttctgtgtgatcaaaacagaatgtttaacacttacctctaacaggctattcaaggaatagtcttttgatgaaacttgaaatctgcgaaaatgactattgtagtttgtagtttgttccacttaccatcgcaaagaaaaataccagtgggaagttttcagatgaccatatttctaattattgtgattgcttttcctaaaatttgacttttagaggttgtagacatctgactccattgatacatccataattttaaagaaatcactagcattatacatgcaaggcatgactccacagtagggatattctttctttatacttcgaggaagacggatttagtttgggataacgatttcaaagtgaacatttttagagtctagatttgtggagagtgtgtgactgatatccatgtggctatgtggtcacctgatctccccagccctcgacggcctgatttcattatccttgggctgtccttgtctggtgtcccctggtggagtcttgcatctctccagtaatggcaatttttcaattgttttggcagcttgttgctggctttaattgtgcttgtaatgatgttgcctaatgtttgagctaaaaataaattccctgctgttgcttgtgcctattgctatttgttctgtctcattaattattggagtcccgtgaattttattacccctctttatcatcatagaaatgttattgttcttttagttttcataattttaaacaaacaatcactttgggtttatgatttgacaatataaagacagatttctttttttctttcttattttattttattttatctttttaagacaaggtcacactctgtcagccaggctggagtgcagtgatgcaatcatagctcactgcaacctcaaactcccaggcctggtcaatcctcctgctccagcctcctgagtagctgagactaccagtgtatgccaccatgcgcagctaatttaaaaaaaaaaaaaaaattgggccagacacagttgctcacgcctgtaatcccagcactttgggaggccgaggcgggcagatcacgaggtcaggagtacgagaccagcctggccaacatggtgaaaccccgtttctactaaaaatagaaaaagtagctgggcgtggtggcacttgtagtcccagttacttgggaggctgaagtgagagaatcgcttgaacccagaaggcgaatgttgcagtgagctgagattgcaccactgtaccccaatctgggtgaaagagcaagactccacctcaaaaaaaaaatttgttagagatgaggtcttgctatgttgtgcaggctgggcttgaactcctggcctcaagcaatccatttcacttggcttcccaaagtgttgggattataggcgtgagccaccaagcctggccaaagacatggatttctgtgtccttaaaggaagaaagctccgctcagtgctttgcttgtgttcatgattcaatatttatttatttgtggaatgattgcaccaagttctgcctaacatacacagcattctggttaatgtcctacttactgcccagtaataattctatcttatatttgtggtacaaatttgtactcttggaaaattattttttcttctcctgagcacaggaatctcaaaggatcctcctcctctttatataagagagtattcattctatttatttttatttatttattttagagacagggtctcactctgtcacccaggctggagtgccatggcatgatcatagctcattgtagtctcaaattcctgggctcaagcgattctcccgcctcagcctccagagtagctgggactacaggtgcgccaccgtgcccagcctattcattcttgatactgtctgaatgttgcttttgcttttttaatccaactgtgtgtcatgggcatcctatctcattcattcagtggtgatatggtaattcatagggtgcatctattaacaaaaatgttttttgaaaaatttaaccatttcccagttgaatcccatttgttggaagcttgacattagtaagatttgtgcatggtgtgttgtaccaccaaggactatgaagaggggaagagtgccattgggctccctctgttgtaccatcagtgtggcctttgggaagtttttatcctgtcctcttggaatgggttattgtgctggtttctgcttcacaccaagctgtgaacagtacagagtagcaggtcagcaggcacctttgcaaggatgtacacaggagccatgcctagagcggtccatagccgacagaaggtaatttacctgcccagctccctgcgggagcctagagtcaacacatagagtggcttttagcgagaggagctgaaaagcaacattgtcataaataaggcatgcgttcatgaagaggtgaagagctggggataatactttcatctgccagcggcccctcctgggttctcttgctctatataccatggaggaccaacttcttccaacctgaaactttcttcagccatctcccttccatttttttccaccgtgctatacttttacacagttcatgacgttccaacacaaatttcccattaaaaaacctgaagctgtagagctaatgtttgactttccatggctctgaagatatatttattccttcctcttggctcagacggcccctccccatgttggaaaatggtttctaaaaagagcccagtgaagcggcagtggtggaattctctgtactttttccttggcagggagttctttccctgacccccttcttacctgttctagacccactcaagcttctgtctctgagctttctgtcctcattctctgttggccttggaagcagatgagccaactttcatcttttctggataacccactctggagctttagcagttagaaatcacattcactgaaaattgcttttgtccacatttgtttctgtgttgactatcagtatgtggagtatgaccagcccccctttttttttatttaaaaacagctttactgagatccgattcacgtaccatacaatttatccatctaaagtacgcaccttggtgggttctgatgtgttccgaattgttcaaccatcagcacaatccattttagagcatttttatcagtccagaaagaaacgcttatgaattagcagtcactcccagttccccctctacatcccccagccctgggatactttctgtctctagatttgcctaatctggacatttcacacaaatggaatcatacaacctgtggttctttgtgactggatcctttcacttaggataagattatcaaggttcaccttgtggtgtgggtcataaaagtatttcctttttatggcagaataatattccattgtctggatagaccacattttgtttagccactcatcagttgatggatatccactttcccccaactttttggctattatgaatagctgtgaacattcatgtacaattctttgtgtagattttttttttttttttgagatggagtcttctctgtcgcctaggctggagtacagtggcatgatcttggctcactgcatcctctgcctcctgctttcaagcgattctcctgcctcaacctccccagtagctgggattacagccagctgccaccatgcccggctgattttttgtatttttagtagagacagggttttaccatgttggccagatgtctcaaactcctgacctcaggtgatccaccggcctcggcctcccaaagtgttgggattacaggtgtaagccaccgtgcccggccagatgcatgtttttaaaaatctcttaggtatgtatctagaagtgaaattgttgggtcatatggtaactctatgactagcatttagaggaactgccaaactgttttccaaagtggaaaactagcagtgtgtaaggctttagtttctccatatactcaccaacacttgtctttgcctaacctaaggtcgtaaaggtttactcctgcattttcttctgagagttttatagtcttagctctcacttttatccctgtgatgcatttggagttaatttctgtccatgttgtaaagacaggatccagcttcattccttgcaggcagctgtccagttgtcccaacacagtttattgaaaagactattctttgcccgattgtcttggcatctttactgaaaatcacctgaccataaatttgaggctctgattctggactctgagttctattcctttgatatacattttttctccttatgccaataccacattgtcttgattactgtagctttgtagtaagctttcaaattggaaaatgtgagttctccaacttcgttctttttcaagattgttttagctattctgtgtatgttgcatttccaaatgaattttaggatcagcttgtaaatatttatcaaaagaatccaactgggattttggtcaggattatgttgactttgtagatgactttggggttacctgctccttaaacctgtaaattatcaatgataagcaagttgccagctgtctttcaactctttggaatttacatgtaggttagaaatgctgacctcagagaaaaaattttgaataaagagttaggtcaggcacagtgaatcatacctttaatcccagtactttgggaggccaaggtggaaggatagcttgagcccaggagttcaagataagcctgggcaacatagtgagaccctgtctctacaaaaaataagaaactacctgggtgtggtggtgcatgcctataagagggatccacactgacatcctccaggagcccacggtttaatgcatgcagtcaggagatctggccaccccaggctgttcagccataccgcttgttcacctccttcagattaattttgcaagtgactgccagtctgcatggtttgaaagattaggtgtttggagatcatgtgcccagagggctgggatgcactggcacaaagctgtgcggaatcgctgggtctgaatgggtccttgagaaagcaaaggaactggaggcagcagatagctgaggtcaaattcaggctttacagacatccaaagaaactcttttgctgtctttcctgctttcttcagggccccaacatctatggtcaaaaaagtggttcactattcataggccattagtaaagtcagaggaaattttgacctttggaagttcttgaagaatggagcctcttacaagctcagaatgagcagctcctttctttctcctgcaggcattggaaatacagtcccagctggcaacaccagccagcagcacagcccggaatcctgctcctgacctgcaccatccccaccagcccacgatagaacgtttttgtaggcattcctcctcatgggagaggatagagtacatgcgagtttttgctctcctcccaccctttcacaagagcactgtgctttcttttcttctctttttcctttcttttttttttttttaggcagggtcttgctgtgtcacccaggctggaatgcagtggtgcaatcatagctcactgcagccttgacctcctggactcaagcaatcctcctgccttaacctcccgagtagctgggactataggcaccagccactatgcctggctaatattttttgtttgttttttgttcagagacaaggtctcactatactgtccaggctgggatgactgtgctttctaccaatgcaaactgagatcccggcaagggaaatattcccttcctccatgcccctagtaactctcttgaaagagaaaactgagtgatgattgtgtggggaggaggcaggcctggagcttgaagatagggtttatgctgttgaagtgagataaacagctgtggtgagggccatgcctgctgagctcctttaaggagaagccccaggaatccttcattaagcactttacagctgaagagtttcattgatatttgaaaattggtgctggaaactacaaaagcaaagtgtgagcagaggtattggagaggggcatgaggggaccctgacggcagctgtgcaggtggagcagggactgcctcggtccacagacgtggcccccagaactgtcgtgccatttgcgggggttgtgtcctgtaagaaaataggaatctaggtgcagaacagccctcctgggtgtcagaatgccagcgacaggagagaaggaggaaggacatgttcatatacgaagatacctttcgggagttcttagggaaacactgtaaacagctctgccctgagcccgggaggtggccatgctggcagtgagggatgtggcctgggccgtgggaacacagaggcggccagaggggaaagcctcagagctgcgtggacaggcttcttctgcttacacacgggcttctgccctgctcttgcccctcgggggttcttttgtcactggagaccctgctgttgccctttgctctccagtgcgtgtccccttcttccatatgccccctccttggtggggacaggctgctctgggaggtacagtgactgcgctagatgaacaccttcccaggtcaggcaatgacattttgctgatgtgtgttttagtctgggatgccctgagtagcttctaattatgaggcactgtctgtgcctcttgggtggaggccaagtttccattctgccaactctcagaggacgtggggccaaaacacagagccgctgagacaggagtttcagggggtctggaggtggatttgccgagaatctaagaagcacttcaactagttttgtttcctctcctcccttccactccctttcccttctgtcctcttcttttcttttatggagctaatttcctacgtctggctaaaatacagtagaaaagccctataaagcctatgagtgtcactcttgaataggaaattagcaaatagactttgtttggtaacagaagaacctgttcctgaggcgctgacagcctgtcctaacagaggcagctgggctgcagtgagcacggacctgtggtaggaagacctctgcatccagagtggcccggtggaaggtgccagactccccctcactccaaaaaaaagaggaggctttttgagggcagggaccttgttaccttcttcactttctttttttgtttccagttgttgctgtaacagattgccacacgctcagtggcttaaaacaacacagatagactcccttagagctatgaaggtcagaagtcagaaatgggtctcatgcctgtggtcccagatacttggaggctgagatgggaggatcacttgagcccaggagttcaagaccagcctgggcaatataatgagactcccatctctacaaaaagtttttaaaaaattagccaggtgtggtgacatgcagctgtagtcccagctactcaggagaccgagacaggaggaccacttgagcccaggaggttgaggctgcagtgagccgagattgcaccactgcactccagcctgggcaacagaatgagaccttgtctcaaaacaaaaacaaaaacataaaaagattaaaaaaaaaaaaagaaataagtatcactggaataagattaaaatatctgcagaccttaatccttcctggaggtacaagggcagaatcttgtttccttgcctttttcagagaccactcgcattccttggcttgtagccccttcctttgtcttcagagccagcagagtagcattttaaatctctctcccactcccctgcctctctctttcactgttgaggagccttgtgaggacactgggcccacccaaggaatgcaagataatgtcctcatatgaaggtcagctgatgagccctattccacctcccatgtaacctaacatagtcacaggtgatggggattaggacatggacctctttgggggacactattctgcccaccacactccagtttctctgctgctcagaacagtgcctgccacatactgagcgttcaaacagtgagatactgtttgttgaatgaatgaatacatttgatgtaaacctgtgtcttaattatatcaactgaagcaacgtttcatttcagagaagcaacacaggaatggaaaatgcatggaatttggagtcaagacctgtgttcaaagtcttttccaccatttaagagctgtgtgtcgactgggcgcagtggctcacgcctgtaatcccagcactttgggaggccgaggcgggcggatcacgaggtcaggagatcgggaccatcctggctaacatggcgaaaccccgtctctactaaaaaaatacaaaaaaagtagccaggtgtggtggcaggcatctgtagtcccagctactcgggaggctgaggcaggagaatggcgtgaacccgggaggcggagcttgcagtgagccgagatggcgccagtgcactccagcctgggcaacacagagagactccgtctcaaaaaaaaaaaagaagagctgtgtgtctttgggcaattcacttaaccatgctgagcctcagttttctcatctgaataacaggaacaactctgtcttctctccctggtttcacagggttattgacttttattacatgcattcagtcattaaatatttgtcgagtccttgctatggtccagatagggattcagggaagggttctcagggagggtggcagttgattaaaggtgtgacagaagtgagggaggggccttgaggatgctggtggaggagggtccaggctgctagaaggcgtcagggaaggtgcggaggctcggtgggcctgcctctgtgtttagggagcagcgagaaggccggggctggagacaagcaggggaggggcccaagaagggaccagggcgggcccaagaagggaccaggtcccacccaagatgccacagaatggagcttggcttttatactaagtttgaaggattctgaacagggaagtgaaacaattggatttatataggaagaaatcaatcactctgatgttcagttaacataagatgatgtcaagtatttgcttcaaaagactccagggggtaggaatggagcgggaggtgagacgaggtagaaaggaagccagtggtccatgtgttagtggtgatcttgaagtcaggggatgagaagatggaagtccattattctagtctctcttcttgtggatatgcttgaaaatttccacagtgaaagttaaaaataaatacattctgtggtcagtgtaaataaatatcataatccagcacttcaaaacaggatctctctggtggctgtgtggccagtttggagctcactggatatctgaaggctcttgtggaaactttggacgtccagtcaaggcaagacgaactttgctcggacaggagggaggtgcggctgcgtgagagctggggctgggtctgaaggccgtgctggctagcctgggttggcacacagcaaagtgcagagtctagggctctaggcacatgggggtaaatgacaccgtatgtttttgagtgcatctggtgtgatggggcatgttcggaggcctcctcagggctgtgcagcgaagatactgtcccacacagtgggctcttgtcttgaacatggtacgcttactgtgaccttgaggctaaggatgggagagaccaaaccagcctgggcagagcggagagagggcaagatgagactaactttctgtgatcgtcatggccatcctggctttccccgcaaatgcatatcacggtggctgtgtatgatgcgaatagacatacctaggagtggggtggggcatagttctggagttttaggaaattccacttgtttgccaacatgcaggtacatgagctgacgttcactgcccttggacgatttcatgggtgggaaaaaatgcatttctacagcatcttaaatcattgatttattttttatacattattctagggattggaatattccagttcattacattgtcttttaaaaaaacactaatccagcggggtgcagtggctcatgcctttaattccagcactttgggaggccaaggcaaaaagatcacttgagcctcggagtttcaaaccagcctgggcaacatagcgtgaacttgtctctataaaaacttaaaaaaaaacttaaccggatatggtggcacacacctgtagtcccaggtacctgggaggctgagatgagaggattacttgagcccaggaggttgaggctgcagtgagccgtggtggcaccactgtactccatcctggacgacagagcgagaccctgtcccagtcaatcaataaaagtaatccatgccttcctcccaacatcgtttttgtggaaagatgtttggatttgtgttgtgtcattttctgctaaatgaggcttgcagcacatttgtcagaaaggagtcaggtgctcatcaggtctcttctaaaacccagcttcctcctggtactgttgcttcaacccttggatccctgaatgctgagaaagctttttggctctaacaacacattcaaagaaaaatgaaagaaagggaaaaaaagaaaaagacaccccctgtcattgcagaagtaatgtattatgatataatagaaaggttttttgaataattcagaaacagcaaagcaagtggtggtttgtctgtactgccgttattcagagagaacatcttaacagttcgatgtattgtctcccagtcccgtttcattcaactctgcatacactcgggttttaggacatctgagtaggcatattaactaggcctctgcttttctgtggagagagagggtctatgtaaaagtcggaagcattcttctgaatggcacagaaagaacattcagtaatgtgtttttccattcaacttttgccagctgagaatgttgagaatttcaggaattttcttctaccccttctctctttgtttgaatcccagtggaccttgggctctttttggcatctgcccttgacgctcccttatggtggccttgcacctgacctgccacagagcagcataggcgcccaggccgagcctgagcgactcaacagggacagagcgtcctctggaaatcataatacaaagcccatcactccgagttcctggacctgatgccagagcattctggcttggataattctcatctgggaggcagagcccagctggagctgtgcttgttgggaaacttcatgtattttccaccactgctcattcccaacttgcaggattttgctgctgtagaatttacgatgccacaaacctgcatttaaggaatgttgcctgaggcagagtaggtgttctaaaggattaggagatttcctggaataagactttccactgtgctgctgaggggtgtgtgtgtgtgtgtgcgcgcgcacgcgtgggtgtgcgagcacataaggcagtacaggatgggaaaacaagtgtagtgcacactacacggaaggcgagagcctccatcctgagcctgtttttaccttggccgtgagctctggagggttgtcacagagctggaaaaacctcagctttgtgtctgaccccacccactgcaccagtttcacaaaataagaaaagtaggatagagccaagccaagcctcaggactctctttgagtccagttctcttcacttccccaaaggtgattcttgatcacgcgaggtccctagatgttaataaatactacttgaaaaaaagattttaaaaatgaatgggaattctgaactaaaaccaaaataaataggtttctttactgtagaaaattttcagagcctttaatgcactaattatgctttgtaaacctccagggaagcatgtggtgtttctcaaacttatttggccaggaaaccttttttcctggccacctccacgtggcctggtgttctgcagaagaccctcaggaaaataccacactaggctgtcttgcctcatgtgccatttaatattttacaaacacctaagtctaattgctgctggatattccatcatatggctaagccaaaatttatgtgtccattctttaattgttagacattgagattgcttacagtttttcagcatcattgataattttcaaaggaattctggttactttgtaaccatctctgattattcccttaagaggtggaattgtcaaatcaaagtatctgaacatttgcaagattcttgaaacacattgtccagctgctttccagaaaggtcatgctcgtttattttctaccagctgcgggcagggttaatgtccatctgcgaaagctgagcagccggagaagctccaagagcctgaagaaggccgttcccgtctcccctgccacagggacctccagcaattagaaaacaaataatcacacacactaaggacataaacagctatttcttttgaggagacacactgggttttcacagttccctgtgccgtttctaaataattgaatgacatctgaaaaatttctcaacattttaatttggtcttctagatgttttgctgggtagtcagggaagaagggattttgaattggcatctgttgtgctaattttcaaataacctttcaaggtaagatgtaaaaataaagctttatcagcctcttgtgactgtgaactttatttccagaagaatctttttatgtgagcattccatcagtcttatttctgaccccacaggaattgaattatgtcatgttgaggactgaggctgattgtggtgcttttgctttctatttgtaagggggaaaagcataaacattgtagactagaagtgatttatctttttgtcctccaccaagatcaccctttggtcaatgcattattgggttttggaactgagacgtgaacttctaactcattaaaaccctcaagtccccagcaataaagtcatttaagtggcttcaccaacagagatttatttcaaagcgattccatttggaggaaggaaagaatgagtaatgcattatataccaagatcgcttcaataattcatgagacctccatgccagtgaccgttttagattcagttcatggtgttttagcctaaagtgaactctctctgtcttagaagacacccgcagtttgctcctctttgagcttgagtccatgaatatctttacttttgggaaataaagtttgtattgactgctactttgtgcgtttacatgaaccactcttatatggaggctattttgaaaaaaatgggcattttgtataattggggtaaaaggatacttaatctgcggtccttaccctttgaaaagtaggaatgtttaaaaaaaattattgctttttccttcctttgggcaggaattctgattttgttttttaagtgtaaggagtagattgccaaatggtgggttaaaaatagatttatggatgcctaataattatgccaaacacagtgttgggccgtcagtgagtacggaaaggcatgcatggcaaatgtcgctgtccccaagtgcgttctggaatgggggcagtgggtggcgccggcccttcagcatcttcggccaccgcacagttcagctgtgaactccttggttcaccctgagcttcgtccaaccttctcccttttctgaaacccgcagaggctccagagtcctttctcttcaggatggagacctgcatggagggactggaggcagggagggtggcccacttcctttccacactattgtgagtgcctcaccagcattcctcagtgcagtaacagggaaacctggggactcagatttccaaataccatcatttcagtttggcaagtattgatccaatgatgagtatcgtgggaaagaaaataataagttagggttttgtcgcttgccagaaaagcttcaggatccacttctccttcctccctgctctctccccactgcccaataaaaacagctgctttgttcaaaacttaaaaaccatattatttaaaactcattgtaaaaatttatgctatacagatgcttgtaaggaaaatgtaaaaatcgctggaaatcccacctgttaagatttagaggaacctcgtgttattcctgctcacagagacatactcccacatacattttaccctacattatattatcatataatgataaattaaccacataataaatgataaattatatgctatatgtgctgttttgagactatttctcatctaacagtatgtcaaagatctcttttcctataaataaaaatcatcattttaatggctatagaatatcattacatacatatatgtattaatctgtgcacaaaataacatagactgggtggcttaaacaacacacgttgatttcttaccatttgggagctgggaagtccaagatcaaggtgctggcagattcagtgcctgtgagggccccctttctggtatgcagatactcgccttcttgctgtatctcacataggggcagggcagggagagaagggagatctggtctccttctctccttataagggactaatcccatctgtgacctcatctaaccctaattacctcctaagggccccacctcctaataccgccacgttgggagttagggtttcaatacatggattttaggggagacacaaacattcagttcataacattataccatgagtcaattcccatttactcccataaacagcgcagggatgtgtcttcctgcgtgtgatggtcactccagtatatattcctctaagtggaattgctgggtcaaatgggacacacatttcaacttttgattatattaccaacagttgctttgaaagaagatattcagcacattccatgtagagtatgtgtgcctcccttcccaaacccacaccaacactgaacagcacaaatctttttacaatttaataatttataagtgtctccttatttttattggtgttcttccgattctaattgaacatgttttaaaatatttgttggcaatgtatatgtcttctgtgatttacctttatatatatctttgtccatttttctattaagccatctttttcttattgactttcaaaacccctccaggatactattttttttttttttttttttttttttgagataaagtctcactctgtcttccaggcaggagtgcagttttgcaatcttagctcactgcaacctctgcctcccgggttctagcatttctcctgcctcagcctcccaagtagctgggattacaggcatctgccaccatgcccagctaatttttgtatttttagttgagacgggtttcaccatattggccaggctgttctcaaactcctgacctcgggtgatcctgcctgcctcagcctcccaagtgttgggattacaggcgtgagccactgcactcggcccctccaggatactttttaatttaaaaaaatatgcagattaagactggacccttctccaaaatatacataaaatgtatgcattctgagactaatgacctctcctgtctggggatgaacgatgctagtgaccagcagcacttgctttgttaacattttggaatggagctcctctgctgtcttgtcatttgtggaccttaggtaggtgtgaagccccgcgttggagaggtggcagcccctccagacccgaggcagctgctgccaaggttgcccttgctgactggtcctcattaatggctcagcaagggtcctgtgatctttgccagtgttccctttccctctccttgccatacatctttcctttactgccgcataattctaatgagattaccctgggtcagtcagttatattagagaaatgatgagcagcagggaaaagaaaattcacaagatggtaacatttaaaataaaatttgtttttggcctttacccaacagtagatttcatggtcaataaaccacaagcatacatatgtgttgatgaggaggaagatttattatttcatatgaactctggggccgggtgcggtagctcacacctgtaataccagcactttgggaggctgaggcaggtggaccacctgaggtcaggagtttgagaccagcctggccagcatggtgaaactctgtctctaataaaaatgcaaaaatgatccagatgtggtggtgcatgcctgtaatcctggctactcaggaagccaaggcatgagaatcgcttgaacctaggaggtggaggttgcagtgagccaagattatgccattgcactctagcctgggtgaaaagagtgaaactccatctcaaaaaaataaaataaaataaataaataatatgaaccatggaaaaattatatagggaaggaatttagggatcctgtaaggatgatgtaggataaaacgtttatgtttaatttgggattgaataaagtctgttcactttggcctaaaactgttcattgttcttaaacagtttcattcattggctcccatgtactatcgaggctcagctgcagctgttatcgtgtatgatattaccaagcaggtaagaatgtctccttcagaatttagatgtcatttatggtggttctctcacttagagagactggagcagagacgtcactgcttgcatcttgccagtagcgtgccactatatattgagtttatttcatgtatatgtaacaaagcatcccatatttatctgctaaattaaacaataatgaccattcattcttaaaattgactgtagaggcaaagtcatgcctgctagtactattctgcagaatgtcagcttttaaagaaaaggaaaatcatttttaatttctgcatgctttataattacagaatacttatttttgttactgtttcaatcatactacatacttaaaatgccaagcataacattcgtgtgtatgtaagtaaatctttgtgtgtgtatatataagtatatttttagttatcacgttgaaggtcttagacttccatcaacaaataaccgcagtagtttgatgacattttttcccactcctgcaaactgaattatttacttttttttctctggagtgttgactcagcacataagactgttagtttaatgacccatcactgttactttccacgagttcctgaccacttctacctaaatgtggtgtgttgcccttggcctgttttctagaggacaattgtgagtgaagggccaacaggaagacaggactctaaatatatatgtttcttccttggtgtaagcatgagcatttacttagtcctgttattcttattcatgtggagtccaggctatcattttaaattaatgttatttataggagaaaaatcactgatatgattttcttaactagatcaagttttaattttagaaaacttgatatggtctatttaagtatatttcagctaacattaacttttgtgcctagacagaggtagtatgttaatctgcatgagtctcctaaaaatatttttctccattaaattgtactgggcttgtatttctgcttagttgaaatattatattgaggggtctttctaatgatttgtgtacactgttggtttaggattcattttataccttgaagaaatgggtcaaggagctgaaagaacatggtccagaaaacattgtaatggccatcgctggaaacaagtgcgacctctcagatattaggtaagatgcattgaaatctcttttgtgtagatactgtcctccatccctgagtgtcatccgtgtagatactgtcctccatccctgagtgtcatccgtgtagatgctgtcctccatccctgagtgtcatccgtgtagatgctgtcctccatccctgagtgtcatgcgtgtagatgctgtcctccatccctgagtgtcatccgtgtagatgctgtcctccatccctgagtgtcatccgtgtagatgctgtcctccatccctgagtgtcatccgtgtagatgctgtcctccatccctgagtgtcatgcgtgtagatgctgtcctccatccctgagtgtcatccgtgtagatgctgtcctccatccctgagtgtcatccgtgtagatgctgtcctccatccctgagtgtcatccgtgtagatgctgtcctccatccctgagtgtcatccgtgtagatgctgtcctccatccctgagtgtcatccgtgtagatgctgtcctccatccctgagtgtcatccgtgtagatgctgtcctccatccctgagtgtcatccgtgtagatgctgtcctccatccctgagtgtcatccgtgtagatgctgtcctccatccctgagtgtcatccgtggagatgctgtcctccatccctgagtgtcatccgtgtagatgctgtcctccatccctgagtgtcatccgtgtagatgctgtcctccatccctgagtgtcatccgtgtagatgctgtcctccatccctgagtgtcatccgtgtagatgctgtcctccatccctgagtgtcatccgtggagatgctgtcctccatccctgagtgtcatccgtgtagatgctgtcctccatccctgagtgtcatccgtgtagatgctgtcctccatccctgagtgtcatccgtgtagatgctgtcctccatccctgagtgtcatccctgagtgtacaaaggtatcatgcctttgttatgtctgccctcagtgtagtaacttaattaatggcctttcacttttggtagtcaatgtggcattgattcaaccagagaagaaataagagaaaatgatagggaaatacagatctgatgtaccatacaatgataaatgttcaaattataactcctgtacataacacagttacatccctgactctacatatctttgggctagatggttttgttatttctgttgttactttttccattattattttcattatgactactagcacaattttactaacactttcctatggtaatgaccattagaattcttaatatttttcatagcatacctgtttgttttggttctagattttatcttaaggatatagtcaagtacataatctcactatttagttctaaaatcagaatacgacacattgtatgtgagtaccttgactttccccagtggtattgggttattgaacttcttatatcttgaaggaggttgtgaggatccagtacacatgaattagagatttgatgatagctttacctagcctggtaagctagctgttttgctaaataaatacattatttaaaaaaggaaatagcgaatttgtggtatctccattcccttggttaatttaattctcaggaattctagtcgttgattttcataaagacaactacatcatgcttctggttttgctaatcaaagtgtgattaaaccaaagaggaataaataatggatggaagtggatcttgcaaaagctcttaacatagcatttaacgaactgttctgtttctttaggatttcaaaagtttgcatcaacttgcatctggttggtttataataacagccataaacaccacttttctgggatttggacaaatcttcaaacttcccagacttagttatctcccttcgttactgtaatcctcaaacagcttactcatctagtgttcccagcagaatcaccttaacctttgtcatgggaagggtgaggtgggtgggtagagacgacctttgctgagagaaggtgctatctctaaatccccctaattatgggactaatgtgcgcctttaagtggaaccgagtcttatgtattgtgggaatgctggtggactagaatttaagcagaaaacgatttaaacttgaatggtatcacttaggattcttggttatgtggaaccaaagcacaactgaaattcaggagaaaggggaatttattggaagatactggtaatccacatggtaaaaacagaactgccctcagctctggcatttgacatgttccagagttagtctctggagagatactggcctggcattctcttcgtttccagtctaaaatgccagggaggaattccccaggttaagaacaggcgtgtgtggccaagaggggattggtagtacgagatgatatttcccaacattactattagaatgggaaggcaggtggtcttgaagagggacagttcctagaaaagtgtagcctggccagataaaacatatctgtgacatatagatgtggctaccagcacccaaagatgtgctgtgtttcggggtggaatttgccttttatgcacaggtacagcattcttcttgatgggtgttctgatttgtgctcagctgattcttatatgtgcaattttcatagtgccccagctaacataatctattcatctcacttccaaccgtgaatttactcacagcctctctatccccagtgggagaaaatgcagggccatccagctgctacctctagtggtagtgtcatggggccactgtcccatgcatccagcctccctggtagtatcttttctcctcttgtttggcctcagtgaggtcggaatgtggctcctcaagatcctgcagttgcgttttaaagtgtggcatgtatatcttttgttatacacagttattttagatggtacttgttattgaatcaagcaacaagaagctgactgcctttaaaactctgattaggtcagtgagaaagactagttggacactaattcatttttaatttttaaacatttaatatgttgtattgaggtaaattacaaaacatcacggtcacctgttttaagtgtatacagttcaacgactgttagtatatttttagagttgtacagtcatctcatatctaattttagaacatttctatcactctgtgaagaacgtcatgcccatttatactcgctctcaatttccacctccttccagccctggtaatcactaatgtacctttttttcctctaaatttgctttttctggacgttttgcatacatggaatcgtacaatatgtggtcttttgtgaccatcttctttcagttaagcaaatgtcagtgatgcattcatttttatggctgaataatatttcattgtatggatataccacatttttatttattcattcacacattaacatttgaattatttctacttttttgctattatgaaaaatgttcctatgaacaatcatgtacaaattttgtgtggatgtatgttttcatctctctaggatatgtacttaggagtggaatttctgtgtcacatgataactctttgtaataattttgggaactcacagactgttttccaaagtaactgcaagatatccacatcctcaccaacatttattgcctgtctttttgatcataggcatcctagtgggtgtgagattgtgtcactgtggttttcctaatgactaatgatgttaataaatgtcttttcatatgtttattggccatgtgtgtatcttctttggagaaatgtctcttcaaatcccttgcctaatttttagttggattgtctttttattatcgagttgtaagagttctttatgtattctgaataaaagtctcttatcaaacatgtaattcgcaaatatttcctctcatcctgtggattatcttttcacaatttttactgtgtgcaaaagtttatgtccagcttatcatgtttttcttttatctcttgttcacaagtgattggctaattgaacatcacaaatatttattaatgttttcttagtgcttacatttaggtctgtcatccattttgagttactttttgtatgtaatgtaagatacgggtccaaattcatcttttgccatgtggatatctaattacccctgcaccagttgttgaagagatggtttctttcccattgaatcttttgggggcacttttgcccaaaagcagtcaaccataaatgtggtcttatttttgtgctcttaactttattagttgatctacacgtctgtcctgacaccagtgttatactattttgattgctgtagctttgtagtaagtttgaaatttaaaactgtgagtccttcaacgttgttctctttttcaagattgtttgactattctggacccttaacattttcatatgaattttaggatctatttcttaatttctgaaaaacaaaaggcaactttgattttaacagaaattgtgttgaatctttaggcccattcaggtattattcccatcttaacaattttaagtcttccgatccatcagtgtgaaatgtcttttcattttaataggtcttctttaatttcttttagcaatgttttatagctttcagtttacaagtcttgcttttgttttatttattcttctgtatttgatttttttgatggtattgtgaatgggattgttttcttatttatggcattgcttgttgttagtgtgtagaaatgcaattgactttagtatgtttatcttgtatcctataactttcctgaactcatttattaattttagttgttttttagtaaattatctggagttttctatatacaagattatattatctgggaataaagactattttacttcttcctttccaatatgggtgccttttagttctttttcttgactaatttctctggctagaatctctaaaacagcctggaataaaagtaatgagagtgcacattcttgtttcttcctgatcttaaggataaaatgctccagtaagtatcacactaactggttttacatatatgttttttattctgttgaagaaattcccttctgctcctagtttgttgaaggctttttgtcatgactgaatgttggattttttcaaaaaactttttacatatgtaattatatgttaattgattttgggatgttaaactagtcttgcattgctgggataaatcacacttggtcatgatgcataatcctttttatacattgctgggtttagtttgctagtgttttgttaaggatttttatgtctatattcataaagggttttagtctgtagtttccatttcttagaatatctttgtctggccttggtatcagggcaataacagtcttgcagaatgagttgataagttttcccacctcctctgttttctagaagagtttgtgaaggattgatgtcatttctctttgtttttctacatcaacttgatctccatgatgtcagttctttaagtgttatctaatttgctgtgtagttcatagtattatctcataatctttttttcttaatcccatgaccaattaaataatacttctaatttgtataaggtcagtagtgatgtctcattttccattcctaattttagaaatttgaaacttctctctttttttctcattcagtctagtcgatagtttgtcagttttgttgaccttttcaaagaaccagtgtttttggtttatttcttttcattgtttttctctttcatttatttatcctctaattgttatttccttcctcctgtttactttggatttactttgttcctctttttctggttcgctaaggagaaaggttagcatatttattcgagatctctttaaatgtaggcatttatagttataaattttcctgtaagcactgctctagctgcatctcataggttttgatatgttgtttttaactaatctcaaaatattttctaattcgtgttctaacccattgtttatttaatagcatatgcaattcccaaattttgacttttgatcatttctaatttaattccattgtaatctgaaacatactttgtatgattttaattattttacatttattgaggcttgttttatggcttagtatatggtctgtcctggggaatgttctaagtgagcccgatgacactaagtttttaagacctatttttacacttgctattctcccttagagagaaagtctaaggttgagggccctctgcagacaagtgtgtctaactagagtttaattatattttgtctttatcatatttattttttaggattacattctttttatgatagttgacactagtgttgcatttatgacagtgatatcatatttcttttaaaatgttaaaaaagttgatttatgcacatgacatgattatctacacagaaaagcccaaagaatctaccaaaaaagttctaaaaatactaagtgggttcagcaaagttgtgggatacaaaagcaacgtggaaaaatcaatcagatttctatatattaatactaacaataaatatgcagaaactgaaatttaaaacacgatattctttacaattgctccaaagaaaatgaaatacttaggcatatatttaacaaaacatatataggagctgtatgctgaaaagtacaaaatgttgatgaaagaagtcatgtaagagttgaataaatggagagacatattatgtttatgaattgaaagtctcaacatagtaaagatgttcattctcttcaaattgagttataggtttaaatgaaatttttgtcaaatcttagcaaggttttttgtaaacataaataagcctattctaaaatttatatggaaaatcacagacactgaatagctaaaacgatattgacaaagaagaatataatggaaagaatcactctgttctatatgaaggcttaccatatagctacagtaatcgagacagtatggtattggcagtgagacggatgcatagatcaatggaacagaatagagaacccagaaataaatctacacaaatatgctcaattgattttttgacaaagatgcaaaggtagttcaacagaagaagcaattcaaccaatgaccttttcaacaaatagagtaatcggacatcaataggcaaaacaaaaacaaacctcaaccttatataaaattagtctaaaatgaatcacaggctttaatgtaaaatgttaacccataaaacttttagaaaaacttctaaaagaaaataaatttaaagatctggggttaggcaaagagttcttagacttatcattaaaagcacgattcatataaggaaatactgataaattagacacccttaaaatttaaaaacttaaaaatatttgctctgtgaaatattgaggtgtgaagaggatgaaagacaagctacagactaggaggaaatatttgcaaactatatatctataagggactagtatgtagactatataaagaactcacaaaatttacatgaaaaaatttgaaaatggcaaaagacataaacagacatttcacctgagagaataggaagatggtgaggaaggatataaggcgacgttcaatatcatcatcaaacctatcagaatggctaaaataaaaatcagcgacaacacctaatgctggtgaggatatggaaaaactgagtcatccatacgttgccggtgtgaatgcaaaatggcacagccactctggaaaacagtttggcagtttcttataaaactaaacgtgcagttaccatatggcctggcaatcacattcacgggcatttatcctggagaaatgaaaacttatgttcacacaaaacctgcacatgaatattcatagacacgttatttgtaatagtcctaaactgggatcagcccagatgtccttcagttacgaatggctaaacaaactgtggtgcatccataccatggactactactcagcactaaaaggaggcaaactgctgatacacacagctcgaaatgcatcttcaggggaattgtgccgagtgaatgaagccagtcccaaaggtttcacattgcatggttccatttatataacattttagaaatagaggatagattactgattgccagggcctatcataaggggaagtaggggtgggggacggggaggaaagtgggcatgggtttgaaagagcaacataagggaccctgtggtgtcggcactgcttggtatcttctctgtggtggtggacacaggaacctacacaggtggtaaaattgtatacagcttaactcacatacataagtgcatacaagtaaaactggagaaatctgaataagatagaatgcatcaatgacaatgtcctctttgtgatattataccatagtttttcaagatgtgaccatttagggaaactgggcgaagtgtatgagaaatcgcttggtactgtttcttacaactgcatgtaaacgaatctacggttatctcagtaaaaaatctgattaacaaaaagttgatttagataaaaataataaatattggaacagtcaggtgagggtatgtgtgatacatatgcattatatatattatatacacatggcaaaaattacaaagggggatgtatttgacaaaaattttgtaaacacactgggccaaatgattaaattaaccatctccagcacacctaaggtacaaaagataaacagggtaactgtattaaaaattcccatttaggaaagagggaaggggaagactgctgcctgggtctctgcccagaatgtctgtctcctgtgagacaggaatagtcggtaagtgatagggcctgggaacctagtgggcaccggcttgttgacacgtttctatggtgggggaatcggttcttggtcagcaatctggctgctccagattctgcctgctgatataacttttctggggagttagccaaacctctaaaccccagaccttattcagagcttgaccttcttttactctaatcccaaagtactttgctctcctgtaattcccagaaaactgtatttgatttttaactgagggttgtagcaggacagtatgtagatatgtgtgtgtagatatgtgtggatgtagatgtgtttgtatgtgtgtgtgtatgtgtgtgtgtagatgtatgtgtgtatgagtgtgtgtgtagatgtgtatgtagatgtgtgtgtatgtgtgtgtagatgtgtatgtgtgtgtagatgtatgtgtgtataaatgtgtgtgtagatgtgtgtataggtgtgtgtgtgtagatgtgtatgtgtgtgtgtagatgtatgtgtatatgagtgtgtgtagatgtgtgtgtatgagtgtgtgtgtagatgtgtgtgtgtaggtgtgtgtgtgttggtggaactgatctcatccaacacactttggttgtgtaagcttgtcaattcttggaaggagctctgcctggcctattttgagaatttgctggatggaaatggaattcgccctccaaccttggctcagcccacttaaggcatttgagtgcagaagtacttggcagagatgcctgttcagtgtgtttcatcttcttgcatgttccagaagatggtataaaggtccgccccactcccagagtggaaggcattcagaggcatccggtcaggtacactcaggatttttagcttggatttttttctaggttcctgatcttggtgagagattttcctatcttgaacaaccctaaacaaaatctcccctgctcaaattattgtgaaactgaagtaatgtatggtccctctgaatttgaggcatgaaagcaaagtggaatgtgagaagactgtcctggacttgcacagagtaggtgctcaggggtgtaaccccccgtccttcctgccgctcttctccctccccatgaatgttctggtcacagctcccaggggtggagagtgtgcagttcctggtggggcaggccattctgttctctccaccatctgctgatgctggagttaggcttgcacagttggggacatttaagggattgtcagagttgcaagaaaataagaacctcaaatggattgaatccacaggatctggggtaccagctgacttgcctggtcaagatggcaggagaacctagtctgtgtgcgagctggggctggcagcaagtttctgaacaagtagcacatggcatggggctaattcaaggtctgtgctattctaggacagcagattggcctagggtctaaatagaaaagaaagctttgtctcagaaagtctggagagccctacaggacgctgcatgtccttttcctgggtctggtgggaaaaacagggcagttgagtcttgcaaagaaaaaaagagaaataggttgtaaccttgcctcagtggttttaaaagtttcatgaattcaagaaaccatagtgcacttgttaaaaattccagttctaggaaccaggtccagagattttgattcaataggaagaggcaggcaagggtatgtgcattttaaaaagtgatccttttacaagtggtccaagggtcattctcggaaaagcattgctttcgtcagtaggagtttatggtagagaagaatgaggaagtcccagaatctatcctggcatctgtacaggtctctaactgcaggctgcactgtctgggcttctctcttgcccttcaggcttcctggagaatgaaaacaatgactcatcatctttcaggattcaaaagtgtcacccattatcctaagcaaattaatccaggaacagaaaatcaaatactgcatgttcttacttataaggggaagtaagcattgggcactcacggacataaagatggaaacagacactgggagcttcagaggcaggaaggagtgggggacagttgcaaaacttcctcttgtgctcagtacgtgggtgacagaatcaattgtaccccaaacctcagtgtcaccccgcatacccatgtaacaaacctgcacacgtacccctctgaatctaaaataaaagttgaaattattggctggtcagggtggctcacacctgtaatcccaacatgttgggaggctgaggtgggcagcttacctgaggttgggagttcaagaccagcctggccaacatgatgaaacccccctctactaaaaatacaaaaattagccaggtgtggtggcacacgcctgtaatcccagctacttgggaggctgacacatgagaattgcttgaacccaggaggcagaggttgcagtgagctgagatcgcaccactgcattccagcctgggtgacagagcgagacattgtctcaaaatacaaacaaacaaacaaacaaaaaagttgaaattatttaaaaaaacacacacacaaaacacaaaagtgacaccattggcccttcatctttaatctcttccaaagcatttccagggcctctctgccccctttcacaccccacattcataatcaccaggagaagagatgtgattgggttcaaattaatatgaggctaccctatttagcttggatctttttctaggttcctgatcttggtgaaagattttcctattttgaacaaccctaaacaaattcttcctctgctcaaattattgtgaaactgaagtaatgtatgatccctcttctggatggttcgactcccttatatccagcctgtgcttggttgcctttggcttgggtaaggggttaagggtacctggctttgggacctctgtgagaggacctgcaggtatttcaggaaccatttgctttagggccatgtggccaggatcctccgcgaaggagggaaggtcagaggaagaagagcatatcctatcccaccctggcccttaagcaagaatcactccctcacacttcctctgacaagcatgggcagccttgacctatagctgccataataagtcattccttgggagaaattactccaaccccatacattccgcatagcaggttctagttctacatttcttctgcttgatcttgttttcctgattttgaattcttggctctacacaaatcccctttgactcttcccaatttgaaactctttcaggctttcctggtcatttttggacattggccttcatttcatggcttctaatggaactgcttttcaagctcaggggtctcctgttggcatttccttgaaattccacctctcactggtgtatttagggccacgaatgaatcagaaggatgagggagggatcaggaagtgccgatgggagaagacccctcagacctagtttattttatcttacaagtggtagcagtgggaagttacccaacaacagtgacgatgggggctgggttgggaagtgggagaactttcttctcagaggtggtgggtaatgaccttgagatggctctgctgtcactggctgcctctgcctaagattcctcctaccctccccatgaatacaacccaggagatgctcaggggctgttctcatgcactctcgcctcttctgagggatggaatcatggtctcttaacatcttacggaagcactctggtgcctcttacagaaacattgggagggatgggtgggactgctgccagggagtccagaattccttcctggagtagaggtcatacaccaagacaaagggcatctagtgttagaagtgaaaatagggtagggtaggaggaaggaaattagtcctatcagctctcagtcatttgattagcaaatacgttttgacggtccttttgtggcagcaaagtgctgtgagaatagaaaagagactgtcttttcctttgagctattaatgtttacttctatttgggcagccaagaaagggggtggggaagtatctgatgagcaatgtaagactgtatttaatgaagttccagttggtctgatgcagtccagaaaggacagaggggttcaggaaggggagaggtcagaatcatctgttgtgactaggaaaggcatgggacgacatgcgtcccaggtgaggtatgtgccacaggcagttacggatgtgttggaggaggaaattccaggaaggggcaagatctggaacgaaggcctggaggtgggagcgagcttggcacgtgttggcagggaggggccgtcaagaatatctaccctgcgcctgccctggggaatagtgggaaagatggcgggatggtgtgggtctcagaagcatgcagagtgggtgggctcgatgtgctggccaggatggtgcccgcctcggcttccccattgccaggcagtcagaacactgttttcttctgagcctgttgtggccccaggctcctccttaatgcaatgcctcgggtagtcactaccagttaaagagatcaaacctattggccatcctccaaggaggctgtgggagccgttctagtgtcttgagtaagtgtgtgattcatgcaatttcctgtgcaatctatagctggaaaccagggtgagcctgtgcttccatagtgtacacggtcaagttagaaacaccaccagccatctcctcacttgttttacatttttggataaagttgtggtttttaacagattaaaaatatatttggagataaatactttttactaagaataataaatttacattgctttcatctcttccatgtgactctaaaactcattccagtcttgatagtgagccacagttgagtaggggagtttcttagaaattatacaaaccaaataacagaatttgaaatgctggaccttaaaaatccaatttattccaaatactaaaagcactaaagccagtgaacatcaaaaggcctgaaaaatcatggcaagtgttaaatgcacgatgcgttttccttatgtgagataatgaggaagaatagagtctgtgctgttaaaatgtgtgtgctctgagatgtgcctgtccgtgttctgcgactgatgtggtgcgggtggcccctcccatttacctgctgctgtcacaggaggagggagggagctgaagactgagctgcccagagagcccatcaaaggcatctggaatctttcttaatttaaaacattcttaaagaagaatatataaaacaagcatatcgtaaggaatactgtggtaataaaatgaacagccgtgtaagtgtgccacagagaacccttccccaatcgtatcctcttctctccacccagaagtaaccaccctgctgactttggtgataaccacttgttttcgttatgctttacacctacatttgcattttccaagcagtagatttgcccgtttttgaactttgtaagcggaatgagactgtatgtgtcacgtgatgacgtgtcgttcactcagcatgtttgtcagattcacctgatgggggttagctgtggtttctacatattcattgctgtctactgttccgttttatgagtggaacacagtttatctattcattctattggtggatatttgagttatttctggcgtggtgttactatgaacattgctgcttgaacgttcttgcacatgtgtaagcatttctctggactggggtaggtaagagttgaattgctgagtttcagggggtgcacaccctcagtcttactaggtaatgccaacgtctttcacggtggcatggaatatgccaatcgtgtgtgagacttcctgaggctctgcctccttgccaggcttcagaattgtgatccttcagggcatatagtgctatctgacagtcatttcaatgtgcattttcctaattacctataaagttgtcatctttttatatatttattggccatttaagtttcttcttctgtgaagtgcctgttcaaatctttgccatttttttctattggattgtttaccgtaatcttgtttatttttaggatttaaaaaaatatatacttgatgctattcttttgttatctctatgtgttgaaactatcatcttcgaatttaggtcttatattttcattttctttatgttgtcttttgcttttaaaaaatattattattattattattattttagagatagggtcttacgtagttgcccagctggagtgcatagctcactgcagccttgaactcctgggctcaagcaatcctcctgcctcagcctctcaagtagctaggactatagatgtgcaccaccatacccagctaatttttttaaaaaaatttatgtgtttgtagagatgggggtgttgctatattgccaaggctggtctcaaacttctggcctcaagggatcctcccaccttgacctcctaaagccctgggattataggaatgaaacaccgcacccagttctttttttcattttttaagagacagggtcttgccatgttgcccaggctggagtgcagtggctattcgcaggcctaatcccaccactgatcagcactgaagtttccaccttctctatttcctacctgggccagttcacccctccttaggcaacctgattgtccgtcaccccttggaggtcactatattgccatgcaacttagtgcagacacctgattgacatagtgcactacaacccagaactctggggctaagtgattctcctgcctcagcctcctgagtagctaggactgcgggtgcatgccaccatgccaggctgtgttgttttttcatcatcagaagtccttaatttttgtgtaacatgatttatcaatttttttctttatggtttattttggggggaagagcctaattttaagaaatcttattttaaaaatatttccatacctccaagatcaggaagttattcccctaatattaacttactcccccaatattaactatctttcataagctttacagttttggttttcctatctgtcttcaaatcacttgaaatggattttgatatgtatgctgcttaatttttcccatgtagacacccagttgtctcagcattattggatgtgaagtccactgttttcctactgacctgcagtattagctgtcatacgttgcgtgtcatgtgcacagtgtttcttgggccgtctcttctgttccatcggctgacttagccatccttaaatcaacactgcactaacttaattacgatacctttatcgtgagtcttgataaacagtctggacttatgctctgggatctttaatcaatacttgtgggccccagaaaagatttcatgagcacatagaagtgtgggtgtggacatgttatggtctggtggagactgggcttatgttgtactttgggttatgatgcagaactatgttatctatttcgttgctcaaacggttccaactttggccactggggtttctttctgttggctcccctgtccctttgacatatgcctatcattttggtttttgagcactttcttactttctggcacaagaagctgtttcagatttatcttggatatttttggctccggccctatagtcggcctgactccttttccctaattaggactccacaggaaacacagtcccttcttcaaggagctcggcctagcagtagacagcttctttgtaggcaggaccaggcttctctgcagcagaagggaacttgaaatcagggtaatgagcctcagcagggacgggccaccacgctgccctgagaggatcgtgtgtgggcacggcgctgtggcatggccctgctttgaccctctagctatgctgtagggccaggtggagcctggagtggcctgagctggggactgccgtgaactctttccactccccaaggcattgcataagtaatgtcactttctacttgcacagcaaaatcagggacacagttttctcgaacacggggtgcctcccctccctgcagcccatgctggtctaccctgggtggtgggcccttgtttgtgttagagacagaacgctctgcaggattctgagtggccagttgtggctcacagtccactggcaagtggaggcagagctgtggagcccttggtagccacggagggcctgccacccgtcatgaaatgcctactcagctgttactggccccctgtggacggcagtgctagtgatggacagaatcctgggactagtgccagtgactctgtggatacgccgagcgatctgggcgtgcactgctgtggtggcctttatggtcaggaggcgacatgcagtgagaagaagggaagaactggcccaaagggattcagcccagggtgaggtccacggaaaggccagggccaagatgcagccagcaccccaggccggtggtggcctcacatcacccatgccagaggtcagtcctcgattgctccaaaccctctgctcaagggttcagaaggaaatgagcaggtcttcccatcagggcccagatgagcttctgaaaacaagtgtgacaaaacaacctcctgaacatcctggaatgaccgatgcaaagtacaccccacacggttcacagcacgaagatcatcaggggcaaaccgtggacgatctgaatgacagcacagaccgtcagcaacctgcagagctgcctggccaagaaattacgagacggaagcaacgcttgcaggcgaaggaggagaagaaggaaaggccagagcaggcaggggcaggagtggaacgggccgcgaatgtcggagtgaagtgcagaccttcctggcccacacccctccgagcatgtgctcgagggcagtagggaccacgtggaggacaaggacttggcaatggtggggaacagggaatcaggacatggcagtccctcagcatcccggccagaagtccctctgaagagtgaatgatgatggtgacttaggtgtgtcttttgaatatcctgagggggagattggaaaagcagacttgcaatcctgggaagaaatccaaaggtgtaaagaactcacagcggaagtccaaagtcttcctgcaggcctccctgcggggcacgagggcacagctggagagggagcttccaaaactgcagctgagggttcccgctgcctacactgcaccgagaactcccgtgatggggtctcacgggagtccacggaggagaacgcctactgcctggacctcgaccagagacttcgaaaggtgcacgaaaacgtgaaccgccgtgtcagacttgcaaccactacaagaagatgacccaagacctggcccaggaatcgaaaaaagacacttccaattttcagagggagatcttcttccgtgagaaaatggcccaggaaggccggatggctgctgtatccactgagacagcgctccagccgctccgggaagaaaatgaccacagcaggcagaagccagctgattttgaggccaagttccagcttctccggggtggtgctttggctcctggggttctgcccgcagcccacaggggcccggaagtgtcagggggaccatgggacgacagggcccccagaagggaggcaggtcacaatgtgagggtttgggtccagagtacctgctggtttgattctgttttccctgtaaccaggtcctgaacgcccagagcctcagcagaacatcagccagtggtgctccctttaagttacttttgctcgatctcttgttagtttagttcattggttgatgctgaagttgcttatattgatgtttgatagatggcattaggattgtaaggtactatttttcagataaagattgtttaattctggcacatacacgatttccacatctctggaccctccataagtacgcaggataagtatttcattttcgtttagaaaaagggcctctcttacctcaacatcattgtgttcgttatggataggaagacataagccatatctgatctatgagctgttattagaaaatagtacagtaaattggctggaataaaccttggttttaaaacagtgccaaaagtgtcataaagttctttgtctctgacccagaattcttgggtcttctgtcagcatccattgactgtatcagatgattttattgacttataagtagggtaaagtcaatcccttcatgctttttatgagacagatgggatactgatagagatatgaccgtctggaatagagccaattaatgagatttaagggaagtccttgagattcagtggtagacacattgaacaaattatatagtcttttgtccaacaaatagttctccactatgcagccctttttttttcttttttgagatgtagtttcactcttgttgcccaggctagagtacaacggtgtaatcttggctccctgcaacctgcgcctcccaagttcaagcaaaactcttgcctcagcctccctagtagctgggactacaggcgcccgccaccacgcctagctaatttttgtatttttagtagagatggggttttgctatgttggccaggctggtcttgaactcctgacctcaggtgatccaccctcctcggcctcccaaagtgctgggattacaggcttgagccactgtgcccagcccagtatgcagccttttaataagggacaaacctgaacagcaggtggtaggctcaaaaacacctttcctataggcatgtggatctcctcactaattcagctgtcagtcctattgtgacaattagcaataaatttcttctggggttgaaggggaaggttctaccaacttcagacaatatttacagagacataaggaaagaagtcataaagaaatattcaaagttcaaaaaaagaatgaacataagttcttattgatgcctctaactctaatccagaaccacaagccctattctaaccttctttggcggtgggggaaggatgctaaaagccatcagctactgagtgattaaacagagtggtttaatcttctgttcctggggattttcttcgaagacagagtaatctcttttgccttcacttcacatactgcccagaagtttcagcatttcataatgtaacttatattaatattaagaactacaactatctcagtgattactttcaaatggcacaatttttacttatagttgatctgtctcctgtttacttaggaagtgggttgtaaacaagttaattattatcactgccaaccctaactgagtgcctactgtgtgcatgtgtgtagtttatgtcaatcctcccatcccatgaagttaatatcctcttcgtatcttatcaacaaggaaaccgagacacaggtgggtcaaggggtcgatcctaggtcctgtagctaagacggtgtagggtccagcttctgacctaagtggtctatcccagagcctgtgttcttgaccgtcatggtatcttgcatccactaagaagtacaaacaggacccacagtacaaacaggaactcccaaactgccccgagagaaaacggcagctggtatgatccgctcagaggatttggagccgacaactctttccagtggttctttctctggcctcttcaggactaggctgaatttctgtcagcagaaggggattaagaggcaaaggaatggccaagtcccctagagaacctgttttctgcccagtccctgttggattccaaattctgatatgttttccatgagaaacaacccatttaaatctgtggcgagaacctgacactgctcgtttgaacctgacaccaggaatttagccccaggtgaatagcagttaaggacatgtgttattaagtaggtgaggccccttgggagcagaaattctttgctggtacacggttgtcaagtgctttagctgtaagtgcttagatcattgcaatgtgttattgtctcagatatttgctgtgaagggagtagctattctttgtttttttcaaagaagtttattttcgtttttttccttctcacaggtaaaaatccaagtgtctgtaagaactagcattttaaacagagattttgctgctttaattattgttaaaatggttgcctcatctgtgtgttacatagacatcttgggtatttagagaaaatatgagctagggggagcataacaaactctgattattcatttcagtgggtgcttgccggaacggggcctgctgtgagaacgcgtcagagcacacacagccctgcagccctcctctgcttgattttgatgagatgttgtgaatgatttcccttgcttttggctgcaataccttaaacatgtgggatggttttgacagaaaataattccaccacacagttaacagccgtctcccgctcaccgctgctgtgctgctcgtggccggcttaattggtcttttatgcttgaccttggaagggggctgtggctcggggagagagtaaaaatataatgcaaaaaacatgtaaggagacgttaaatgttacattccaggagtctggcagaatataatatacttagttttttctgttacagtattttagaactataatatgcatgctagaacatgtatgaaccaccagagaatttgttttaggaagcgctaatgagtccactcttctttttatttttatttttatttaactgtaaaatggtgcctgagcagtgtatattttattgtgccctagctatagtcatcttgatacagatttccaaactactggcttcatagtgtcagattatgaattggatagagtgaaaaaatatcagacttgactttttatagtcccccctacaagaatcattctccatctttagcaggcttgagaactgctgggaagcttgctacagtgtagatttctggggcttgcccagtagacattccgattctgtaggtctggggagatttagtatatgaagaatggagtggaacacatggggagagtcagtgtgtgaggaatggggtgagacacaaggggagactcagtgtgaggaacagggtgaagcacatgggtagagtcagtgtgtgaggaacggggtgaaacatggggagattcagtgtgtgaggaacggggggaaacacacggggagagtcagtgtgtgaggcatggggtgaaacacagggagagagtcagcatgtgaggaaccgagtgaaacacatgaagagagtcagcataaggaatggggtgaaatagatgggaagagtcagtgtgtgaggaacggggtgaaacacaaaggggagagtctgtgtgtgtggaatggggtgaaacatggggagattcagtgtgtgaagaacggggtgagacacatgaagagagtcagtgtgaggaatggggtgagacacctggggagagtcagtgtgaggaatggggtgagacacacggggagattcagtatgtgaggaacgggggaaaacatgagaagtgtcagtttgaggaacggtgtgaaatacatagggagatttagtgtatataaagatatttgaaatctgtgcaaaaaagaggtaattcagtaaatagtggtggaataaataagagaaggaaaaataagagaagataaattcaaaatggaacaaggatttaaatgtaaaacaatgaaatcatgagacttacagaagacaaataatttttaaaataatcttaaaaatggaatgaattatttaatcgtgatacaaaactcagaagccatggttgaaaatgatgaataagcctgactatatggaaacttctgagtggcataaatgccataaacaggaatcaaatacaaacagcaggttgaaaaaaattcggaaaatgtattacaaggggctaggttccataatatgcaaagaacaattacaaataaataagagggaaaaaccctcaaataatccaaaaccaccctgggcagagaacatgtacacgaatgtcatggaacaagaaacactcatggcttctaaaaagttattcaccatccttgaataaaagtttctcagaattaatgtcagatttttttcattgagaaaggacttcaaagtacgatgcagttctactcttggggtgacttatgaacattaatatacttgtcaagttggctgatctggcctgtgctcccctcatgcttctatggaatgttgataattggaccgggagctctcctgggcataaaatgaaggggttgagttggataacactacaaagggcctttacttgtttcttctactcgcatcatttcctcagtctttttggcattctgtaagaaagtagtgccatgctgtcatcctcactgagacggctttgcaaagattcatttaagaaacattgatataacacttatggtgtgcccggcattattctgagcactttataatatcaacctccttttcccttacgtaaacactgaacattgctgtaaaatgtccacccagcctggtggaatgcatggacgacatagacctgagggaggtgagcactgaagggtatttactggtggagacgatcgctttctttctgtgagcagtgcacttgggctgcctgcctgtatttaccctctcatgtgaggtgctcatctgggccacctgggaacgactctgagccaaaacccatagtcaagacgcctgagtgtactcaggcagactggtgtggaggtggagctcatctctctccaaaggaaccttcccagtaaacctccgtagggaaaagcattcttctacccttagcctgtggatttgattcccttccctcacaggcagggcttcaggattccttctggtgtacctgtcttctattcccccagccatcagtgaaggaggaccacaaagaatttaaccagctctgaaattagaccgaggcagctgccatgttgccaggttacttccacaaacaacaaaacaagcacccctattgggtagcacaggcctgttggaaatgctggagcccgcaagaatgttgtttcctgatcccctcccctgctgagaagcctctgagtgccagggaccagctcagggctcacctcgctggaatacaggctggttaacatcagagcctgggactcagaggaggctccctttcatgtttttaccctcaaagcctccctcccagcccacttggaaggctgggtgagcctcttgtcccggatcttttccagttgactctcagcactcaccacacttcccactaagtccatagattcctccactacccactcctcctttctgctgaaggcaacttggggtgatttttgtcatctagtcattcagcagatgcttactgattgcctcctgagagccaggtaatgtgaggatccctggacatgaaaacaaaagccacggttctggtccgaagacatccacagcctgtttgaacagagagacagcttcacaaggagatggtatgacgataggagtatgacaggaagaggggaagagcatctagcctggtggaggggttgccagactgagctctctaggaggccgtgtgagatgttgccacctgaacagggagaagtgggtgcaagaacccaaagttccatcaccagcagctgatttaaaatggctgtggcttcgggggcaaacaggggaagagtaaggcatgaagccccgtcctgctaaggcgttggtttgattctccagcaatcagaagatgttggagaatcctattcacaggaatacttggtagattcgcagtttgaagagtccccaccatgggcacatggattgcaggaggctagaggaccaggaaaggcaattgcgggtgtccctgtgagaagcgaagagggggtgactgcagcagaggcagcggattggcagtgaggctggaaggagggtaaagcaggctttatcacagagcattgaggtttgcaagaagagtggcagatttgtaggtgagaggtggttggtcgggctttgacaagttgcatttgtgaagtccatttgccctgagcagcagctagctagctcaagggggagatgtgtccagacgtggaagagaaagggtggagtctgtggcccccgagcctgtaaccacacagcatgaacggcaggtccctaagatgctctgcaggacagtgtccaccgtgggaggcagtcacctatccttcatcctgactcagtgctttcattcccatcacctgagcctgattggtctcttttgtggtcccgcagccgttcctgcggtctccagctttcccacttctcccgccctccccatcccgcagcggctcaggagggactccagctgggttctgaattccaccctccatcctcaccactcagcctgactggagctggccaccgctgctgctttgggatgggggtgtgcttcagacagtcagagaagaaaccctgagtaatgctgacattgatgggccacgcagactatgatcagctccgggaatgtctgtgaaggagcagccaggggacagggctggcctggggggatctgcatccacacttcctgcagtcgtagtaattctcagtgatttctgcatatagattggtctagaaagtctaaaaatagtctttaccgtcaaaactaactctctgcatgtttataccttggcttgggtgaactcgtttcagtttacctgtttcaacgcctagcacaatgcccagcatatagtaaaccctatacacttgttgaaaaaaaataaacaaaagtcacgggatgccgtaccctcccataatcgtaatgacgggaggcctgtggtggcagcctttctgcatcatgggtctgtgcagtggcctctcctgaagtgcagctggagttctcaaatgttcccagttttacatgtttgcaagacattctgggaagtgaattctcaccttcgcaaaactctcctcacagattgtagtcacaccatttgttccgacagcaatttatctgacactaactggatgtcctactattcagttcaattcagacactgactacctggagttagtgtagaccctgcaagttaagagtgcaatactgcgagactgcctcccatttcagactagagctgcaagtttctggtatccccaagttatctgcatttctgcccaacagactacaaatttggggtctcctatgacctctcctcaaattcagtaattcactagaatggactcacagaactcaggaaagcactgtactgtcaaaggaaggaattatgattactgtcaaaggaaggaattacaacaaatttatttttaaatattctttagagacagtatctcactctgttacccaagcgagagtgcagtggtacaatcatagctcactgcagccccaaactcaccaggctcaagcgatcttcccatctcagtagctcctgagtagctgagtccacaagcacacaccatcacacctggctaatttttcctattttttgtagagatagggccttgctatgctgctgatgctggtcatgaactcctgatctggagcgatgctcctgccttgacctcccaaagtgctgggattacaggcgtgagccactgtgcatggcccaaatttagtttaaagatctcaattgggccaggcgcagtggctcacacctgtaatcccagcactttgggagactgaggcgggtggatcacgaggtcaggagatcaagaccatcctggctaacatggtgaaaccccgtctctactgaaaatacaaaaagttagccgagcgtggtggcaggcgcctgtagtcccagctattccggaggctgaggcaggagaatggcgtgaacccgggaggcagagcttgcagtgagccgagatggcgccactgcactccagcctgggcgatagagtgagactctgtctcaaaaaaaaaaaaaaaaaaaaatctcaattggctttattcatgattctagaactggcaacaaatcattccataaaatagaataagtgttcccatgggctgagcagaggggattggctttatagacagagaagggctgaagaaagcaggaacaaggaacagtagcctgctagtcgtttcaaagatacttttcttgggggacaggcagagggagggacggggaaacagaacgatggaatatcagatgagttaacatgtcatgtaaggattaaagccaagggaactgcattccatggctactgaagatttcagctggcctatttgggaaattggctgttacctcttgtgacttctcagaaggtcagataactacttagtttgggtttggtgaaggggaacttaagcatgggtgactacttttattttcagtctggtctcatggggcctaatgcaggagcttaggcccgaaacaaaggcctcctataatattaatttgacatacagttctgttgttatggacacaactcaggagtagctaaatggaagagatagtgagggcgaggggtgggagtgggacaaggagcttccagcctctcaggggtagcactcccagcacaccagtgtgctcagcagcccggaccctctcaagccttgtgttcaatagttcgtattgaggcttcattacttagatgactaatgaagattgattaaatctccagccccagaggctggcgttggggctgaaagattcaaccctctaaccatgtggttgattcctccagcaaccaggctcatcctgaagaggccacaggatggtctagggccacacgctatcaaactcagtcatggctgaaggggctcttcaagaataccagaagacactcctatcacccaggaaactctgagggtttggggagaactgtgccgggaaccagggcaaagaccgaatctgtatttttttattatgccacagtaatgggagcatattttggcagactcaagagtgattggtcgttctaatcttagttcacattggagggactttcactggccctccagattcttcctgtaagcacctgttctttaggaggatggagtaggctcctgccccgccccaccccaactgcagtgcatgtgacagtttgaaacactttgagccccacatgtgtctgtcaagatggaaataacagcctctggcatgtggtgctggtgggtgcttgtgccattgcagccctgtaggagtgaggtggacagagtcacgggtttgggttaagccctgtctcacctctcattaggcatgtcacttcggcaggccgatgatttaatgagactcacctctagccatggaaggagtctgagggtgtgcttttcttatcttcccatctccatatttatgttgtagactgtgaaggaattagcctcttggccatggtcatcctaaggatggagatgttgggctgtggtacatgataactgttcttttgtaagcctagtgaacctgtgccgctccttcttgtcctgcagttggactgattagaggggctgaggaagtgcttcacctgtgaatgtgatttcctctcacctgcgggcccagaggcatccttgcttgccaggtgctcctcaccccacccccagtagggtagcaggtgacatctcctcctgcaccccattgtgggcagagatgagccccaccctttatctgtgctttgataaagacttcaggaagaggctgggcgcagtggtgcaagcctgtaatcccagcactttgggaggctgaggcaggcggattacttgaggccaagagttcaagaccagactgggcaacgtggcgaaaccccgtctttaccaaaaaatacaaaaattagccaggtgtggtggtgcgcacctgtaatcccacctactcaggaggctgaggcacaagaattgcttgaacccgggaggcggaggttgcagtgagccgagatcatgccactgcactccagcctgggcgacagagcaagacactgtcaaaaaaaaaaaaaaaaaaaaaacttcaggaggaagtaaaaaacaaggtatcatgccaaactgcacagagaaaagcacttttctgtaatctttcaaatataaaattctgttgccagaaaaactccagcataatccctgtgacaggcctgggtcttgtctgttacaaacaagagagtgaatgtcggggtgtacttttccctgcagtttggaagcacaggtgcccactgacttggctccagggacatatttcttttggctgagaggctggggccatcgcctttaacatggtagaccctagtcaggcgcttttccagctaggactgaagggtcttccccgcatatggtttgagtcccataggaatttgaatgccaaagtagaatttccttggtaactttaaacctcttgaagccatttacaggctctggggcaggtggaggaaggggcggggaggtgggcgctctcccatcactctctgtccctgttttgattttgtgtcttccttctcttttccaatagcaatccttctggtcgaggattgtgatactcttgcctgcagcattagaggagcttccagattcttctcctcacctccatccattctatgcaccattttttcctagactgtggagctgaccctgtcacttcctgtccttcagtggcctctgggtatagacagacatggtgtgcctccctctctcagctccaacctctctgacattctctccattcgggcccgtgtcattcatttgcaaatccgccataacatccccagcagtgctgggtgcagaatcaacttttaataatctccgggaatgtgtgcactctcctgtctctgggcctctgctcaggctgtcccatcccagagtctgacctgcatttgcctagccttcatggccacacttaaggtgaccacctctgggcatcttcctggggtctattgaacagaacacatcacttcctgcccctctgctcctgaagcactttatgtcgcagtgttgtggattagagtgcccctggatgagccctgtttgtctgtgttctaaagcacaggtgccagaaggcagaacctgtgttttctctggcccctgggagagggactggcatgcagcagctgctggagaataggaactgcatcttttttatctttggatccaccacagcattttcacattgaaaagaggtcagtaggtttttttagggtggtatggccgtagaccccatccaagtactagccaggcctgaccctgcctagcttccaagatcagatgaaatcaggtgcgttcaggtgagttttgttttgttttgttttgttttgttttgttttgttttgttttgtttgagacggagtcttgctctgtcacccaggctggagtgcagtggtgtaatctcggctcactgcaagctctgcttcctgggttcacgccattctcctgcctcagcctcccgaggagatttttttaattgttcatttaaatagagttcatgccctaaaacctttgcgagaacatccttttacagatgaaagtccagatatgccatcctgtattgtagccatggtcggtataaccatgctcgtttccaaactgtcacagcacattgcatattttctctgatttgtgaaagataatatgtaaaaagtttcacaaaagcatgtgtgcacaaacatactaacagaggtttggtgttttttaatattgagtcatgtaatggggaaaaaagttgaaatcagctgtagctctgaaagctgaaatgtgtactgccatatttgtcatggttttccctgctgttctggaattcttctgtgggagcaggaacactattttatatatgcatatcttctcttcatgaatgccagagactgggttttaaactttaaaaagtctcactcatactaggtgtccattcttgctgagtgattgaattattattctacaagaagataaaggagctgttgccgcacaagctgtctggtcttttgggtgatttgtattttacaaacaaacattcatttcctgtctacatttgacctcttttccagggaggttcccctgaaggatgctaaggaatacgctgaatccataggtgccatcgtggttgagacaagtgcaaaaaatgctattaatatcgaagagctctttcaaggaatcagtaagtacctgaaattgggttttcagcccaacttgcatttttatgcttctgggagtcaaaggataacattttagaactctgaagtgaacttttcctctgtgtgaatttatcggatgccatggatacaaaatctacagctatgcagttgttaatacccacttctattatcctctcgattctagatttccatgattctgtactggaacctgttcactctgagttctgtaaattaaaatgaagtaatcctgttgcaaaaataaaatttattttaattgaaaattatgcattctgtagcattttatgttaggaggagagagaaaatagacaaggtatagaactcaaggtcacccattagatgggatgactctaggtaaactgagggaaccttccagtaactttttttgcctgatcatctcctacaaaaagtaatgtctccatcctgtttgacctgaaattgggaattggatacagggttggcgtgtacaggtaccccatgtgtctggtgagctaattagggagggtgacagcctccttcctggtcccagtgctgggtcccgttatgctcactgtatgccggctccccgggaataaccttatcaaccagagctggttcccagctaatggctctgccaacacatctatctgcagctgtgaggcttccagctcaacagatttaaccttcataagttctctggttgtgtcattctgttccggattctgccagagaagtccctgctgacagccatctgggaaaactgctctgagacaccctcaggaaagttcgaccggagcattatcagggacgttgggagaagtacaggtgtttgatgaaatactggccctgaagttcctggaatagccaccttaggaggagttgaaccccaaaacagtaattgtcctcaaatatcttagctccagacaactccagaagggaaactgatggtttgatctctttcctgcctgagatcgtttttggcagagctctcaaagtcagagaagccgtggcttcccagaacagttttgatttctgtttaactggtttgagtgcattactttagactccaagaacccacaggagggaatcttttgtttatgttggcttgatggagaattcattggagatggggaattctgacctgtcttacctacactatgcagagatatgcaaaagaaatgtgcaaaagaatggcttggagcctcccctccccagctgctggccctttccttcactggggtcttcactctcttcccttctttccaccttccctttctttcctcctttgatttcttactctcaacagaatggtttcaggctccttgccctgaatggctgaactctagcaggctggggctggaatttcatgtgggaaaccccatgtccccacattcctctcccttctccatcatggtcagtgggtgcagatgctctctggtgttgtgtcactctgggtgacatctaagtttgggctcgaactcattacattagcctcacatttcctcagattaaactcattctcttctggtggcgttaggctcttctgctatgctcagctatgaaacattttgtttttacaggtggttttaatgaatgaagctagatagctcctgaggacgattgccttagcaccttccatccttacagccccgcgtcttccgcagagccccctcctcctccttagctccctggccttggaagacccccagcacagatatcagtggtcagccaggggagcctggtgccttgtatgacctgaacttgagcttgagatctctgcaccagctgggaagctttctgaagtttatgaaagtcattgttaaaatttaaaaatatcaaataaggacctgaaagagaagaagcctgagtaggaagtactgtactaatatcttttttctttttttttctgagacagagtctttgttgctcaggctggagtgcagtagtgcaatcatagctcgctgcagcctccacctcctgggctcaagcaatcctccgacctcagccacctgggtagctgggactataggtgtgcaccaccacactcagctaaatttttggatttttagtagaatcaaggtctcgccatgttgcctaggctggtctcaatctcctgagctcaagcaatcttcccccatcggcctcccaaagtgccaggattacaggtgtgagccaccacacatggcttgtagtaataacttaaaagacatttatccagtataaatcccttcctgtgtgtgacagggactttgaacaggttaattcctcagatcttggtggtctactttatgaaaaaacaagtgctttgctcaaacatgggtaattatggtttcaaagtaattaattcctatataagccatcaaatacccatatcacctcatctttcatgtcacataaacaattgtttgtttctgttttattatactttggttgtaactgccttgacaaagaaagcttgtaaatacacagccatggcaaaacctcagtctgtccatctgtctggctatccatctgtctgtctatccatctttccctccatctgtctgtccatctgtccacttggctgtctatctgtccatctgcctgtctgtctctgtctgtccttctgtccatctgtgtgtatatccatctttctagctgtccatctgtctatccatctgtccgtctatctatctattcatctgtacatctgtctgtctagtcatctgtctatctagccatccgtctgtctgtccatctgtccatctgtccgcctgtctatctgcatgtgtaagcactggatcttttgcctcttttctccttcatgtgaatttcttcagaatggagttctgtagcctaattgcaggttaatttaaaacacaattccaagtacacctaaatatactgcagcagacttttcatttatttttcttttccctgttcctacttacattacatgtgctcctccctgagcttaaaatagaactacatattgctgacacctaggctccccaaagcaatgttccacagtcgactatgcctggagaaaaaatgcaataaaaagttaaggagctgtgaaaataaaagccctttaaaaaggtgtgtttaaacaaaatgaattcacattgactcggatgaagagatgaatgtttctcttttacagtcccatagtgttcataaaccagaaatgggacaactgtgttttctgaacattggcaaatacagtgtctaactggagactgcttacaaaaatatgttatctttttaaagactgaagctaccctgtaaaggatttaggtgctgctctgtttggggtggtctgtgcagtttgtcctcctcatataatatattgtcgtctgattggtattcctccaggcacccttttctaaatcacatttttagacctactttgtctgcctgcatgtggctaattctcttccatgcatttctacccagggtttgtttatttttttttccttgggttcttacacccaaggaagaaaagtaaaaacttgaggttacttttggtttgttctgccattttgacacttaaacatattttatctttaattgattctccaagcgtttaggtatgtgcctgttcttctagggagattgcaagttctttgggagcttgtcttttgtattacccatgaagctgagactaataaatggaatggtgctgaattcggggctttgaatttggatctccgtcctcatctcatgatataaagtgaaatgtaatcacttttctctgggaatttaaggttgaagaacagcaaattagacaagcctacttactcttgattcgtttattcacaaatatatactgtactcttttatgggtaggtgccatgctagaccctggggacagcacggtgacaaggcgcagtgacagtggagtcggggagacagctgtgggcacagtcagatcggtgtctggtgactcttggtaattggtgctgcgcggcgaaggagtggactgtgagaggttactatggggcgagggagtggctttagattgggtgaggaaggcctccccggggaaatgattttaagctggacctgaaaaacgagaaaaggccagtgggcaaagagctatcaggcagagcaaaccgcaggagccaagtcccaaggcaggaaatgtcgtggtgcttttaaggaagagcaaggagtgctgtgggaagttgtggttagagactcagcagggccttgccatgggagtaagggtgatactctgaaacaattggaagcccctcaagcttttaaagcaggagtgcagagtgtccaatttacatttacaaaaaaagatcacacttaaaaggaggaaagtctccgcatgtctcaatcagttggcatgcgattgtaataatccaggagagaagtggcttggacgagggtggaggaagtggagctggatttcagaaatcttccagaagaaccaataacactggaaggagatggggaatgaggaagacagcgttaccaagagtcatccccaagttctgtttgccggaatgaggaggattggcataggaacaagtgatctgggctggatttggttatgagcctagcatataggattctggattgtggtgaacccaagttttggtttgtagattattattatttttttatttttagagatgaggtctcgctgtattgtccaggctggtcttgaactcctgggctcaagtggtcctcccgccttggcttcccaaagtgctgggattacaggtatgtgccaccatggccagctggtttgtggattttaattacttaactcgaatatctctttaaaagtattttaacttttcctgagggcaaagagaggtggagctgcaggctcagcagaaaaatgtctggattggggtggaacccagcaaaatagctatgcattttgctccagttaatttaagtgttgactgtggcagagaaagcaggactttctcctgaaaattacacttggagacactagagacattagaccaggttttatatttgttgttagtttgagagcaaggtgagaaacatttgttttattaaggtgaatatatgggcatggcggtgtgcacctgtagtcccagctactctggagactgaggcaggaggatcacttgggcccaggagtttgaggctgcagtgagctatgactgtgccaccgccctgcagcctgggcaacagaacgagatcctatctctaaaataaataaataaataaataaataaggtaaatatatttagaggtacaagcatattggcttggaaaattggaatggggtgttaatatgaaagacaacaagttaagacttgtgggtagtgatcatgtcttgttctggaaacatttgttcacagagtgttgtgctctaggcacctttagttagtagcaggttaaagtaattttaaagcaaagcaaaaggtttgcagattttataatagtcagcaagctgtcaggtgaaggtaagtttagcagttaaggaacaaggaaaggacaaagacaaagtttgtccactttctcaccccaaaaaaagttaatttaccaaatgcaatccacttaagaaagtggacagactttcttacaccaagaaagttaatttagtgaatgtaaaataatgtcatttcggcatatgggcaagttgggtctcaaaaggcatgtcttttattccagcaattctaaagaagaaattcttcaggtgtgcaaacataataacaaggtttaatatgtacggagctctgattctgtgcttttgttgcaattgctgaaatatatacttagctcattaatgcacccttgatcctgtgaagtaggctctgttatcatccctgttttacagatgaggaaattgaggcctggagaggcttgtaactttccccagggcacacagctaataagtgagagacaggcaggcaggctccggggcacatgctcttagcttgtctatatcatgtcccattgcacagcgtggtttattgtaacattattcatgacagcagaaaacaggaaattactgaactgtccaaaagttaggaaatagtttttaagaaatcatggtacacccatataaacaagtgattcaaaaggatgacataaatctttgtttactgacataaaaagatcaatcattgaatgtgaaatggaagttacagagcagttcatataatatccttatttcacaatatatctcatatttcataatatttcataatctatttcaatatcatatttcatatatttcataatatatttcaatatcatatttcataatatatttcaatatcatatttcatatatttcataatatatttcaatatatataatgataaatattattccaagaatatatccttcttggaaggatacatatcaaaatgttaacagtggttgtttcatgatggtcagattccagggaacttaaaaaacactttattatgtaaaatttcaaacatatacacaagtgcactgaataatatagtgaaccattgtatactcaaaaccaagcttgtgccatctctatcccatcctgtgctcaccacctgtattattttgaagagaatctcagacatctaatttaatctataaatattttgtccataatttttttaaacaatgacaactatgttatcatattaataaccagaatgctgttatcatattaattactatcatcaaataaacagtcagtggtcaaatttccaaaaagttcatagttgtcataaatggtttctttgtttgcatgttaccatttgtttacatcagaatggaaataatctccacatgctgggattagttggtatgtcttttaggcctctcttaagcaatagctttccattccatctttctttttttccccttatgcaatttgtttatccaagaaattagatcagttttcctgcagagtttaagacaatatggattttgctgagttccttttttttttttcctgaatagtattccattgcatgcataaaccacaatttattaatctattcacctagcatttggattgttttcagttttgggtgataaccagtaaaggtgctatgagtattcatttacaagtctttgtgtgtgtaaatactatggattggaatggctgtcttatctggtaggtgtgtttttaactttctaagattagaatgccaaactgtcttccaagtggttttactacagtatgttaccaccaccaatgtgtgggagttccagttgctccaagtccttgtcaacgcttggtaccgtcggtttgtaaaatattaaccattcgaaaggaagtatagtggtatctcattgtgatttttgtttgcattttcctaatgactagtaatgttgagtgtcttttcatgagcttgttttcaatttgtataacttggtgaagagcctcttcaaattttacccattttgtaatgggtcgtttgtcttcttattgttgagttctaaaggttacttatatattttggatacatattttttatcagatatttgtttttcaattattttctcccaagctgtggcttgtcttcattttcttgacagtgttgtttggagaaaagaggtttttaattattgatgaagtgtagtttgtcagattttttcccttttgatttgtgctttttctgtcttataatttctaaatgttaaaataaaaaaaattaaagggatacatccatataatggaatattataagggataaaaagaaaatgagctatcaaaccataaaaaatgtggaagaaccttaaatgcatattgctgagtgaaaggagccaatctgaaaaggctacacactgtatgactccaactacatgacactctggagaagacaaaattgtggagtcagtgaaaagatcagtggttgctgtgggctgtcagggaagggatgaattggtgggtcacaggatttttagggcagtgaaactgttctgtctgatactataaaggaggatacatgttattacatgtttatcaaaacccataaaatatacagtgccaaaacggaaccctcctgtgaactatagactgactatccttaatagtaatgtcttcagcaaatgttggttcatcagttgttacaaatgttccactaaactaagatgttaaaaatgggagaaattgaagatgaggagaggaaggtatatgccaattctctatttttcactcaatttttttccataaaccaaaaactgctcaaaaaataaataaataaagtttatcaattaaaaaaagaaagagaaaggtgcctttgagtggtagggaagcctaatgattttttttaaggttttctttttttcttttcttttcttttctttttttttttttttaactttaaattccaggatacatatgcagaacatgcgggtttgttacacaggtatacatatgccatagtggtttgctgcacgtatcaacacgtcatctaggttttaagccctgcatgcattaggtatttgtcctaatgctctcgctcccccacccccaacccctcaacaggtcctggtgtgtgatgttcccctccctgtgtccatgtgttctcattgttcaactcccacttatgagtgagaacacgtggtgtttggttttctgttcctgtgttagtttgctgagaacgtggaggggaagcctaatgattttaaagtagcttaagtctctccttgttggacacctcagcattttggagcaattgtgacctcccctgattcccctcgtgcaggtgcatcaccacttctttacctccctagacttttaacttcaggctttttggtctctgtcttgactctcccgcctccaggcagttgtcacctcctgccaagcatcttccacagtttccctttccatctgtgcttcctgcttccccgtggcacacttaaggctcacctaacccctgacctgggctttccaggcctcctgacctaatgagcttcccacctgagaatccattccggtcctttatagcatgtagcgcgttcctctttatcctaatattcagggccttctagtaatcctaatattgtcttctttatggcagcaagaggacagtgatagggaataacttcaagtagcatgtgtgtgtcccccagttctgcattattagggcgatgttccatgatcgtgagtcattgctgtgttccagagaccccctctctacatggctagaggctaaaggtcattatcaagagtgaatactgccaagtcctagcaaacttggtcaagttactcatctagatgattcagaaaatcaaatcaagaaatggatgttacacagcaactgccagcattgctaacaccaaacaaaagataaccaagccaagtaaatactggaactggaatgaaaggagagaagaattacatacagtggaatggttagcgggagaatcagcgcttgcgcaggaaatggctggtccacggggaaagggaacagccccagctaagcttgctgttttatttttgttgtgtgtaaatgcatgacagcccagttccgagccaggataaaacttacaggctaggaatttgttttcacatactgtgttcctgtggaatcatttctaaaacctgcgtttcctctagactgtcaactttcaggaaaactgaacttaaaaaaaaaaaagtcttttaaacttctcctagacagcatcttacaaaatccaaaccctattaaaataaacactctggcctcaaatttatgctcaaggacaacttgttctggaggctgactacttagagcacattttgtaagagtggaaacctacagactaggctcagagccttttcagatgtttttgtatatatttttgtcctgctctatgcctgtgtaaataatactgattcaacagagttccaaggtgatcaccttggtacagaaagccatggccattttccaaaaccatgcctttgtgtaagtgccttgaaccttccggtaaattctgaataccttaggccctaagatcggggtttgcgttcggcgtttgctttcttgttttgcgttctggtttcctggtgcaggctcccttctccttttaaaggtgccggcctcattgttatgatctggcttttctctttctctgcgtggaagcatttccttctccctgtgtttaaggttggcatgtgtgtgacttatcccaggctgagagttttgtagatgagatgggtcccggtccactaactgaaccctgagaattgaccgtgaccatgaatcacacagcatttctccccgccatgcaaaacccatgagccgtgcccagaagccctcaactgctggggactccctccatcatcatttgttcctccccttttagtgacggctgtgtgtgttcctttcccacattcgttctataggtgaacaaaggaaggctcggaggttttaaataactggtccaagttcattgaactggaatgctgactctctcacatctcaaaactcttcctaccaaaggagaaaaatgaagtctgagaaatattttactctaataagtgaaattttgaatattctgaagataaaagaacctggcactcctaagaagccatgttcaacagctgattcaagagtgctgctaagagttcaaaacatgcaggaggggagtcttcttgagacagagccaggccttcctcaattttgcattctgtgcatcagtgctcattgttgactggggagagaaatgagaagcagcaaagaggaaggaggtggcggaaagcggggaaaggtgtggacagaccttcctggcatcctactttgctatctgtacgctcttcctttctagattttcattatacttttgtcactttaataactgtcttacatataaactttttctttaatttgtgtactttccaaagcaaaaaacttatgaaaacaagacatgagggaaataaagtcatggagggctaaaaagctaatgctgttctgctaacattaggattagcataaggacagcacaaagttttgatgttaacatagaatttgattttgatacagtgaaaaatgctaaaatgtcaactccttttactgataagtaaacagctcttggctaactagggcaacagctgtacccatgagaattatagtactgtccaaaaatatttcaggtgcaaaagcaaaagtcctgattgcagtgtgtaacacactcaggaggctcctgaaatattactaacttcaataatgatgtaactcgacactgtcacccctttctcttcaggagtaagtaactctttattggcaagatctgacttggctagatctttaaagagtactggtagtcattggagacttccttctctatttatcacttaaggttgaccaagtagaagaggcattttgtttactcccttttaattgtgataaatttaaaagaatagcatgtccagaaaaggaaaattcatacttatggtctcctttcctcctggattgggactgaagtttttggagatgtcctgcaaaagctctgtagatctctgttggctacacaaaatggcaaaagccacagctgcagaaattgttgcaaacttttcatttgcttcatcatcaaatgaagatctctactattacttttgagtttggagttaaatgctggtgaccttcatctttatgctgaagctttggtgactgtctataccatctgatctacacaatgtattattacctttgaaatcaactctttttgtcccttgtggaaatgcacctctgctggggtgttttggtgctctatattgtcattaggtaacacccacttgcattaaaagactttgtcagggcccagcgcatagtcagtattccgtgctatcagtgtgtgttcagattctcctcttactggttttcttagactgtactgttttctaagcaaatgcccatgtgtgatttttaagatgtgctggggaaaaataaatcaataccacaaccaaaaaaaaaaaagactttgtctttagaaccaatttcccttccacttctaattactggttccttagcaaatgaatacactaactagccaataatatagatagatagatagatagatagatagatagatagatagatagatgatagatagatagatagatagatagatagatagatagatagatatagatattcattttagcctaggcctggtggctcatacctgtaatctcagcactttaggagaccaaggtgagaggatcacttgaggccaggagtttgagaccagcctgggcaacatagcaagaccctatctctacaaaaaaaaaaaaaaatttatcggggcatggtggcgcacacctatagtcccagctactcagaaggttgaggtgggaggatccctttagccccggaattcgaggttgcagtaagccatgatcaagccactgcacttcagcctgggtgacagagtgagaccctgtctcaagaataaaacaaaatcctcattttagagctagtgtttcatgcctttttcaaggggcatagaaaagtagcaaagagacctaatgtggttcagtgggaagagcacaggccttgcgacccatcaggaagtcaaggtgtagattataatcaaagcaccagctgtactactgcctgttattgatgggaccttcagcaaagtgctcaagttctcgagtcacagtgaaatggtgataataacgaccattacatcaaattcacagggcgaggtgaggatggtgtttgtgaaaatctttgaaaactgggagctactaaggttatttccagattccattgccttttttcagaaaacaactttattgagataaaattcacataccatacatttcacccatttcaaatgtacaattcggtggtgttggtatattcacagatctgtgcagccatcagcacagtcaattttagaaaaatcacctcataaagaaacccataccctttagctgtcatctccctggccccttccattgcctgtttaattttgattttgtgtttatttatagagactttctgataatttttaaaattaagttaagtaaaaataagattacttgtggatgacattaaaatactgtttcctatgaaaagtgtctctgtagggctttccagttaatgatctaaatgcattggcaggatgagggatgatgagctaagtgttaataaatgacactgctaggaagattacaattcaaatctatttctattttgagaagcagaaaagatggatgagtactcactgttactgttgaagtcacggtaccatgaaagccgctcattaaaccaggatgggtctctgggaaggcagggagagggaagagcgcgctgatgagcggaggctggatgggagctgcccccaggagtggatcttcctagcccaggaattccacaccaccaggaaactgctggactgttccttacctgaacttcctaagcccatgaattgggcttcatgcagcagaactagggaggaaaggataggaagaaggaagggaggaaggaaaggaaggaaggagaaaggagcccctccaggaacacctttattttgtgcacagcccaaagcaggagtgttgaagcagggtgaaaatctgtgtgtgcagtgttggctgtaggaaagggaactcacccttggcctcctttttgttgcaggccgccagatcccacccttggacccccatgaaaatggaaacaatggaacaatcaaagttgagaagccaaccatgcaagccagccgccggtgctgttgacccaagggccgtggtccacggtacttgaagaagccagagcccacatcctgtgcactgctgaaggaccctacgctcggtggcctggcacctcactttgagaagagtgagcacactggctttgcatcctggaagacctgcagggggcggggcaggaaatgtacctgaaaaggattttagaaaaccctgggaaaacccaccacaccaccacaaaatggcctttagtgtatgaaatgcacatggaggggatgtagttgcatttttgctaaaaaaaaaaaaaaacctttaaaaattgttggatgtgtacaaaagtcttactgccttattatgtgtatgggattctaaagtggcattccacttggatttcctgtgctacctatccaaattccagtaactacttcagtgtcattgcctttgttacctaaccaaccttcactgaaaggcaaatttagttcaggaggttagtttttagctagctttggaagtaagcctttatttattactttttggaggaaatcagagaagtgtcaatggaccgtcactcagactgagacttgagttattacagaagccaggaaaagtgtattagaaactgttgtctacaccacttttaattggtgaacaatttttctaagttatggtcatatatacccaaacaaaccaaatcaaactaaattactgcatataattttgggattgggtggcctagtttgaaagagtgatttaagtaatcactatgtaagtggtgagagatgcaggacatacacattattcaagagaccacctgacatgcatctcctccgcaggaatacattcgtcctctcttagagaagtttaacgcacatagtattattttactaagagaatatctcttggtgtcatatctaggggaagagaattaactagaattaaatttaatgtttgaatctaaatcattgggcaaacttctaataataacaattaataataggttacaggaaagccagccagaggaagtgtcagcactttaaaattctagaccccaaaaaactacaaaatcagaaaaagtatttttatgtttctagcttgaggagaagggctttagggctaaccagaggtctgaccctagaatgccaaggaactgagaatgggctccgatgaaaaccttccttttcagattccctgtctgctcaattaaagatgtttgaatccaaaggaagtcaaggaagaaaaagcatggaaaggaagagaactgattcctactgaaaattcaaattctattaccattctaactttcataaaaagttgggatcaagaagcagctgatttcctgccagggcttatattagggggtgattcttaaaggacattaggattggtgctcagaaatggttaatcatgctgtgtgctagccagggccagctggtaccttctttgccatgagcattcaagggacggctaacctttattgacaatctatatcgcaaaagtcaggaaagaggttgtgagctgattggattaaagacctggcacttcagtaactcagcacgcttccacttcactcaacttaagagagttcattgacagtgttaggatgtgaaggctgggaaacacttattttgcttcaagagttccacttggctctcccaaataggtacctcaaaaactgttagcaagcggcatttggatgtcttgacaggggctttgcagggatttttagggttttttccacattgtccacattaatggttggcatgattgtgcttgcaggccaagaaatgatcataccccttgccaaaggtaaaaaaaaaaaaaaaaaaatgagttgaaaattgaagtgacctctttccagctgagttgcaggcttattttgtaacctttcctcatccagttttccctgagaacctgggtttatctctagatagctgttcaggttttttagctgaggggtaagtatcctagctgagagttttgcatctttgggctgggtttgcagtggttgtgttttgcataaaatgtctagtctttgccacagatagtgagctacccactaatgagcccatggttttatttcagaagcacatgagggtgtgaaaccactctgttacctttctgtattgtcttagctattcaagccagtcagaggataatatatatattctcatcagcactcagagtagtcagtgaagagagtagatcacacttgggcacaccaggattcacataaacattgtatcttctctgtggatgctcaggccttgtctacaatgaggctttacaaccttcctttgttttggctcgggattacttcctggctgtctaataattgaaccataaccatgtaatattatgtaaaggcctggaaattactgttgctaaaaaaagtcatgtagtttcatgtagtgtagcatccttggcatcgttttccaaaatttgttccttctcccttttttttttctttcgtgtgtggcatgagtgtgtatctgtgtaaatatgattgtatatgtgttactccgatatgtaatccatttcactggctgagtttggcccctagccatgtgttaatataaagtaggcatggcttcccaatggaaatctctgagaatgacagtggagttgtgcaagcattttacattgccacataattgacttgccattttatggttaaaaacggcacattaggcagttgaatatgacgttaccttgcagactaaaaggttgaaggcccgaaactaacttttagctaacaataagggctgtgccccaatggaaactgagttcattttctgagaaaggtttggatgactgaaatatttcctctacagtcaaggactttggcatgtggtggctgaaactgagcttttttgtgtgggctccagttctcactgttctgcaatgctcatggcaagttgaatggtgagctagcttataaattaaagagctctgaactgtattcagaccgactgggtatctagcttactgttttaacatcattgttgaaaccagaccctgtagtccagtggtgctgccctgttgtgcaaactgctcctttttctcgtgtttttgtaaagagcttccatctgggctggacccagttcttgcacatacaagacaccgctgcagtcagctaggacctttccgccatgtattctattctgtagtaaagcatttccatcaacaatgcctaattgtatctgttatttttggtttaacacacactgattcatactaataaatattttcagttttaccgtt

SEQ ID NO: 54 - DNA, 3202 bp, Homo sapiens
aaaaaaatttggcatctcttcccccctcaagtttctggtgtcacttatgaaacacaggtccttgttgctgcagagaagcagttgttttgctggaaggagggagtgcgcgggctgccccgggctcctccctgccgcctcctctcagtggatggttccaggcaccctgtctggggcagggagggcacaggcctgcacatcgaaggtggggtgggaccaggctgcccctcgccccagcatccaagtcctcccttgggcgcccgtggccctgcagactctcagggctaaggtcctctgttgctttttggttccaccttagaagaggctccgcttgactaagagtagcttgaaggtaagccagtggggaggagggctccagggccagcggcgggagcgggaggcctgttggacataggggctggttccctcttggtccatccctgctggtctgaggtgcgtgggacaatccctagcttggagccgtccagggggcatctgcttcttccacaacccacaactgaggccccagaaatcccagctgcgtttgggctgagcctctggcctcacccaagtcagctgagaggtcctggcgggggtttatttaggcagctgcctggctaagtttgaacagaacaggccacgggtgtgattccacagaaaaggcctggtgtctgctgcggtcatggccggaggagcgggagagggcgggtggagtggatgggggtggtgtgcactgcacaaggggcctcgtctgggccaaggcaaagcatacctatggggggctccggtgggagggactgcggccaggatgtgggagggcagggggaggttctgcaaagtgctgggggaggggggtggctggaaaacagatttcaagtcataaagtcagctaggaacaggccgaggcagggagaactctccactcggaggaggagctggggtcctcttccatcccgtcttcatcctgcctggctgcgtgacctcgggcaagtctccgcccttctcttggcctcagtttctccttccgtaggatgggggcggtgggctaggtggtgttgggatttagctgggttatgtgggacagggcctcctgatgggaaagagctctggctgggcttgtgggaggaatgagtccctttggcaggttctcgggatcccctgggtgacatgcctttctctgcaggaggcaccatgcaggagctgcatctgctctggtgggcgcttctcctgggcctggctcaggcctgccctgagccctgcgactgtggggaaaagtatggcttccagatcgccgactgtgcctaccgcgacctagaatccgtgccgcctggcttcccggccaatgtgactacactgagcctgtcagccaaccggctgccaggcttgccggagggtgccttcagggaggtgcccctgctgcagtcgctgtggctggcacacaatgagatccgcacggtggccgccggagccctggcctctctgagccatctcaagagcctggacctcagccacaatctcatctctgactttgcctggagcgacctgcacaacctcagtgccctccaattgctcaagatggacagcaacgagctgaccttcatcccccgcgacgccttccgcagcctccgtgctctgcgctcgctgcaactcaaccacaaccgcttgcacacattggccgagggcaccttcaccccgctcaccgcgctgtcccacctgcagatcaacgagaaccccttcgactgcacctgcggcatcgtgtggctcaagacatgggccctgaccacggccgtgtccatcccggagcaggacaacatcgcctgcacctcaccccatgtgctcaagggtacgccgctgagccgcctgccgccactgccatgctcggcgccctcagtgcagctcagctaccaacccagccaggatggtgccgagctgcggcctggttttgtgctggcactgcactgtgatgtggacgggcagccggcccctcagcttcactggcacatccagatacccagtggcattgtggagatcaccagccccaacgtgggcactgatgggcgtgccctgcctggcacccctgtggccagctcccagccgcgcttccaggcctttgccaatggcagcctgcttatccccgactttggcaagctggaggaaggcacctacagctgcctggccaccaatgagctgggcagtgctgagagctcagtggacgtggcactggccacgcccggtgagggtggtgaggacacactggggcgcaggttccatggcaaagcggttgagggaaagggctgctatacggttgacaacgaggtgcagccatcagggccggaggacaatgtggtcatcatctacctcagccgtgctgggaaccctgaggctgcagtcgcagaaggggtccctgggcagctgcccccaggcctgctcctgctgggccaaagcctcctcctcttcttcttcctcacctccttctagccccacccagggcttccctaactcctccccttgcccctaccaatgcccctttaagtgctgcaggggtctggggttggcaactcctgaggcctgcatgggtgacttcacattttcctacctctccttctaatctcttctagagcacctgctatccccaacttctagacctgctccaaactagtgactaggatagaatttgatcccctaactcactgtctgcggtgctcattgctgctaacagcattgcctgtgctctcctctcaggggcagcatgctaacggggcgacgtcctaatccaactgggagaagcctcagtggtggaattccaggcactgtgactgtcaagctggcaagggccaggattgggggaatggagctggggcttagctgggaggtggtctgaagcagacagggaatgggagaggaggatgggaagtagacagtggctggtatggctctgaggctccctggggcctgctcaagctcctcctgctccttgctgttttctgatgatttgggggcttgggagtccctttgtcctcatctgagactgaaatgtggggatccaggatggccttccttcctcttacccttcctccctcagcctgcaacctctatcctggaacctgtcctccctttctccccaactatgcatctgttgtctgctcctctgcaaaggccagccagcttgggagcagcagagaaataaacagcatttctgatgccc

SEQ ID NO: 55 - DNA, 69504 bp, Homo sapiens
tttgccagcaggcgatggaatagggactacgagacaccctgcagcctctcctgggaggacaacgccccttctccctctccatgcactcttgaggcagcaaagaggaggcatctggacgcgtttacctcctccccacccccacagcttggccctcactaaactatcttgtgtccttcctcctgctatgattgattcgcccaggaaggtggggcttcatctttacctttcaaatataattctttagttctcctaattacaaggtggggggtggggggtgggggtggggtgaggcggggggtacaaaacaaaacaaaactccatgaagcaacttagaaagcacgaccgcaaaggccctccatcatccccacccagaggtgaggacaaggtctgggggtgctgggtggcttcagaccttccacgggtccaagctatctgcttcaagagggcatcgaaaggtaactcatagacttaccgcccccgccccccgacttttgcaggagggagcgctctcccctcctctgggaggctggagactcggggacagaagatgcgctggagggaagagaacggagcgtcggacaccagaaaaactttgggggattcggggtgagaaagaaggcgtgaagagagaagggaggctcagcaggggaggaggggcgggggcgggggcgggagcgggaggagtcactgcgccgcggccgcccctccccgccctccactcggcggccccgggtcttcctccccctcctcctccccctcctcctccccctcctcttcctccgcctcctggtgtggctggctgcggccagaatcggagccccaaccgcgctgccggtgagtgaccagccccaggggacagagacgggaggcctgggaccccccctctccagggtggggcctcccgccgtgtctgggaaagtttgcgggcgccccgggacgcgggcatctccagggccgctcggcgcctccccatctccccgcgcccgccctggccgcccccaggggcgccctggggcccgcagagggatggcctcccggcagggactcctcggctcccctctgttctgagactgctgctgggaccggggtccgactctaaagagaaaactcaaacagcaaaaaaaggaatatcgactcagttccgagggcgggggccggggctcgttctcacccgcgcgcggcccctcgacctctcggacccgggccaccagctctgcgcccctcacgcctccctcggggtctctgtgtctctctcccgctcccggactccctcctccttctgactgctgttatttgggctgttgtccctccccgctccctggtacctcagctcggaccttagcctgtgcctgcagcccggagtcccctcctgccctggaaggcaaggagccaggccacggggccacagccgcgggggccaccacactggcccaaatatttcctgcaggtatgaccattcactgggtattggggttgggtcccttggacccacaaactgaacctcgtgggtacagggaaaaattaaaatatattcctccttaggattgtactgcttctgttggtttggcatctttttatttttaacccttctaactgtgctttcttcgaataataatgatacttcatgtaattagcgtttctaatatctaaagacagaagaaggaagaaaataaacggaagagagagaatgcttgctaaaaatactcatttttgacttcagtccacactcgactgttttcctgggagatagaagttcagtgtagcttgttttcagactaaccgcaaacacgattacagcctcctccaggctagaagttttaatttgcctgacatgcagcacactgtttgttggtattcccagcctggcattcccgtctgcatagctctagtctccctcccaactcccccacccccactttctttctcataaaagggagctgtgaaaacaaggcaatgggagaggctcaaacgagctggaccacataataaaaacagccctacttattttaatcctgaggctatggactcccctggactctgattgggtggaagaattgtttagttcatttgtgtggtttttctgtcagtagttattatggttgaatcagtgtttccatgacagtcttgcttctgtgggcacgatggggagcctgttaattctcggatgggtctggacagatcaagtctggagtctggagagatttttcagggcttgacctgggctgatattgcaaacctctgcacactcactcagaaccagagcagccgggagcagcctgagctggggttttcttccacatgatctgggaagaaaaagctctaccaaggagcgaactgtgtgagcatggttgctgggggatgttgaatgttttacgtttttaggaagaacacacttctcaaaactttagccattcctgtttccatacaaacaataaatgtggttgtaacaaatgtagtagatcagattctgaacaaccccttaaaaaacaggtccaagtattgaaccatttggaaataaagattttattttatttgaattctactggaaataaaagagtttatgttaaaaaggatgtaattcacttctctccactgatgcagtttgacagttccccattggtatgaatcagttaggttttattgtggtctcaaaacatcattaaggcagggcacaacatcattaaggcagggcacggggttcatgcctataatcccagcattttgggaggccggggcgggcagatcacttgaggtcaggagttcgagaccagcctggccaacctgatgaaaccccgtctctattaaaaatacaaaagctagctgggccaggtggcgggaacctgtaattcccagctacttgggaggttgaggcggaagaatcgtttgaacctgggaggcggaggttgcagtgagccgagattacaccactgcactccatcctgggcgacacagcaagactctgtctaaataaataaataaataaataaataaataaataaataaataattgataggcaagtgttgtgactgtgacttccattcaaaaagtaagtccaaaaaaaaaaaaaaacaacaaaagtaagtccataaattctgagcttgtttggccctgttgcttagaaaaacaatgtactgtgctcagataaaaatcttcagtctcttcctcttcctgagaatttttaatagtgcatttaatatcctgtaagtcaaccttatactgtttacagaaaagttgcctttctgccttgtccagcttttgcactatctcatgaaatattgttagactggatggtttgccacgggtacaagagtctgcccagcagcccgaggagaggctggggttgtaatgaaggccacgggggcctggacctaaggagcaggtggtctggatggtgagatgaaggctacatccccagacagccacagaaagcagccactgatcacctggacaggtcagatgagttggaaatatcaatacatgaagtgtgggaccagtggagagcaaggaaggcagaggtggttaagaagcaaaatgatacaaataaataaaaaaggaaaaggccaggcacagtggctcatgcctgtgaagtgctaggtgtggtgattcatgcctgtaaccctagcactgtgggaagtggaggccagaggatcacttgaggctaggagttaagaccagactgggcaacaaagtgagaccccatctcttaaaaaaaaagatgggccgggcgcggtggcttccgcttgtaatcccagcacttggggaggccaaggcaggcagatcatgaagtcaggagttccagaccagcctggccaacatagtgaaaccccgtctctactaaaaacacaaaaattaggtgggcatggtggcgggcacctataatcccacctactcgggaggctgaggcaggagaatcacttgaacctgggaggcggaggttgcagtgagccgactgcaccactgcacttcagcctgggcgacagagcgagactccgtctcagaaaagaaaagaaaaaaaaagatgtaggccaggttcagtggctcatacctgtaatcccaacattttgggaggccacggcaggtggatcgcctgaggtcagaagttcgataccagcctggccaacatgatgaaaacctgtctctactaaaaatatagaaaattagctgggtgtggtggcaggcacctataatgtcagctactcgggaggctgaagcaggttgcagggagccaagattgtgccactgcactggagcctgggcaacaagagcaaaactccgtctcaaaaaaaaaaaaaaaaaaaagagataaaagatgtaaaataacccaaaggaatactctgtgaccttttaaaatcatgttgtataagaatgttgaattacacaggactttttttttttttttttttgagacaaagttttgctctcgttgcccaggctggagtgcaatggcgtgatctcagcttatcgcaacctccacctcctgggttcaagcgattctcctgcctcagccacccgagtacctgggattacaggcatgtgccaccatgcctggctaattttgtatttttagtagagatggggtttctccatgttggtcaggctggtttcgaactcctgatctcaggtgatccgccagcctcagcctcccaaagtgtcaggattataggtgtgagccactgtgcctggcctggggttaatttttgaaagcaagttataaaatggaaagcactataattttactctttgaaaatacatcgagaaaatactggaattatgtgcatcaaaatggatggtgagagtatagctgtttttaaattttctttgtacttgtatttctcaacttttatagtaataatagctaacatttactgagaactaagcacttacatatggtattttattcgaaaactctttgaggtaaatattactattattttcattatggagtttcagaaactagaaccagaagggtaactcatccatggtcacacagccactaagtgctggaatcaagtgttgaattcaggtcggtggctaaagtctatgcatctctgtcactactgtctaccatctccctgcacatgtattattattattttaattataaggaataagtagaaaaggaaagggaaaatgtttcatgctttagtaagaactgatgggcacagtggctcatgcctataatctcagcactttgggaggctgaggtggaaggatcacttgagcccaggggttgaagactaagtggcacaaattagtcaggcatggttgcacatgcctgagtcccaagtactcaggaggctgagctgggaggatcacctgagcctaggagatggaggcttcagtgagctatgtcacgctactgcactccagcctcggcaacagagcgagaccctgtctcctaagagggggtgaggagggagaaaaacaaaaacaaaaacacactgatacgtaaaatggaaaatgcctcccatctcttccagctccgccagtcacttctctttagaagtctttggtaactgctccagatttagaggtagctcaccccttccttgcaaaccagctccactcacaagaagaatcccgaattccatggaggcttcctggccagcctggaattccaggtaccttatgggattctggagcagtcctcagtacagggcaagatttttaaagtagatcaggcaaattatgtcttcagagctctgcagattacagggtgtcatcattctttgcagcgtcaggagagtgtgataggtagaaagacccagggaaagcaccgaggctcaaatgtacctgtgtgttacatggaatgccaggggaaataaagggtttaccatggaataagaaagagaaaaaaaaaacctcattgctggatgcttattactatgaacacacaacaataaattatctttcgaaagcttgcctatgtgggtgatcccatgcattggtgagtttgactgattgggtgaggtggaaatatttagtgtgagtgattctggggagagctctgggaaaaaatgcccacatcctgtactaccatgtcccctcacaggcaagcagctcctgggatcactcatccattctctttgtggaaggtaccttgagatccccagaaggatcagcattcttagagcccctggcccatcacataacaaacatgccttaagaagaaggctttcagctgggcgcagtggctcatgcctgtaatctcagcactttgggaggccgacgtggggggatcacctgaggtcaggacaagaagtctgatcacaaatgattgtcattttattataatctgccttctccctggtagcttttaaaattttctctaaaatgttccacaggtatgtctaggtatggatttagaaaattttatcctacccagcagtcagtgagcatttgtgattacacaaatttgtgtagctgggcacggtggttcatgcctgtaatcccagcactttgggaggctgaggcgggctgatcgcttgagctcaggagtttgagaacagcctgggcaacaaggatgagaccctgcctctacaaaaaatataaaaattagctgggcatggtggtgtgccctgtggtcccagctacttgggaggctgagatgggaggatcacttgagctggggaggcagaggttccaatgagctgagatcaggccactgcactccagcctgggtgacagagcgacactctgtctcaaaaaataaatcaaaaaacctaaaaaccaaatttgtgaggatttgtgattacccagtgagctgtgtgaccttgggcaagttgccaagttctctcagtctcctcatctatgaaatataaataatgatagtatctattacaaagatactgtgaagagatagtgcatgaaaatgtcagaatacgccaggtgtggtggctcacgcttgtaatcccagcactttgggaggccaaggtgggcagatcacctgaggttaaaagttcgagaccagcctggccaacatggtaaaaccccatctttactaaaaatacaaaaattagccgagtgtggtggtgggtgcctataatcccagctactcgggaggttgatgcaggagaatagcttgaacctgggaggcggaggttgcagtgagctgagatcgtgccattgcactccagcctgggtgacagagtgagatgccatcttaaaaaaaaaaaaaaaaaaaaaaaagttagaatagtacctgctatataaggaagaacgcaaaaattgttagctattattacttttttattttttcagaatttctgggccatcttggatttgaccaatttatataaacgttagtttgtctagttgcacacacacagaaaatcctgttgagattctctttgaaattgcattcaattaatactgacatctttacagtgctggcttttcctatcttctccttttattcaggtgaatgattactggtgatttcccctataaatgtcttctacaacttttgctgtatttatatcttatagatttggttgatattttaaacaatatcttttgtcctagtatattctctagtttacttgctggcccatagaaagaaacattgctgatttttgaattttgtttttttacccagcatcccagctgattctcttattagttctaatagtctgcatatagataattcttgaattttctatatagacaatcataaaacaacgataatttatcttttccatttctgtgactcctacatctttttcttaccatactgcattggggtagatggtccagtacagtgttcaatagaactgtgatgacaggcacccttgccttgtcttcttactgtctttaactttaactgctcttaaagtttctccattaagcgtgaagtttgcttaaggtttcagtagatagtctttattaaactaagaactttgctctattcttaatattttttaacaaggtaaaaattatatcatgacagtatatattttacttaatgctttaatgtctttttcataactatatgagatgatcattttttcttgatattacattgtgataagatgagcgtattaattgtgttgaaacatgtacataaatatacatatacaggtatattattctgtagggtatcggttgctagtattttactttggatttttgcaaatgttcataagtgaagttgttctagaattttctttttaaaatattggtctggctgggtgtggtggctcatgcctgtaattccagccctttgggaggccgaggcgagctgatcaactgaggtcaggagttcaagaccagcctggccaacatggcgaaaccctatctctactaaaaatgccaaaaattagctgggcgtggtgacatgcacctgtaatcccagctactcgggaggctgaggcacgaaaatcacttgaacccgggaggtggagattgcagtgtgctgagattgcaccactgccctccagactgggcgacagagcaagacttcatctcaaaaaaaaaaaaagaaaaaaaaaggaaaaaaaaaggaaattgttcttatattgtttggtatcaagcttgtattggccctataaagtaatcataagtatatgtctttctttatcttttttttttcgagacagagtcttcctgtttcccaggctagagtgcggtggcatgatcttggctcactgcaacctccgactcccgggttcaagcaattctcctgcctcagcctccttagtagctgggattacaggcacgcgccaccacgtgggcccagctaattttttgtatttttagtagagatggaatttcaccgtgttagccaggatggtcttgaactcctgctctcatgatatcccctcctcggcctcccaaagtgctgggattacaggcatgagccaccgtgcctggctggcatatatgtttttcttaactagtttgtaagagataaagattatctgtttcttaaaatttggtaaaactcattacgaaatcatctgaaccacttataaagggcatatgggtcaagtttttggtgattcagtttcataaatgattagtgatgaatttaggctttctattccttcttgattcagttttgataatttagtttagatgatccattcatgtgttcttgggcttcttagcatagttattcgtaattttctcttagggttttataaatattgcctctatcttttttgttttttaatttttttattacctttcctatggtgctgagaatctagcttatatttcttatttatttatttaagacagagtctcactctgttgcccaggctggagtgagtcatgcgatctcggctcactgcaacctctacttccagggttcaaacaattctgttgcctcagcctcccgagttgctgggattacaggtgtgcgccaccacacccagctattttttttttttttttttttttttttatattttctgtagagatgcagttttgccatgttggccaggctggtctcgaacttctggcctcaagtgatccgcctgccgcggcctcccaaaatacttggattatagggatgagccactgctctcggcctatttattgattttttagagatgggatcttgctgtgtcacccactgctggagtgcagcggcaccatcatagctcactgcagcctcaaactcctgggctcaagctatcctcttgcctcagcctccctagtagctgagactacaggtgcgcaccactatgcccagcaaagttttgtattttttgtagagatggggtcttgctatgttgaccagactggtctgaaactcctgtcctcaggtgatcctcttgcctcagtctttgaaagtgttgggattacaggcatgagccaccactccttgccctttttttattcttaatattgtttatttgtgccaactctctttttctttattaatatagatgtctactacttaatcttttcaaataaacagcttgttcttatctatatttttgtttttcattatttttacctttatctacatttcttctgtttctagctacttgaattcatgcctagcttactttttgtttttcagtaaatttatttaaatctataaatttacctctaaatactgctttagctacatcatgcaagttttaacccatgtgtggtgttatgatatatgttttcttttttgagatgggatggagtctcgctctgtcacccaggctggagtgcagtggtgtgatcttggctcactgcaacctctgcctcctgggttcaagcgatcttcctgcctcagcctcctcagtagctgggactacaggggcatgccagcacaccaggctaatttttgtatttttagtagaaactaaagttcctgggctcaaacgatcaatgggcctcagctttctaaagtgctgggattacaggcgtgagccactgtatacatttaaccttatttcttgcatgtactacacgcctgatttcaaattttataggccactcattttctactctttgcccaagcagatgacaaggtttctggctgttttctcaggttagtaaatgatgttcctctagacctatttcacatatggagcagctttttatgacctccagctttttgtaagtgcctcactaacagctcatggtgtaaggtgaccatctcctggaccccctcactgcatgtatggtcattaaagccccagctcgcaggtatttaggcctcttgctgcggtggatttctctatgagccccttggcctcagcttccatacattgacctaacttccacttccctctgtttctggtacctggagatttctactttatctaggttttagatgatatttttgttatcatatttttgttcagtgttttgaagtgtttggatgggaggatgtggtgttatgatatatactagtttttatccatggttcctggctcataacaccccacagcccttgttacagtttttgttgttataatactgggtgtgttaggcctcagaggcagccctctgaccttctgccctcctttcacttaccccaaggcaggactctaatgttccgcctgtgagagtgttgatgcacccaatgccctggaggaaggaatgctgacattgtgaagcttccataaaaacccaggaggaccgggttgatggagcttctgaatagctgaacacagggaggttcctggaggatggtgcacccaggcagagcatggaagggctgtgcccctttcctcatactgccctacacatccgcttatctgtatctttcgcagtattctttatagtaaaccagtaaacctaagtaactttccctgagttctgtgagctgctccagcaaattcgctgaacccaaagacggcgctcttgagcctcaacttgaagtgggtcagtcagaagttcctgaggctcagacttgtgactggcatgtggggaggggcagtcttgggaactagccctcagcctatgggatctgacactatctcagagtagatagttcattagaggacacccagctggtgtctgttgcttggtgtatttggaaaaagcccccacacatttggtcacaagaagtcttctgtgttggtgattattatggtgtgagagtggaggaaaaacatggttagagagtttttcctatacagagggatatttctacccaatccgtcatactgactgaggttcttaactcctaattaacttaattaaattaactcctaatttaaaagtttattttgggccgggcacagtggctcacgcctgtaatcccagaactttgggaggctgaggcgggcagatagcttgaggttggggagttcaagaccagcctggccaacatggtgaaaccctgtctctactaaaaatacaaaaattagctgggcatggtgttgtatgactataatcccagcactcaggaggctgaggcaggacagtcacttgaacctaagctggggcggaggttgaagtgagctgagatcctgctactgcatcccagcctgggagacagtgtgagactccatctcaaaaaaaaaaaattattttcttatatgtaaaatagaatacagcgaagtcggccgggtgcagtggctcacacctgtaatcccagcactctgggaggctgaggcaggcggatcacttgacatcaagagttcaaaaccagcctgaccaacatggtgaaaccccatctctactaaaaaaaaaaaaaaaaaaaaatacaaaattagtcgggcatggtggtgcacgcctgtagtcccagctacttgggaggctgaggcaggagaatcacttgaacctaggagatggaggttatagtgagccgagattgcaccattgcactccatcctgggtgacaagagtgaaacttcgtctcaaaaaaaaaaaaaaaaaaaaaaaaccacacaaaaaaacagaatacagcaaagtaaatacatgtacattggctcctgcatgtgaaatctcctgctactaagagaatgcgggagagaagaggtctgaataaataataccgtgtgccactgccaccatctggaaccctgcacgcttactgcggtgtctcactctcatctggccaatgttttcagtccagaaaagatctgaatttcccaaccatgctgctccagtccctaaatgctgtcctttagattctctatagtagatcaaaacctcatgctcaactagcatcttaactcacatctatgttgaaaagaaaaaacatgtggaaaagttcctgttgtccttggatatgaagacgatgttctgtttctgctgggcatgcatgtgtacgtgtgtctctaacagtgcagaggtttacagtgagcaattgattctttacttgtggctgattccatctctgggaatgttgatccatatcagtggagcctatttataatgctgaaagcagtctacacaaagatattttccccatagtcattggccttctcctctggcccttttaagagctttatcagtgtccttctatcagtgacaatgggaaagaaatgggctttggagtcaagcagatctgggtttgaatctaagctttgccactaattagatatgtggcctttggcaagttacttaacacctctgagtctaaattgtcttctttataaaacagtaataacaaaatccacctcaaaaggttgttctgaagatcaagtgagataactggaaataatataaccttattataagcattatgttaatgctcacaaatgttagtttcctcccattatctccactctcctattcttattctttcaaagtagaattgtgcttcaggaggtctaatcaggctaggcatggtggctcaagcctataattccagcactttgggaggccgaggtgggtggatcacttgaggccaggagctcaagaccagcctggccaacatggcaaaaccccatctctacaaaaatacaaaaattagccagacgtggtggcacatgcgtgtaatcccagctactcaggaggctgaggcacaaggattgcttgagccggggaggttgaggttgcagtgagccaatattgcaccaaggcactcccgcctggacaacagagtgagactctgtctcaaaaaaaaaagaaggtctaatcagagacacttttggggagtggccgtggttactcctaatatcttgactttttttttttttttttttttgagatagagtctcactttattgcccaggctggagtgcagtggcatgatctccactcactgtaacctctgcttcctgggtttaagcgattctcctgcttcagcctcctgagtagctgggattacaggcacctgctaccatgcccagctaatttttgtatttctagtagagatggggtttcaccatgttggccaggctgatctcaaactcctgacgtcaggtgatccgcctgcctcggcctcccaaagtgctgggattacatgtgtgaaccattgcacccggccatatcttgatatttttggtaatcaatttagatttattttgggcgaatttcctgaaactttttggacagccagtttattttgcttctgtaccagctgttatagccctcccagcctattgttggatctttctgtagagtagctatgttgttacttaagaaccatgtccctcttaaccagaaatatctctttgccttatttgttaatgctcctgccttttaggagataaaaactctttatttcatttttaaagataacttttttttttttttttttttgagctggagtcttgctctatcacccaggctggagtgcagtggtgggatctcggctcactgcaacctttgcctcctgggttcaagcaattttcctggctcagcctcccaagtagctgggactataggcatacaccaccatgcctagctaatgtttgtatttttagtagagatggggtttctccatgttgaccaggctggttttgaactcctagcctcaggtgatccgcctgcctcagcccctcaaagttttgggattacaggcgtgagccaccactcccgacaacgataacattttaaatgaaaagaccccagagagactatgtaacatgtaaatataagctagatccacttctgggactaggttttcccaggagggatcatgaagtccccaagtgattgaggagtaggtgggggtagggaatcaccaaaggggtggctggaggagatagaagaactgaaggtatttttttgagaattttacaagacctaaaatctgcctgtttcacaacagtcatttatctgggccctgtggaatctgtatttggctcagaacatgttgctttttgcaagtatctcatcagaaataataataatgatgatagctatgactattcttttttttcttctctggattttgtgtgtgtgtgtgtgtctgtctgtctagacctctgatcatgacttcttaaggagaggaaaagactatcatgaaaataaaacgtaattggaattatggatttgccttcatgtaaatatctgtggctcagagcacaaaaatagcttttccattgcagagctaagtcaggagtttcatgagaaattgagcattgatgatctaatttaaaacagctatggcccagaaattcagagaaagggctgacacattggcctctgtttatacctttgaatattttcttcctagcttatggtaactcatattcagggacagtttggagggatgataaggccataagtttttttggtttgttttcgttttttgttttgttttgtttttttgagacagagtcttgctctgttgcttaggctgcagtgaaatggcatgatcttggctcactgcaacctctgcctcccaggttcaagcgatcctcctgcttcagcctcccgagtagctgggattacaggcacccaccaccatgcctggctagtttttgtatttttcgtagaaacaggggtttcaccgtgctggccaggcttgtcttgaactcctgacctcaagtgatccacctgccttggcctcccaaagtgctgggattacaggcgtgagccactgagcccggccataaggtttgatgctacaaaccttgtttttgttggcattggtttaatgttaacacgaacgtagagaaaaattttaatctcaatcctttgcaaccaggaatccctcctagtgtagctccaggcctgttgctcatttgtggcttgaggcagagccttatacattttgtgaaactcccggtgactcttgttagtcttggtttcagcagagggtgcctaattgaggtcattctcagcagcacactggtggtcaggtgctcctgattttcagaaaaaattaccttgtttaaaaaaatgtgatcaggctttcctgggaattgtctgataggcttggacttgcctaggtcaacatttttattcggtaaggcaggaaattgttgttttaggcatctgacatcatctttatcaatcacctgactataaactccaagtgagaatggctttataacacatgtgatggggtttcgccagctttcaacagcccctgcttgtcggtattggcctcctctgcacccacatattcccatctctgccagatgttctgacttaactgctcacatgtgtgcaaccacacgggcgcgcacagaccccggccagacatgtgtccctgctacaaactcctgcccctagcggctggcttgctgtctgtctaaccagaggggccatctttccatgattctttcgagggctgcctcagtcactctctgcctttggagacggagacacagaatctcctcaccagacaggcgctggctcctttagtggtttcctcatctgcctgtgctcctcactctccatggctatgtatcacctagttcctttaaccttatccttcctggaacttttctgtttgtcttctgatttgttactttgcttggacttgacttctcagtccttcccagcactgacctcactttgtttaggacttctctacctccacccctttgtgatgtatgtggctcaggcattcagcccccacttaatgagcagctgctctgtttcaggtacctacatatcacaattggtcatgatgctaaggctgacattactttctggggccaccaagtcactgtggagaatgatgagggtgatgttgcagttctgcaaagctttggggaaatttccccatgctgtgggatatgtatatgaaaaacaattctttctctcctcttatatttcatacttaaaaaataaatgtgtaggggcagagttgtcaggtttcaaccctcatgtcttacctgagttcctgccatagcctcctatctgacattcttgccattggccttgccatcttccggtctgtccttcactctttctaaaattctgatttgaccctgtttattgtctcttttaagtcttttcactgcatcctcattttcttttggataaaatcaagctctatcgtgagacagaatggcttcttcgacctcacttgcctgtagttctctccctgtgtcacctgcattaactcctggctccagcttggctgtctccctgcagtcaggctctctcctgcctccctgtctttgcacacacactcagctctgtgcactctgttctgcctgagcatatcagccttcaagatttagctctgaagctcatgtttccatgaggtgtttggagttctccaggacctgcatctttgtccccccatcacagttatggacacttgccaccatcattcctgccaatcttgattaggcatctggctttgtgtcccacagaacactggatttgtctttgtcacatgaacaaagtacttcagaattgtctcctagacagaaaatgccctaagctaaaggactatgatgtgtttttacttgcagcagtgtatagcatagttttaagagttgtcagttattgctattgctgttgaatgaatgcatggaagaattattatttttagagatggggtgtcttgctatgttgcccagtctggtctcaaactcctggcctcaagcaatcttcctgctttggcctcccaaaatgtggggattacaggtatgagctgctgtgcctggctatacaagaatcaattcacacacacctttcaccacattgcatgaacacacaccaagacatagatcccaatgggcagcttacttcaaatcttactgagaatatttacaaagcacatagtaggtgcttagtgagtttctgttgagtcaaataaagaatgaatgcacatccacacaaactatggaaaatatactcagaagagaggcataatgtaaccttacttccttttaactacagaaagaatatggggctggaaaataagattagagctcatgtttatcttctcagctatgttactccaaatgaatcagttgatctctctggactcttatttcctcatctctcaaatgaaatgttagaaaagataatatttaatgcccattgaacagtctaacttcaatcattattaggcttaaagtcaaatgaccggtgctttacattaagtggcatgaatttgggactctgatttttaggcctcaccatggagtgtgttcatgacaggcccttagcactgggcagagctgcaaagatgagaccaagagatggaccagagttcgcctaaagtgaggcaggaggccacaacctagttgttaagcaaacatagagctacgaggcatggccaggatgagaagccctgaggcggggatagcagtcagtgtcccatggtcgtgcggggtcaaagctggcctgagatcaccaggaaacaagtgtggaagcaggctgggcagtgtgctttcagggatatgctgaaaatgtgccctgctctcagggaagacttccagaaatctctgtgaaagccatcaatgccagctgtttgtctcaagttatctgaagggtggtcaagtgaaaagtgtttagatttagttgatgtctcccggagcatagatagaagccgggaggaggttaatttgcggttaataggaaggagaaaagtttaatcttgtctacatgataatgagatgaactcacttatacagtaatgaggtctccttcattggaagagtttacgcagcacagggtaattcctcatcaggaacattgtattagggatttctgaattgtgagcattgggctagatgcgttttaaagtttttttctgcttctcatgtccttaccaaatcaagtctaggtaaacactttcagatcccatagcccttccttttgtgaaatgatctcagcatgccctgatgtcctggtgaccagcctttggtaactctttagtctttgaatgtcccccttaaagtggagctccttgaatgggacctcatgtgccaggatgtggcttggccagggcctttctagggacatgacacaatttttacaggtagtggacttcatttattatttcctcatctattttctcgctctgacctgagctgtaaaagcacatagcattgagccttggctgcttctgctacatgcttatgccacctcaggtgatgggagacttcctttccttccattccacttttgtctgctggggaccctggggtaaatgtaatctagacagtgactctgaggctctgtactgggaacttccatggcattccattcttgctttctcaagagcctcatactttatgccaaatgcttgctttctctgtcttttgtttcctttcttctttcatttttctttttttttttcttttttttcttgagacaggtctccctctgttgcccaggctggagtgcagtggcgtgatctcggctcactgaagcctccacctcccgagttcaagtgattctcaagccccagtctccagagtaactgggattacaggcgtgcaccagcatgcctgcctaatttttgcatttttagtagatgtgggggtttcaccatgttgcccaggctggtcttgaactactgacctcaggtgatctgcctgcctcaccctcccaaagtgctgggattacaggcgtgagccaccatgcccggcctcatttttcttttttatctcttccttctaaaccctccatgcccactgaatactacaacatttttactgcacagtgtttttcttttcaaactcttggccctcttggtatccgagtgaataggaatgtgggcggcttctaagctcctttgtgcacatgaagaaaaatgcccagagaagttagtgacttgcttaatttactggcagagtcaatgagcccggaacccacatttcttgatttccctcaccgcctctgtcttggagatcacagtgcatttgctaatagcactggagtcacaaagaacagcaagctgttttccctctgtgtggtcattgtaccaaaagaatttatccgggaaacaatcccaggcctccatagactcagtaagaccacactaaagtaaactaaaaagagtaacaagagcagaagaatttatcaagtgcttcctatttttcaaagaaactttcaagtccattgccttatatgatgctccctgaagcaccttaaggtagaagaacccgcaggagcctccttttgtaagtaaaggtcaaggatggagtccaggcctggggtgggtagaggaggttgctggtccacaaaccttccatggaactatgcttcagaaaaccagggaaagggaatgaatgagttgtttccatctggtatcaaagatgtgggtgccctgaggacagacctagggttctggtttgtcagtggttcaagaagcatcctaggccgggcgcggtggctcacgcctgtaatcccagcactttgggaggccaagaagggtggatcacctgaggtcaggagttcaataccagcctgaccaacatggtgaaaccccttctctactaaaaatacaaaaattacccgggtgtggtgatgggctcctgtaatcccagctacttgggaagctgaggcaggagaatggcttgaactcagggggacagaggttgcagcaagccaagattgtgtcactgcactccagcccggacgacagagtgactccatctcaaaaaaaaaaaaaaaaaaaaaaagagaaaagaaaaagcagcctaggtccaggtttggaggtaggaacctggctgggggtgggtggggtggtgggaccgactcttgtcctcaacatcaggccagctccagctgagcagtttgggagaatataagtccagacaggagggaagagtactggcttgggaaaccagttgttaagacatgggacagcagggcagtggccccctgggcagtgaggtgacttctgggatctagtagatgctctagttgaggattctgaagtgtggagcaagacttgctctcaccacatgggagtcttgtcagaatcttaggttattcagtcatttattcagcagctatcaacaagtactcagtgaatataaatatatcttaagcatatttatatactgggcgcggtggctcatgcttgtattcccagcactttgagaggctgaggggagtggatcacctgaggtcaggagtttgagaccagcctgatcaacatggtgaaaccctctctctgctaaatacaaaaaattagctgggcatggtggtgcgtgcctgtaatcccagctacttgggagcctgaggcaggagaattgcttgaacctaggaggcagaggttgtagtcagctgagattgcaccattgcactccagcctgggcaacaagagtgaaactctatctcaaaaaaaaaaaaagacaaaaaccccacatatttatagtgtttcttatgaggatatatatgtgtgtgtatatatatattatatatatatatgtatcttatatatttactctttttaatgcacataaccaaaccatgggaatatgtaatattattctctattttatgaattaggaaactgaggctcaaggatgataactggttagctcaaagtccaaagttcctgtcttctgaattctttcactgatgtttatagctgctttccacatgttaagcagttcctaaatttcaaggtgtatgcctggaagaaaatagaggaaaacaccttcagagttattgctcaaggcattactttatctttagggactggaaaacctaaacacataactgaaattcaacttgagtcctttttgttcaacctctaagtgagcaattgtatggttggcattcactctttttcttttctttttacttaaaaaaaattttttgtaactattttttctttcttttactggtttctgtatttattattattattattattttttcaacttttagatcattttagatctaggggggtacatttgcaggtttgttacctgggtggcattcactctaagccaatcaagaacaacttcttcttaaacctggaattaacatctatgctctggtgtgtcctgacttgtgtcaggcaccctagttatgtggccaagtggaacatcgcaacagggagaatgggttggactatagatgggtgtttcctgggtaaatttgttatgggtgagaggcttggggacatagtgcaacaaatctgagtcctcctgcagtgaaggaaggtcatgccccaatgcttccagggctggggtatgcaattgagctcatagttcaagttcccttccctactttccatggcctgtgccatgaccaagggccaagcccctctgaccctgcccctgcccctggccttgtcttgttggctcagcttgatgccctagataccttcctaaccttcagatggtaaagtctctgccagctgtggctacctgcctgattctggggacggggcgctttgatggagatcctgagctgtctggaagtgaatttttctctgacagaatgtccttttgctgcttcctctccctttctttcccagccagaagcagttagtctcccgcattttccttggcatggctcttgccttgcaaggagcatgtaaaaaactctgggatgagtcagaacctggctgaagtgtcaggtacatttaccaaacattgattggactccaggccctcagcctatgccagggcagagaacccaggcatgaataagatcctatcatcccctgtgctggagttgctcccagcctagagacctgaggagacacccagcccactgtgacaagtgatgttgggagctccaacccggattcctggtcagtcaccaacttcacctactctgagggttagttcctggtgtcctgtgttttgggtggactctccaggtcctgacatctgccgtgggaacccagctctgctttccatggctgcattgcctgctgctccagtgatctgttgctgcagagcagctactccaaaatgttgaggttttcatcagcagatgaatggataaacaaaatggggcatgtccatgcaatggaatattattcagccttaaaaaggaatgaaatattgatgtaagcttctgtatggatgggccttgaagacataatgctatgtgaaataagccagacacaagaggacacatactgtatgattccatttatatgaggtacttagagtagacaaattcatgaagacagaaggtagagtggtggttgcaggggctggagagaagatgaatgaggactaagtgttttatgggtgcagagttttagtttggaaagatgaaaaagttttagaggtggatagtggtgatggttacacaacaatgtgaatgtatttaatgccactaaagtgtacacttacaggccgggtgtggtggctcatgcctgtaatcccagcactttgggaggccgaggtgggcaggtctcctggggtcaggagttcgggaccagccttgccaacatggtgagagcccgtctctactaaaaatacaaaaaaaaaaatttagcagggtatggtggcaggcgcctgtaatcccagctactcaggatgccaaggcaggtgaatcgcttgaacccaggaggcagaggttgcagtgagctaagatggcaccactgcactccagcctgggcaacagagtgagactccatctcaaaaaacaaataataataataactaaataaaagtgtacacttacaaatggttaaaagggtagattttatgtatgttttatcacagaaaacatgtagaggttgaaaatcacaatttaatattttctcttctggttctatgggttgactgggctcagctgagtggttcttgcttgaggtttctcatgtagttgcagcctgatggcaaatggacatccaaggtggtgccttggagtggctgctccatgtggcttctctatccagcaaagtagctgggcttcttacatggcatctcagactctgacaagtcagaaacggaagcttctgggtcatttcaggggtatgactagaattgtcacaacatcatgtttgctacattgtatggtcagagcagtgacagcgcccaccagatccaagaggaggggaaacagagtcttcctcttgatggaagaggggcaagatgacatttcagaagagcagggtatgaaagatattgttgctgtgccttggaaaacctccggcctgaaggctcaagagtttagacagaaaggcagcttcagggggcaaatacctctctgtagacccttcccttcccttctcttcccttcccttcccttcccttcccatcccgtcccatcccctcccctccgctcttcctcctccctttctctctctctctcgtttgttttgttttgtttttttcctgtcctgtcctgtcctttcctctttcctttttttgaggtggagttttgctcttgtttcccaggccagagtgcaatggcatggtctcggctcactgcaacctctgcctcccgggttcaagcgattctcctgcctcagcctcccaagtagctgggattacaggcacatgccaccatgcctggctaatttttttatttttagtagagacacagttttatcatgttggccaggctggtcttgaactcctgatctcaagtgatgcacctgcctcggccttccaaagtgctgggattacaggcgtgagataccatgactggccttagaccccttcttaggagaattgatcctcgtagattgtttgagtttgaagggaccttggaaactgcttgatagcagtgacttgttcaaacttacaaaggcagagagaagcagagttagaagaaaacctaaatactggcttcatggttcccaggccaggcaaatagctgtggggacttcacccaaaggacttctgtgtgctgtgagcaggaatacaaagtctgttggagagatgggtgtggggagagagcagaaccctgggtggtgtccagtggagaccatccatcaccttagaggtggtgtgagctcctggttgtgctgggctgcatctgttgggagctagtgtgccttgctgagctgggctgtgcagaggcacctgagatgacttgggcttcctgaggaggctgggtgttactcctttattttattttatttatttgtttatttgtttttgagacagagtctctctttgtcgcccgagctggagggcaatgacacaatctcggctcactgcaacctccacctccctggttcaagcagttctcctgcctcagcctcccaactagctgggattacaggcgtgcaccaccatgcccagctaattttttgtatttttaatagagacggggttttaccacgttggccaggctagtttcgaactcctgacctcaggtgatctgcctgcctcggcctcccaaagtgctaggattacaggcgtgagccattgcgcccggccttttgcttctttaaattggactcagagttgggaggaaagaggttagcctgccaggggctcaagcacccaaggttgagacttagagatctgtaaatttacatataggctaaggtcgaaaatgtcagttggcacatccagtcattggctcccacgtatgcgtttctactcaaactttaagtgcaaaattttttttttttttttttatttatttatttatttttttattgataattcttgggtgtttctcacagagggggatttggcagggtcatgggacaatagtggagggaaggtcagcagataaacaagtgaacaaaggtctctggttttcctaggcagaggaccctgcggccttccgcagtgtttgtgtccctgattacttgagattagggattggtgatgactcttaacgagcatgctgccttcaagcatctgtttaacaaagcacatcttgcaccgcccttaatccatttaaccctgagtggacacagcacatgtttcagagagcacagggttgggggtaaggtcacagatcaacaggatcccaagacagaggaatttttcttagtgcagaacaaaatgaaaagtctcccatgtctacttctttctacacagacactgcaaccatccgatttctcaatcttttccccgcctttcccgcctttctattccacaaagccgccattgtcatcctggcccgttctcaatgagctgttgggcacacctcccagacggggaggtggctgggcagaggcgcccctcacctcccggacggggcggctggccgggcggggggggctgaccccccccacctccctcccggatggggcggctggccgggcagaggggctcctcacttcccagtaggggcggccgggcagaggcgcccctcacctaccggacggggccactggccgggcaggggggctgaccccccccacctccctcccggacggggcggctggccgggtggggggctgacccccccacctccctcacggacgaggcggctggccgggcgtggggctgacacccccacctccctcctggacagggcggctggccgggcggggggctgacccccccacctccctcccggatggggcggctggccgggcggggggccgacccccccacctccctcccggacggggcggctggccgggcagaggggctcctcacttcccagtaggggcggccgggcagaggcgcccctcaactcccagacggggcggctggccgggcggagggctgacccccccacctccctcccggacggggcggctggccgggtgggggggctgacccccccatctccctcccggacggggtggctggccgggcggggcgctgacccccccacctccctcccggacggggcggctggccaggcggggggctgacccccccacctccctcccggacggggcggctggccgggtgggggggctgacccccccatctccctcccggacggggtggctggccgggcggggcgctgacccccccacctccctcccggacggggcggctggccaggcggggggctgacccccccacctccctcccggacggggcggctggccgggtgggggggctgacccccccatctccctcccggacggggtggctggccgggcggggcgctgacccccccacctccctcctggacggggcggctggccaggcggggggctgacccccccacctccctcccggacggggcggctggccgggcagaggggctcctcacttcccagtaggggcggccgggcagaggcgcccctcaactcccagacggggcggctggccgggcggagggctgacccccccacctccctcccggacagggcggctggccgggcggggggctgacccccccacctccctcccggatggggcggctggccgggcagaggggctcctcacttcccagtaggggcggccgggcagaggcgcccctcacctcccagacggggcggctggccgggcggggcgctgacccccccacctccctcccggacggggcggctggccaggcggggggctgacccccccacctccctcccagacggggcggctggccgggtgggggggctgacccccccatctccctcccggacggggtggctggccgggctgaggggctcctcacttcccagtaggggcggccgggcagaggcgcccctcacctcccggacggggcggctggccgggcggggggctgacccccccacctccctcctggacggcacggctgcccgggcgggggggctgaccccccacctccctcccggacggggcggctggccgggtgggggggctgacccccccatctccctcccggacggggtggctggccgggctgaggggctcctcacttcccagtaggggcggccgggcagaggcgcccctcacctcccggacggggcggctggccgggcggggggctgacccccccacctccctcctggacggcacggctgcccgggcgggggggctgaccccccacctccctcccggatggggcggctggccgggcggggggctgacccccccccacctccctcccggacggggtggctgccgggcggagacgctcctcacttcccagatggggtggctgccgggcggagacgctcctcacttctcagacggggcagctgccgggcggaggggctcctcacttctcagacggggtggttgccaggcagagggtctcctcacttctcagacggggcggccgggcagagacgctcctcacctcccagacggggtctcggccgggcagaggcgctcctcacatcccagatggggcggcggggcagaggcgctccccacatctcagacgatgggcggccgagcagagaggctcctcacttcctagatgtgatggcggccgggcagagacgctcctcactttccagactgggcagccaggcagaggggctcctcacatcccagacgatgggcggccaggcagagacactcctcacttcccagacggggtggcggccgggcagaggctgcaatctcggcactttgggaggccaaggcaggcggctgggaggtgtaggttgtagtgagccgagatcacgccactgcactccagcctgggcaccattgagcactgagtgaacgagactccgtctgcaatcccggcacctcgggaggccgaggttggcggatcactcgcggttaggggctaagtgcaaaattttttgttaaagcctttggtagtctttgaaattcaataaagttcacaagtattttgcaagcactccccatagacttggagacttaaatattattttttgtgtgctgaagtttgcttttgagactaagacattactaaagttaatgccaatcttttataactgctttgtatataggaccttaataaagaattttaaaaatctgtcaggtgcggtggctcatgcctgtaatcccagcactttgggaggctgaggtgggtggatcacctgaggtcgggagttcgagaccagcatgaccaatatggagaaaccccatctctaccaaaaatacaaaaattagctgggcttggtggcacatgcctgtaatcccagctactcggcaggctgaggcagaagaatcgcttgaacccgggaggcagaggcggcagtgagccaagatcgcaccattgcacttctagcctgggcgaagagcgaaactctgtctgtctcaaaatagagaaagaaaaaaatctttctctattttgagtattgttcaagttgttacgtatttatacacatatatatcaatggaattccgtggaagtagagaggaatagaagcaaacatgctgttgttatgttatctgtaattcagcagtacttgcctgtgtccacagtgatgtggacatttccaggtgagcatgatggtcagcaacagcctaggactggccatggacaaaccaatatgcatttgattttgtggcacacacacaatactgctaatctctgctcagtggcttgtggcccagtttaggcagccagagaagagatctgccatagctatgatcacagtgtgtgtaattggattttgtatctgcttactggggtgaataaagccaggtgggagaaattcttttacactggcgttaactggcacataactcaaatcaacagaaacatgagcagagggtatagtggcaaagggcttgtttgctgccctatgtctttactcaagcagatgtcccttccccatgaagccttccttgctcctgagccagggctgcatttgatactgctcattcctaacctcccagtgcactttagcagagaaggatgagcacattttatctttcatttgttgttttctctggcctttcctacaaggttataaaagccttaggagcaggcatctatacaggttgagtgtccctaatccaaaatctgaaatctcgaaagttaggaccttttcgaatgctgacctgaggctgaaaggaaatactcattggagcatttcagattttggattttcagattagggatgctgagctggtaagtataatacaaatatttcaaaatctgaaaacatctgaaatctgaaacacttctggtcccaagcgttttagataagggatattcaacctgtagtaacaagagcttctatttaacatctcccccatgtacctggcattttacagatgttactttatttagtatgtgcaagaatcatttaacataactgtcttactcccttgagcttgctataacaaaaaatagcttagattgagtagcttataagaagagaaatgtcttgctcacagttctggaggctgggaagtccaatatcaaggctccagtggacttgatgtctgctgaggtcctgttcctcacagatggcaccttctatgtgttctcagatggcggaagggacaaacaagctctctggggcctctttgataaagacactaattctgttcataaggtcagagcccttatgacctaatcacctcccaaagggcccacctcttgttactgtcacattggggattaagtttcagcatatgaattttgggagacataaacatccagagcataaacgtaactaatgttatccttgtttcacacctgagaagacagaggctcagggaattgaagtaacttgctccatgtcactgctaggcagtggcagggctgggattgaaacacaaatctctctaacttctaagcccttttcctaccataccaccagggaatcagacctctgcagtttccatggtgcttaactcagaacccagcacttaggggatgtggtctttgctgaatgaataagcaggggatgtgtgatacaagaatttgtaccagaacctttggccaacatttccccaaggcccagcatccaatggtagagatcctgggtgactctctgtagatggtggtccttcacttctcatataggccattccaatctgaatgcagcttgttttgtgtgtgggaaggaattacgttttagggtattaaatatcctttctgggccatttagttacttgtctcctctcaaaacactaaaagcaattacatggtaattaagataaattacttgaccaattttcatagcaaactgattggtttcacttatccccccactgaactgttaagacctggcgagatcctttttatagttctttaaacttccaggactttctgcttatcttcaggaaggacagtggaccttcaggggagaggagaaggaggaaatttgcatatttaaaatgtgtgatctgagccaaacgctcttcagctaacttgatctcgcatcattttcccagcttcctttgagaattcagaatcaaaattcaggcatcaccatctagtgaccacagggtcctgcaccccagcccaaacctggggaccccttagggataatgccctttctcatttgtctttgagtgccctgctctttccactgaagagcccacagaacacagatgccagcaggcagccctgaaagcaggccttgtttgcaggtctttgcctgaacgaagcctgcttgtctgcctccttctgaaggccaggggtgggctacattttttggagagtaggaagcccaggggtcctcttcgtgctgctcctgagaacagaaggtagatagggtatgaagaggcagccgttgctagggctgccagaaaccagtccacccaggaaacaacacagctccacagctgcagtgagcacagctgcagaaacccaggagctgggcgagagggtgggggttaagatccaggcctctaccccaggccccagcatccatgctgggcaagcaggccacgtgctcccttgcttccagactggcagcctagcctccttgaaattggccctcactttatccccacccacctaatcagcaagccccaaagtctccccttgtctctgctctctgctgttcttctagggcccatgagggaacttttctgccttgggggctcctccacctcctggtttcaccttagctttttgtgtgtgtcttactttctccttttcatttcctcctcttgtaaagtgacccagccctggggctttacccattgtcttgcattcagctctcacagcgctgaaagacctccactctctacctctagcccttggttttctctctggatactgcctcttgtgtctagcttcatgaatgaggcttccatgtggacatacctcagacctgaccaatgtgcataaaaccagctccctgtcctgtctctcctgtggctccactagtccaagggccagatgccccactctcctttgttttctagattatatttggtgtacaaatcccatcaaggctttacaaatattcttttatctgccctttctcccttccgatttccatctcggaagtcagtatactatagggcaaagtgcagaatttggggctatggacagggttcaactctgatagcatcattttctgattgtgcgaacctcaggaaaatcatcaaatagaagcctctgattcattatctacgaagcagacacatacagaagggtggatcccagctcactgacctccttgcttttgacattttggactggaaaattcttgttgtggggctgccctgtgcattgtagaatgtttagcagcatctctggcccctacttactagacgctagtagcattcctgattgtcagttgtgacaatgaaaaatgtctccggacactgccaaatgtttcctggggagttaacttgctcctgtttgagacccattggtacagagtaatgctaagtcctgggtggtggtaatgaatattaacccaggttttcaggttttcacctttcagtcgtcagccacatgtatgaagttcccacattacttttattttttatttttttgaaacagagtctcactctgtcacccaggctggagtgcagtggtgcaatctcagctcattgcaacctctgcctccccggttcaagtgattctcgtgcctcagcctcccgagtagctgggattacaggcgtgcgccaccacgcccagctaatttttgtatttttagtagaaacggggttctaccacgttggccaggcttgtctctaactcctgaccttaagtaatccacccaccttggcctcccaaagtgctgggattacaggtgtgagccaccgcacctggcctcatgttacttttgattagtctttttcccagttagttttgacatctgcaggtgctgttctgacttgcttgattaattagttcctttcatgttacacatttttcaaatcagaacacactgggattgaaccttgatattctgttgtttgagaatgagagaccagttcagagttgttcagaaacctcagaactcccagtggggatgcctgcaggtttgacaccgccttgctgctcagggatcctaggcttgtagcaatggcgaatgctgatttgaacaccctgcccatacttgtgacaagcatttgtttaaagtgcctactatgcagaattttgctaacgttaatttatttggtccttgtgaagtaggtgttacttattttcactttacagaaaagcaaagtgaggccaaaagatacgaagcaacactgcctcagagatgctaagtagaagaaatgccatgagaggccaggtgactttggcatgaaagctggtgatgctaaatctctgtgctcttctgcctttttgggttgagcctttgctgtggctagagcacagaagcttatgaaggaggagctccttttaattgtggctcagaagttgcccatcttgccacctacaggttctgtgggtggagagcagacctataggccagacagatggctggttgagaccatgagccccagcactgtgtccagcacagggaaagcccccattaagggagcttcctccttgataacttggacaacacttggttgaacaacacactggatgctcactttccccagagagaacagcccaagagttcagtgatacttactcaaattgtagatgagagactgactgaccttgccctctgaagtgggaaactgaggagggttcccagaggcctgtgaagggcaggtaaccaggaatggtgacatggtaaggttgagtggagacagactgtggccccatggccctaggcagagtgcacactgggcatcctgcagcattgcagagacccattcccatgggaaatcccctgatttctccaccttagccaggagagtcctggggcctatgggtgggaggcttgagtgttgacagtcagaggggctgtgatgagagctgccaggtgccattctcaatgcccagaggatgctctggggaagaaagccctcacatgtttgccaaggtcaaaagcaagagctcattccagtcatggtctgtgtggaagctctttggtctgctgtcttggaaagcaaaggcagggatgtcctcctacgcggactgctggtctcccaggaaaagaatctgtggctcttacttgtcctgagtgatgctaagaccctgctaagtcaaagaagctgctataggcacagagccagtacccatggtcatagcagacagtgggcaatagaatacaaaaggccgaggtgtccagaggtaaaggtggactgtgtgttccctagtctcagactcttgtgtcttcagcatgctcctgagggttctgaggcacaccctccacgtggctttttttgtttgtttgtttgtttttgttgttgttgttgtttttgagacgtggtctcactgtgattcaggctggagtgcagtggtgtgatttcggctcaatgcagcgtcaaccttccaggttcaagcagttctctcacctcggcctcctaagtagctgggactacagccacatgccaccatgcctggcgaattttttttttttaacttttaatggagatgaggtctcactatgttgcccaggctggtcttgaactcctgactcaagcgatccacccacctcagccctccaaagtgctgggattacaggtgtgagccaccacgcctgccctccacgtgggttcttaaggaaaactacctgtttctccctcctgttagaggcccgtgactggctctgggaaggattgccatgaagagacctgtaagccctttctgataaggatttctcaaaggcatttgaccatgggtattttctccacaaacctattaagttttctccatttagagagatggtatcttcaagaatgtcttcaagtttgagctactatcacaaaataccatagaccaggtggcttataagcaacagagatttatttctcacagttccagaggctgaggtctaagatcagggtactagcatggttgggttctggtgagggttgcagatggctgatttctcattacatcctcacatggcagaaagagagtgagctaggtcctccagtggcagtggcggtgtcttcttcttcttcttcttcttcttcttcttcttcttcttcttcttcttcttcttcttcttcttcttcttcttctttcttcttcttcttcttcttcttcttcttcttcttcttcttcttcttcttcttcttcttcttcttcttcttcttcttcttcttcttctccttctccttctcctcctcctcctcctcctcctccttctccttctccttctccttctccttctctttctccttctccttcttcttcttctttcttatttcttcttcttcttcttccttctttcttcttcttcttcttccttatttcttctttctttctttctttctttttttttttttttttaagatggagtctcactctgtcacctaggctggagtgcagtggcacgatcttggctcactgcaacctctgcctcctgggtccaagtgattctcctgcctcagcctcctgagtagctggaattacaggcgtgcaccaccacgcccggctaatttttgtatttttagtagagacggggtttcaccatgttgggcaggatggtcttgaactcctgatatcaggtgatccacctgcctcagccttccaaagtgctgggattacagacgtgagccactgtccctggccctccggcttcttctttttttttttttttttttttttataagaaggagtctcgctctgtcgcccaggctggagtgcagtggtgtgatctctgctcactgcaagctccgcctcccaggttcatgccattctcctgcctcagcctcccgagtggctgggactacaggcgcccgccaccacgcccggctaattttttgtatttttggtagagacagggtttcaccatgttagccaggatggtctcgatctcctgacctcgtgatccacccgcctcggcctcccaaagtgccaggattacaggcgtgagccaccgcgcccagcctccgacttcttatacaggtactaatcctattcatgagggctctacactcatgacctcattaccttctaatggccccatctctaaatatcatcacattgggattcaggtttcaacataggaattttgtggggacacaaacattaagcccataacaaaggaggatccctgagcagggaattgggcacagggatctaagacagggaattatattatcagatccccagggcagaatacaggcatggtcataagttaggcagaatggagacacagttctagaaaaagattcatagcaagttgtcttgatggtaaaccaaggtccagagttgggcctctttagcttcctcctgactggagaaagcaggtgttctaaaggctagagtagggacagaggaggagaaaggaaaactaacatatatcgagtacatttatgaggcaatttacatatgaggtaaaattaatattaccattttacagatgaggaaactgtggctcagtgacctgcttagcaaatttctatagcatctatggcagtgacatgaacatggtatggatacatcatagaaatgtcatgataataaggataaaattctaaaatccgaatacccacccaactccaaatcttctctttgttcatgtaatgaccattttctgggactagccagtttgggttggattctgttcatattactgtcaaagataaacacagctggacattagttaaagtggtgagaatagatttttaattggtaataactattgcaacagggaaaagagtctagcttgaaccaaactcaatttccatttgtacagaggtgactgggcatattagtttttatttttttgagatggagtttcactctgtcacccaggctggagtgcagtggcaccatcttggctcactgcaacctccacctcccaggttcaagtgattctcctgcctcagcttcccaagtagctgggattacaggtgcccaccaccacgcccggctaatttttgtatttttagtagagacggggtttcaccatgttggtcaggctggtctcgatcttctgacgtcaggtgatctgcccacctcagtctccaccatgcccggctaatttttgtatttttagtagagacggggtttcaccatgttggtcaggctggtctcaatcttctgacgtcgggtgatccgcccacctcagtctcccaaagtgctgagattacaggcgtgagccaccgcacccgacctgtgactgggcattttaaagggagaatgagctcaagggagtcagggaagtgaaaaattacaaaaagtgggaaggaggggttggtccatgtgaaatccatctgggtttgcaaactggcatttatcaaagttaggctcctactctcccactgacgctagagggaccctatcttcaggcattgattgaaacaaacattgaattcttcaggcagccttgcgttttctcaggcgggcactttaagaggggctggtgttgtggtggtgtggcctcgagccattggaagcaatattagtgtttgttcaagtcgttacaggctgaagttgaaaggcctattcaagaagcagactctgagcctggctagaatttggtcaaagagagaatctatgtcactattctctaaatttaggaaatgaacagattattagaacaaggtaaaaaaaaaaagttggcacccaagtttatgctggaaaaatgaaggttaaatgccgtaggggaggggcagtgttagggaattgagctggaaccagcactgacaatatttgaaagcatggttaggttttgctgtggtttaatattttacaaatgttattccctgtcacatagctgaactaaataccccacatgtttgcgattaagcattatgagctgcagaacatatgtgctaataatatggttcatgcagcctgtgggcacttctcccatgacctaagatgaaggtgaggctttttgattttccttaaggtattgtgttttctgatgattcctttttgttccaaactttcgctttcccctttagaacgaagccttttacaggaatgatattttatttttatatatttattttttttgagatgcagtcttgccctgtcatccaggctggagtgcaatggcgcgatcttagctcactgcagtctccgcctcctgtgttcaagcgattctcctgcctcagcctcctgagtagctgggattacaggcgcccaccaccgtgcccggctaatttttgtatttttagtagagacggggttttgccatgttggtttcggactcctgacctcaggtgatctgcccgcctcggcctcccaaagtgctgcgattacaggcgtgagccactgcacctggccaggaatggtattttaaatactgtcatagcaagcccttaagaaaattcttcacagctgcatgttaacacactggcctgtccctgactttggctttgtttccaggatatacagttgtttctggaatgtacagtagctagattgcagccctccaatcatacaaaaacagactgagggtttggaaatgctgctaaagtctagttacagtgttgctcttgaggagtctggcgctatagggagtctgagaattccttatttgaaaaacagccaatggaaccgcacagacacactgaaattaagacattctttctgtagattatgcagcattgttagagagcaaagaaaagccacaggaataaaggactcaattcagccctctgctgaaggagagggtgttcctgaggcttgagtaggaattgacccaacagggacagtttggttgggctgataccaggaggctactgagaggtgtcgatgatgccttcctgagctctgctgaatacctccttggcatcagtcctcccccaacatctagcagaaacagaggagccagacattagggaccacattggggcgtgcttttccccacagatgcatactgaagtggggacaaagtcttcagctgccatatgacctggattgctgtttcacctatcacatgcatctaatctgacttcaacaatctacaggagaaggtagaacttcatatttacattttatttgagtggtttatgaagaaaagtagaggaaaactgcaaagaacggcagaagtagactcttgaggttggaggggagtaggggatgatggtgtgggagggatgaactttgcagggagttacacaaaatttggaaaattacagagaatactggaatcgccactaaaagagaggcagggcacctaaatctatttattagacaacaattctgagaaattattcatcactaagggcaggacagtcagttgatgcagtcaagaaggggcaggaaatagggcgagctgagttatgaaagccattctcagaaatgacccaaatttgtactgagctgttgttcttgagcaaccttggggaaaattatcagtctgcttttcccacagcctgatgtccaaggggcagatacgtgtggtgggcttgctggagaaataggctcttctcacgtgagaacagcatccttccaatctagagctcctggctccaggaagtggtggtggctctaccctggtgctatttcattagtgaagggtggggtggtggaaagtgcagaaaaggcaggacccctgacaccagcaaggcattggatctctctggacctccgggtggtggactttgggactggacagacctggtcacagtctaggttctacatcttactggtcgagcaactttaggcaagtagcttaactcctccgaacttattttccttttctaccaaataatgataatattacttcatgagtttgtgagtattaaatgagatcatgcatatacagcctacagcccttagcacaccatgaacacatagttatttgataaatgtttgttagtgtggttaattgaacagaaagccttaaatgtcttcctaaccctaaaatccagtgattctttgaactggggagggcagtagagagatttaatttgtggaaaaatgaaaagaccatttaaaattattcaatcagaaatgtattaagctttgtgtatttgtgtcaggcatttgtagacagtgtggaaaatgtcttatccaatgattctttgaactgggagggaagtagagagacttaatttgtggaaaagtgaaaagaccatttaaaattattcaatcagaaatgtattaagctttttgtatttgtgtcacaggcatttgtagacagtgtggaaaatgtcttaataaatgagacatgctctttccttgaaaaagcttcagtctgactcacaaagagtatatgaattttttcctatgatggcttgaaagattttatcttcaaattcctttttgtgagattgtttttccataccagtgcttcttatttatagggcttgttgcaagtaatttgcaatattgttacaggttgagtatcctttacaccaaatgctcagaccagaagtgttttagatttttttggattttggagtatttgcatccccaaatctaaaatgctcaagtgagcttttcctttgagtgtcatgttggcattcaaaacattttgaattttggagcaattcagattttgtgtttttgaattagagataatcaatttgtaataatatttaaggtattgctgtttgtgaaagatgtatttttaaacgatttagagtcaattcatgataatctccgtaatactcttacaagaattccaggctgggcatggtggctcatgcctgtaatcccagcgcattgggaggccaaggcagacagatcacttgaggtcaggagtttgaggccagcctggccaacatggcgaaaccccatctctactaaaaatacaaaaattagcagggcatggtgatgcacatctgtaatctcagctactcgggagcctgaggcaggagaatcacttgaacccgggaggtagaagtgtagtgagctgagattgcaccactgcactccagcctgggtgacagagtgagactcagtctcaaattaaaaaaaaaaagaattccaatatgatttcttaagtgggagaaaggggtggattgtacaaactgtgtgcaagtgcaacctttgttcgtgttttgtgtgaaccctcctattgctgatcaccacttaaaatggtagggacaattagttagttcagggcttccctaaatatggggagtgctaaattctgggtacatccaagagcacgtgctaggcttttgaatgccatttgtcacacatattgaggtctaaggttgcaaaccattgtatactagatccttgttattcctggtgtgaataggcatgtgtgcctacttttaatttcttcttgagttcagtgctttgaaaacagacagctgaagaaaatgtctaatagtctaaagaggaagcaaacactttcctagaaaccttcgaaactcagaaatggatttctagaaattctagccataatacatactccttttctttctgggcctcattcagaatcttgatgtctcaactgtctctgagttttttttttttttttttttttttttttgtctttccccagacagagtcttgcactatcccccaggctggagtgcagtggagtgatcttggctcactgcaacctccacctcctgggctcaagcgattctcctgcctcagcctcccgagtagctgtgaggagcaccaccacacccagctaatttttgtatttttggtagagacagggtttcaccatgttggccaggctgctcttgaactcctggcctccagtgatctgcccgccttggccttccaaagtgctgggattacaggcatgggccactgtgactggccttgtctctgaattttgtgtggaattgtcctctaggagtttgcagggtattccagattgaaagtagacctttgaaaagtatggggcatgcaggctgggatggaatccacagctgagggaaaagccagggaatcaaaatagaggaatctttgcttcagaggaaggcagctggggacttggtgccaggagtgtttggttcccagctctgcactaactggatttgagactttggggaaagtgcccagaagctgtggtctgctctggattgtcatgcagtttaaatgagacgttgcctgtgaagggctttctgggaggaacaggtacatatctagaccaaccctacttgtaatgcaggaacaaaacaaaactgaaattacatagatgctgccccttgaatactcttggattccagggtctcaaagtgcatagggtaaagtagcagatgactgaggaaaatgcatctaaacttctcttagccttcttatctctcggagacccaataggcttctaacagaccaaggctctggacagggtgtggccccctttcctatgagaggattaggagggaaggaaagggaaagaaggtgctgcatgaaattgatcttagttgttgactttgtgccaactggctggtgggggttttgagaccagaatagaaagatgaagtcatatagaaggatcagctgaaagaggtaagagaaacggaagcaagtgtaaaaaggattgataggctgggcacggtggctcacgcctgtaatcccagcactttgggaggccaaggcaggtgaaccacaaggtcaggagttcgagaccagcctggccaacatggtgaaaccctgtctctactaaaaatacaaaaattagcctggcatggtggtgggcgcctgtaatcccagctactcgggaggctgaggcaggagaattgcttgaacctgggaggcagaggttgcagtgagccaagatcatgccactacactccagcctgggtgacagaggaagactccatctctggaaaaaacaaaaaggattaataaaggaagatagcaagagattgaagaggggaggaagaggagggcagtgggaagcaggcctcccctcgacaatggggaatcagagctgctgactccagaacagtattaaacttccaggacaaaggtttgggttcctattgggcaccatatgaagttctatttggttgaataaactcacatcacatttgctgagtgcctcctatggaagagtcctggacgggggtgaaaggtggacagtgagggggtaggagtgcactttgcatagatctgggtttcaaggtaggagatgtttgtgtaaggtttgcttttaaaaaattcagggctgcttacaaagtaatgggcttgatttcttttctcctgcttatggaaatcagtttatttgtctcataataagcaaaaactgaagaaaccaacaccactgttgcaaattttgaagctacaaggaaaactgatgaggtgaaatttttggcatacatcagaatcgtattcagtctgaaacggaattatttcctctttttcttttctttttaataaacccaactaaagtaaatattttcctgagctctcacccctataggagggttattttggccttctgaagagggtgagatggagatatagtgctgctgatttcctacctgtgagcctcctcgtgggtcccatcgaaaccctgctctccctgctctgagggaaggtgcttcacagcaacttcagcctaagggcagtgacagtgaaatggcctccagggagccagcagcctgggctgccctccgctgtgtgtttttgtgccctcaggaatgtgtggatgcagcaaatgacaacagtgagtgctctgtccctagcggagccccaggccctgtcactttttgtcttggctggtttccaaggttgaatgattgcattggttgaagcttcattatccacaaggggaggcaagacagtgggctggagggagaaaaataggcctttcccacgggcatgattccagcagggtttgcatttttacatcagtagatctcagggactttcattttctgtcagtttgggccgtttgccctatcccagctacttgggaggctgaggcaggaggatcacttcagcccaggaatttgagaccagccttggaaacagcaggatcccacttctgaaagataaataaataaatatcccagcactaaagcccatgtatttagtggtaatacaatttctgcttttgacagcattttccactggatgtcagccgccatagcatcactttggagttggaaaggaccacagagctcattctagtgtaatccctgaatgtctggagaggctgtgcacacagctagtgagtgacagagtggtgcccagaatttgggttacccaagccccacatcagtgttgtggtccctacacttcactgcctctggtgtcattagaataatttcagtaatttgttgtatcaggttgggctgaagtgacctgtattcaaatcctggtttttccacacctaggtatatactcaagaaaaaggatcacacgaaacttatacacaaatattcagagcagcatttttcaaagtaactaaaaagtggaaacaaaccaaatgtctatcaactgataaatggataaacaaagtgtgatatttccatgcagtggactactcttcagccttgaaaaggaaggaagcagtgatatgtgctaccacatggatgaccttggaaacattatgctaggtgaaagaagccagacacaaaagccatatgttgtatgattcagtttacataaaatgtcctgaataggcatattcacaggcacagaaagtagtttagtggtttccagggcctgtggggaggggagtatgtggagtgactactaataagcatacagggtttattattgggatgaaaagaatgttgtggaatttggccaggtgcagtggctcacacctgtaatcccagcactatgggaggccgaggcaggtggatcacttgagatcaggagtttgagaccagcttggccaacatggtgaaaccctgtttctactaaaagtacaaaaattagccgggtgtggtggcgtgcacctgtaatcccagctacttgggaggctgaggcaggagaatcgattgaaccctggaggcaaaggttgcagtgagtcgagatcgtgccactgcactccaacctgagcgacagagtgcaactccatctcgaaaaaaaaaaaaagaaaagaaagaatgttgtggaatttgatagttgtgatggtttcacaattgtgttaacatactaaacatactaaaagccactgaactgacacttttttaaaagggtgaattcatggtataagaattatatctcagtaaagctgttatttaaaaaattctggctctacctcttactggctgggcgactttaggcaatgaacctaaagccaagtcatctcagctatgaaactggaataataatacacttcacagggtctttttgataaacgagattgtgaatttgaaaatgcttctaaagtgtaaacctcacatatttttggactgtcaatgggttataagttcattataaattggatttttaatcttctcctcctgtgtttttcacaatactaacaaggtctgggtacatagtgatcactcaaataaagatttattgagttgattcaaatgtatttcagttttattcaattgtggtaaatgaaactacacaacaggaaatctactcttttaaaagttttcaactgttaaaaacggtgttatgaacgatatgcacattgttgtacagcaaatctctagaaccttttcatcttacataactgaaactatatccactgaacagcaacttcccatttttacctactcccagttcctggcaaatgccattttactttctgcggtatgagttagactactttacatacttcgtataagaggagtcatgtaggatttgtccttctgtgatgggcttactgcacttagcataatgtgctgaaggttaatctatgttgcaacttgcgtcagaattttcttccttttaatactgaataatattctattgtatgaatatactgcattttctttatgcatccatccatcaattaacatttaggttgtttccatctgttgactattgtaaataatgatgcagtgaatatgagagtgcaaatattttttcaagaccctgttttaaattcttttggataggctgggttctgtggctcacacctgtaatcccagcactttgggaggccgaggagggtggatcacctgaggtcgggagttcgaaaccagcctgaccaacatggagaaaccccatctctactaaaaatacaaaattagccgggcatggtggtgcatgcctgtaatcccagctactcagagggctgaggcaggagaatcacttgaacccgggaggcagaggttgcggtgagccgagattgcgtcactgcactccagcctgggcaacaagagcaaaactccgtctcaaaaataaataaataaataaataaataaataaatgaattcttttggataaatacccgtaagtggattgctggatcatatggtagttctatttttagtttttgtttgttttttttttttttttgagatgcagttttgctcttgttgcccaggctggagtgcaatggcgtgatacccattcactgcaacatctgcctcctgggttcaagcaattctcctgcctcagcctcccaagcagctgagattacaggtgtgcgccaccacgcctggctaattttgcatttttagtagagacagggtttcaccatgttggctaggctggtcttgaactcctggtcttaggtgatccacctgtcttggcctcccaaagtgcctggattagaggtgtgagccaccgcacctggccctatttttaattttttgagggccttccatattgttccccataatggctgcaccactttacattgccagcaacaatgcacaagggttccgatttcttacatccttgccaagatttgttgttttcctttctttttttttttttttttttttttttgagacagagtctcactgtgttgcccaggctggagtgcagtgggatctctgctcactgcaacctctgcctcttgggttcaagtgattctcatgcctcagcctcctgagtggctgggatttcaggcacccaccaccacacccagctaatttttgtatttttagtagagatgagttttcaccatgttggccagactggtcttgaactcctgacctcaagtgatcctcccgcctcggctttccaaagtgctgggattataggtgtgagccactgtgcctggccatattatcctttttttttttttttttaaaagaaaataatggccattctaaaaggtatgaggtgatagatacctcgttgtagttttgatttgcattgtcctgatgattagtgatgttgagcatcttttcatatattttctggctatttgtatgtcttttttggagacatgtttattcaagtactttgccaattactaaattgcatgatttattttcttgccgttgagtttattgagttccttatatgttttggatattaattccttataagaaataccgtttgcaggccgggcgcggtggctcacgcctgtaatcccagcattttggaggcagagacgggtggagcacaagttcaggagattgagaccatcctggctaacacggtgaaaccctgtctctactaaaaatacaaaaaattagccgggcgcggtggcgggcgcctgtagtcccagctacttgggaggctgaggtaggagaatggcgtgaacctgggagatggagcttgccgtgagccaagatcgcgccactgcactccagcctgggcgactgagcgagattccatctcaaaaaaaaaaagaaaaaaagaaagacagaaataccgtttgcaaatattttctcctattctttatgttacctttttactctgttgattgtttcctttgctgtgcagaaacttttaagtttaatggtgtctcacttttctgtttttgcttttgttgcctgtgctttgctgtcatatccaagaaatcattgccaagaccaatgttatgaagattttcctctgcatttttttctcagagttttatagttttcaccgggcgcggtggctcatccctataatcccagcactttgggaggccgaggtgggcagatcacgaggtcgggagtttgagaccagcctgaccaacgtagggaaaccccatctctactaaaaataccaaaattagcctggcgtggtggtgcgtgcctgcaatcccagctactcaggaggctgaggcaggagaattgattgaaccagggaggcggatgttgcagtgagttgagatcgggccactgcattccagcctgagcgacagagcgagactccgtctcataaaaaaaaaaagaaaaaaaaacaggtttttttgtttgtttgttttttgtaggggaggagattcactcttgttgcccaggctggagtgcagtggcacaatcttgactcactgctacctccacctcctgggttcaagcgattctcctgcctcagcctcctgagtagctgggattacaggcgtccaccaccactcccggctattttttatatttttagtagagacgcgatttcaccatgttgcccaggctgatctccaactcctgacctcaggtgatccgtccacctcggcctcccaaagtgctgggattacaggcatgagccaccgagcccggccaaaaaaaaccaaaaaaacaaaaaaccccccagagttttatagtttcaagtcttatgtttaaatcttttatctattttttttttgagacggagttttgctctgtcgcccaggctgaagtgcagtgacacaaccttggcttactgcaacctctgcctcccaggcaattcccctgccttagcctccagagtagcttggaatacaggtgtgtgccaccaggcctggctaatttttttgtatttatagtagagatggggtttcaccatgttggccatgctggccttggacttctgacctcaggtgatccacccaccttggcctcccaaagttgttgggattacaggtgtgagccactgcacccagcctcttccatccatgttgagttgatggttgtgtatgatataagacaagcttgtccaacgtgcagcccacaggctacatgtagtccaggacggctttgaatgctgcctaacacaaatttgtaaactttcttaaaacatgagatccttttttttctttttttaactcatcagctatctgtagtgttagtgtattttgtgtgtggcccaacacaattctaattctcctttttctcctcctccttctccgcttcctctttctcctccttctcctccttctcctccttctcctcctcctcctcctccttcctttttttttttttttttttttttttgatatagagtttctctctgtcgtccaggctggagtgcaatggtgcaatctcagctcactgcaacctcctcctctcaggttcaagcaattctcctgcccaccaccatgcctggctaatttttgggcaggtacccaccaccatgcttggttaacttttgtatttttagtagagactgggttttgccatgttggccaggctggtctctaactcctgacctcaagtgatctacccaccttggcctcccaaagtgctgggattataggcgtgagccactgtgcctggccttaattcttcctccagtgtggctgagggaagccaaaagattagacatctctggtataagattacagtttagtttcactcttttgcatgtggatatcaagttttttcaacaccacttttttttttttgtttgagacaaagtttcgttctccttgcccaggctggagagtaatgacacagtctctgttcactgcaacctctgcctcccgggctcaagcgattttcctgcctcagcctcctgagtagctgggattacaagtgtgtgccaccatgcccagctaattttttgtatttttagtagagatggggtttctccatgttggccaggctggtctcgaactcctgacctcaggtgatctgctctcctcagcctcccaaagtgctgggattatagatgtgagccactgcacccagccctctttcttcctttttttttttgagacggagtctcactgtgttgcccaggctggagtgcagtggcgcatttgtggctataaagttccctgtgagtactgttttggtgtgctgtgttttcattttcatttgtctcaagatattttctaatttccttttttatttctcctttgatccattggttgttcaagagtatgttaattttcaaatatttgtgaattttttagttttccttctattattaatttctagttttattccattgtggttagaaaaaatgtttgtgtgatttcaatcttctcacatttgttaagatttgttttgtaacctaacgtgatctgctttggcaaatgttctgtgtgtgcttgagaagaatatgtgttctgctgctgttaggtggaatgttctgtatatgtatggcagtttagttgagtttatagtgttcaagtctattgtttctttagtggtcttctgtctggatgttctgtgtattgttgaaagtatggtgttgaaatctccaattattagtgggtggctatctatttctctcttcagttctgttaatgtttgcttcatatatttgggtgctctgatgttggatatataaatatatatatattttcagatggagtttcactctgtcacccaggctggagtgcaatggcactatctcagctcactgcaacctctgcctcccaggttcaagagattctcctgactcagctacctgagtagctgggattacaggtgcccaccaccatgcttggctaatttttgtatttttttgtagagacagggttttgctatgttggccagactgctctcgaactgctgacctcaggtgacctgcttgcctcggcctcccaaagtgctgggattacagttgtgacccaccattcccagctgggttaatatatatttataattgttgcgtcttcctagtgaattgactcttttatcattatattatgtccttctttgtctcctatgatagtttttgacttaaagtttattttgcttaagcatggctactcctgctctctcttggataacatttgcatggaatatgttttttcatcctttcactttcagcatatgtctgtctttaaatctaaagtgagtaccttatagacagcatacagttggatcatgttttttttttaatccacttagccaccaacagaattataatttttaagcatttatcagaagtaaagacatttagtaatgattccccccttcattttatatacctattttctctttattttatttttttaacagagtcaacctatttgatttcttgacaagaccacaatctgatcccaaagatgtgctccacaaatccaggcaaatgggtcacctttgatgatgatcctgctgttcaatcttctcaaaagtcaaagaattttcctctggagaatcaaggtgtctgtagaccaaatggactgaagctgaaccttcctggcctcagggaatttcccagtggatcttcctccaccagcagcactcctctctcctcccccattgtagatttttatttcagtccaggacctccaagtaactctcctctttctacacctaccaaagacttcccaggttttcctggcatccccaaagcagggactcatgtgctttatcctattccagaatcatcttcagacagcccactcgcaatatcaggaggagaatcttccttactgcctaccagaccaacatgtttatcccatgccttgttacccagtgaccactcatgtacacatccaactcccaaagtaggtcttccagatgaagttaatcctcaacaggctgaaagcctaggattccaaagtgatgatctcccccagtttcagtattttcgagaggactgtgctttttcaagtccattttggaaagatgaaggcagtgattcccatttcacccttgacccaccaggaagcaaaaagatgttctcatcaagaaacaaggagatgcctattgaccaaaaaagcctaaataagtgttcactcaactatatctgtgagaagcttgaacatctccagtcagctgagaaccaagactcacttagaagtttgtctatgcactgtctatgtgctgaagaaaatgcctcttcctttgtcccccacacactcttcaggagtcagccaaaatccggatggtctttcatgctgagaattcctgagaagaagaatatgatgtcttcccggcaatggggaccaatttttctgaaagttttgcctggaggaattttgcagatgtattatgaacagggattagaaaaaccatttaaagagatacagcttgatccatattgtaggctttctgaacccaaggttgagaacttcagtgtagcaggaaaaatccacactgtgaagattgaacatgtgtcttacacagaaaaaaggaaataccattctaagacagaagtagttcatgaacctgacatagagcagatgctgaagttggggtccacatcgtaccatgacttccttgactttctgactactgtggaggaggagctgatgaagttgccagctgtttcaaaaccaaaaaagaactacgaggagcaagaaatttccttggaaattgtggacaacttttggggtaaagtcacaaaagaaggaaaatttgttgaaagtgctgtgataactcaaatttattgcctctgctttgtgaatgggaacctggaatgctttttaaccttgaatgaccttgagttgccgaagcgagatgaatcctattatgagaaggactcagaaaaaaaggggattgatattcttgactaccattttcataagtgtgtgaatgtacaagaatttgagcaatcaagaatcattaagtttgtacctctggatgcctgccggtttgagctgatgcgtttcaagactttgtataatggggataatcttcccttttccttgaagtctgtagtggttgtccagggagcatacgtggaacttcaggcttttgtcaacatggcctcattggcgcagaggtcatcctatgctggttccttaaggtcctgtgacaatataaggatacactttcctgtcccatcgcagtggatcaaggccctttggaccatgaacctccagaggcagaagtctctgaaagctaaaatgaaccgccgagcatgtctggggagtttacaggaacttgaatctgaacctgtcattcaagtcactgtggggtcagcaaaatatgagagtgcctaccaggcagtggtatggaagatagatcggcttccagacaaaaattcaagtaaatattcaacaccccaagtttattttcatgggaaatagcttaaatattcttaccttcctccttgggttgaaaccaggtagagacagatggcaatttgtcagctgaggctgtgctttggggtaggagatggaacatttagctaaacagctggtttatttgtttccttttgcacctatttctaccagataagtttaactgttgaacattttttaaatatcatacgaaataccatgctaggctaggaatttgttgtggatggcggcactaagagaaaattcgttgatatccatggttgagattaacgcatcaacttcaaatgttaaaaatatttctaatatagctgagattccctaattaatctctaaagatctgtcatccatgaatatacctgaacttctttgcattctcagctgataccacttcttccttaggtttgctccctgctctttgaaataagactgctttcatttttacccaaattgatttttgttgactgaattcacccatttggtcatctcaacttgtattgtttttgtttttgacatggcatctcactctgtcatccaggctggagtgcagtggcacgatcacggctcactgcagcctccacttcccaggctcaagtgatcttcctgcttcagcctcctcagtacctgggattacagatgcataccatcgtgcctggctaattttttgttttttagtagagacggggtctccctatgttgcccaggctgctcttgaattcctgggctcaagggatcctcccacattggcctcccaaaatgctagcattacaggtgtgagccacctcatctggcctaaactggttgttttagaattaggtggacacacgtgagtgttaaaaattcagttaatttttaaaaattttgcaaataaaaattatctaaaagtcagaacttgaaaagacagttatagtaccacatttattttggagtagtaagtaaatagtagtggacataatataataaagtcaaaaaccaaattttaaaattagagctctttcctattttagttgagggttgttggttttttttttttttcccccctagcagagcactggtcactggtctctggagttaaattggaggtggggttgggggacctgagttgatgcattcatgcatccatcgatccatccatccattgatccaaatcttttttttcttttttttttttttttgagatggagtctcgctttctcacccaggtggagtgcggtggcacaatctcggcttactgcaacctccgcctctcgggttcaagtgattctcctgcctcagcctccggagtagctggaactacaggcgcccaccaccatgcctggctaatttttgtatttcagtagagacagggtttcaccatattggccagggtggtctcaaactcctgactttgtgatcctcccacctcggcctcccatagtgctgggattacaggcttgagccactgtgcccggcccatccatccaaatctttactgagtacttactgtataccaagtgccacatcaagtgctggggataaagataaataaaaatctgatccctgtttccagatggctcacagctgctgtagtccttcagagaaatttaagctcatctaggcccctccaggctgtggacttcagaggaagcatttttctttggggtggccttatggcagtgtttctcaaacctggctatattattattattattattttgagatggagtcttactctgttgctcaggctggagtgcagtgcgatagctcactgcaacctctgcctcccaggttcaagtgattttcctgcctcagcctcccgagtagctgggacgacaggcgtgagccaccacgcctggctagtttttttatttttagtagagacggggttttcccatgttggccagactggtcttgaactcctgacctcaagtgatccacccgccttggcctcccaaagtgttgggattacaggtgtgagccaccatgcctggccaaacctgactatattagaataacttgaaagcttttaaatcatctcaatgtttaggtttcacttcatgctaattaaatcggaatctctggcgggggtgggcggtggggagggagccagattccaagtattttaagatctctccagatacaaggtgtagccagagggaagaacactgctctccaggtgttgtaaagttgtagaaccagaagaacaagccccagactacaattgacttgaggggcagcactgcccgtaccctggaggccatgggaccaccttgtccatgactctctgtttgttggtttaacacctgttgactgatgagagcttgagctatgggcaggatccttcaggtgagagacacaggcctagtgagctgaggagctccaggaccctgtgcagaagggaagttcctacattgtctttcttcctgacaccccatacccttcttcattaatgccaaatttcaccccacagcgttctcaagactcagattaattatgttcagttcccccatactagcaaggatagctcaggcttagggcagagtgaggtggtgatggtgcagcctggtcacagtaaatggtctcaaacagcacattctgatcaactctgctgtgatgggagggaaggtcagtatcttctatgatataatccactgagatgatgtttcctgctttctttttttttctttttttgggatggagtgttgctctgtcacccaggctggagtgcagtggtgcaatcttggctcactgcaaccgctgcctcctgggttcaagcaattctagtggctcaacctcccaagtagctaggattacaggcccgcaccaccacacccggctaacttcttatattttgtgtagagatggggtttcaccatgttggccaggctggtctcgaactcccaacctcaggtgatccacccgcctcggcctcccaaagtgctgggattagaggtttgagccaccgtgcctggcccctgctttcttttataacttggctagagaggcaaattgaaccatttgcatcatcatgccagagaaaccagttttaaggtcttcatacaaggttccaaatggtctattctaaaagttacttgtgctagttttaggttagagggtttaaacaaaatcagagtattagcttttgttttgctcaacaaaaagggaaagagaggcaggcagaaagtcaggcaggctggaatgcctattggaaactcctggatctgcaggtttcccctgaaatctgggtgataaactaactcctgttgttttccgttgatcctagagatggtctcgaggactagaacaaaaggtccaaagcagtttttgcatagacttgaagtggtaattatgcttttgagagagaagcacaataggctcaggctgtgggcttgcccacgtggtgtgagagggacaagagcacaggctccctttgtagtccattcctattgctctacttagagcaggtgctccgggaggccctgaaggaaataagcacttggctaaagcctggccagggtaaccacacttatttttcaaactgagaacccataccaatcatcttttctaattttgggagtgcagacacgtatgaagctttttgtgaaaatgatcctgtttataatactgcatttttttcagagtcattggtgtagttaactgattcaatcaacaagaatttattgagaaggagtctcactcatttactccacaaacatctactaaagttcttctaggtataggttctgtgctgagtgtttaagagatacagacacaaacatgattcctactctaccagaaacttaacagtctagaaggtgagacagactctgaagcagctacccaaatgcactgtggaaaagtgcatagttccaggcttggacaaacatatgcacttagggatcccagaggaaagggtaataaactgcctggggactagggagggcttcgctgaagagctgatggctgggagagtcaatagagtttccatcaaagaaagaaacagcagaaccacaggtgtgtgggtgggggatcttacctaagttttggggctgagggagtggtcggggaagagaccagtgtattaagaccttgtgggccatgctgtggggtgtgaagtttatctgtcaacagggcctcggggttgttttcggcatgactgctacagaatcatatcttgtttcagaaaggctggcatgcagtgcagaggaaagatttaggagtagattatagacacagggaagttgggaggaggtaagggttgctgagcaaaggcagtggcagagagagagaggcaagagatgggtgagcgaattcaggggaggtgcccctaagtgatgacagattctctatgggcatgagggaaagggagggaatgggacaaggtcaggtgctctggctgtggtggataggtgggcaatggtgccattagccgagatagcctgggatcttctcatcactcatccttttaaagtctgtttcccagtcctggccacatgttagcatcattaaagcttcaaacacatacccatatttgggccccatcccctactaatcgggctctatgaagatgaggctcaggtgttgatgtttataaaggctcatgcagccggggttgagaactactgacgtgatcccctaggcagagatcattcctccctgctctgcatatgcctttgtcttccagacctctgttattgctctcccatgagtatttatttatttatttatttatttatgagacggagtctcgctctgccacccaggctggagtgcaatggcaccatcttggctcactgcaacctccacctcctgtgttcaagagatttttctgcctcagcctcccaagtagctgggactacaggtgcgcaccaccacgcctggctaattttcgtgtttttagtagagatggggtttcgccatattggccaggctggtctcaaactcctgacctcgtgacctgcccagtttggcctcccaaagtgctgggattataggcatgagccactgcgtccggcctcccatgagtatttattagcagtggagctcaccaagaacaatgacaagaatggacatttccagggaaactggctggacctgatcttggccttcaggaattcttttgtaaaaccgtcatatcaccaggcccacagaggacaacattttacaggcatttcagtcaattacacagtgataattcactgaacaaatcctttgggatcacagctgctttattgagatcaggtctgtgcacaaagaggaggcccagggaaaacacagtggggctgtgtcaggtggcgtccagagggcatggtgcagctgtgggcctggcttggggcaggacatttctgggattacagggccctgccccaagcttctccgttgagggggtagggagggcaatgcagagagtgagagggtgccagggcaggctataagctaatttgcctcttgagaagtagggtaataataaggttggagcagagaggaaatctttgtcctaaggcagtgcttctcaaacttttgtgggcccaggaatcaccttgttaaaatgtggattttgactgagcaagtgggatctggaatactgtgtttctaacaagtgctgatgtgacgccaatgcatctggcccaaggaatacgcttagaatagcaggatcccagaatgcatctctatttttctatatgacttttagatcagttgtgtatttagagaacataaagtttttaaaaagctctttaaaattttatccttttcaagattgtctcggaaaactttgcattatttgaaaagatacttcgaaaatggaaactgaatgaatagcactggagtgcagtggcgaggtctcagctcactgcaacctctacctcccaggctcaagccatcctcccacctcagcctcccaagtagctgggaccacagcacgtgccatcacacctggttaattttttgtatttttggtagagatgaggttttgccgtgttgctcaggctggtctcgaacttctcagctcaggcaacccacccgccttggccttccgagtgctgggattataggtataagctacctaccgcacctggcaagaacatataaactagtctactatgttctaattataaaacttttttttaaattttttttccttcctgggaatttgagggatcaggattgaccttttttactggggaaatcacctgtgatttctggaaaggtggggagggctgctggtcccttaatgtcccttctaaccagcttgtcaatgcttagtattcctttgacagtgggcaggtctttcattttgcaacaaaggtttgcctgaggcactagctcacagacttcattcatactaaggtgtgaatgacagcagaggagcttaggctttgttggggtgatagagagagaaagagaaaggaagaaagagaaagacagctgaagacaaatgaggatgctggttagccagaggaggtgtatatggtggcacagaattattaaggggaatgagagtggtggaggagcaattaaatatatctacctctaacttcccaatttttcgacttttctctttttttcttctgccctgtcatcagcacgttggttgctctctcctcctccactctgtcatcctcttgctattctttcccttcggccctctaacagttcagtttcaggtgtaaaatattttggttcaggagggactggatatcaactagacctaagattttgtgatttacattccccgtcctaagaaaaggaattatgttgagtgaacaatgaccaaagctggacagttccccctggtggtcagcactgcgacaacacgattttcctctatcttttattcattaattggtgaatttgaaaataatctgttaagccccaaacatgacagacattgtgctaaggacagacatgacacctgtccctgtggggcagaaagtctgaagagggagtgtgttactaaacattgtagagcatttagcattttcaaaagccttaaaaaataagccagaaaacttgaaaggaaaaaggcttttaccatttttaaagaaaagcaggtagaaaggttttgtttctgacattttttgtaccactaagtcttcaatttgggtttagttcttcaattttcatcgtaaaatttccccaaataattttttcttataaagtgtgagtatcaaatcagatcatgtgtagtataatttttaactccgaatgtgtaacattcacagtccctttattagcaaaattatagtaattaaataatactggctttataattgaatagcactttgcaaaataatatgtctggctcatctatattgctatagaatactactgccccagtgctgtatgcatatgaactggttaatcctcacaacagcccttataaggttcaggttatcctcattatccacatttttagatgaagaaactgaggctcagagagataagcaatttgtaaccctagccttaaccactttgccataacaagacagaagaatgcctgcagtaagtgtaaatgaacttactgtatcctcactgcagacagaggactaaaaagagtaatggggtttgcaatctttctgggtgtgtgtgtatgagaatgaagttatcacttgcctccagtgatcaggttgttaagagcacctcagaggccactgttgtcctacccttcctgtaagtggtagagatggctaatgagcatctgttggttaactgattgatgatttctcaaggctttttacagccttagaattctattagtcactctacaagaaacaggttgtatggaacgaaaggtaatttatcttttaagaattaagtgaaatcctttaaactcttgtttttgtgcctaaagctatattctgatggaaatgctctttctctagctatgtcagtggtacagtaatttaatctggttcttgaaattactctttatctcatacatttatttaagtaaagatagccacattagatatggagatgctatgaacaatgcaacagaatcatggaatgtttgtaaagctgctgcagtgattacaatgaaaatattgatcatttccttataacacacacacacacacacacacactatatgacccccatctaaaatctttgaaatatatccagtatctctgggtctggcactgaacctggcctggcatagcacagatgctcaataagtgacaaattgagtgaaaaccaatattagattaaaatattaaaggccaatatgcccatttctactctgtatagctgttccagtcaaagtattttggaaggatgagtgagaattacagtagggaaaaataatttgttccactgaaaaaagaattcttggcctggaacattttctgaaagttaagtttaacttttaaaaatcagaattttaaaataatgcgacttaatttgggctgaagtttatttttgagttatctgtaaatagatggtaaggaaatgaataaattaataattataagatgttactcagtctaagagaaagaggcttgtacaggtcttgagcacattgtagccaaataattatgtttaatataaatattactcatatcttttaattaaggaaaacaattaagtttaagcatattactatattgtttaatataaattaaacattaatattaaaaatattgcttaaaataaatatttagcaaattatattagtataatatagtaattatattgttatatactaatataatttgctaaatatagtaatatttctaattaatattagtaatatttctaattgaaaacatttttaggagttcatctgtgcctgcatatagtaatatattttttatttttatatttttgccattcttattcaaaatagtaatgaagttgtacttgtttttaaagctagtacttaaaaatggcagacagctttccccctagttggtgcaaaattgtagattttcatggtatgttgtttaaatggaatttgcactgctgcagtgctaatgaaattccttattaaggagagagatgagtgccttttatgttcaagagaaatgttcaatggccattaaaatactttgactatttgattttttttccctcgaggtctagatcatccccattgtctgtcatacaaattagagcttggatcagaccaagaaattccctctgattggtatccatttgctactgttcagttttccgtgcctgacacctgtgcctcaaggacagaggtcaggtctctgggagtggagagtgatgtccagccacagaaacatgttcagcagcgagcttgctacaacatccaggtacatcccaaaacttctagaactgtgacctgatttggctttaaatatttgttttgctgtcttttgtgatcgtgtatgtgttgtgtgtgtgtgtatatgtgtggtgagatttgccctagagaggatctcagctatggaaacttgatggccaccattgagcttagttcttcctatccattctggagaatgttgggaacacttaataatttagctctcaatgaaaaacaggacattaaaaatgaatctacattttagaagcatatttataataaaaattatgatgttaggacaccatttctcaaaatatgtgctgcagaacatgtgtcccatataattatccaacaaaagaataagttggggaatgccgtatactaaattaatgttaaataaaggctcccaagaagtcctgcaataaggaaacttgttaaacttagttaacccagtttttcccaactcattggctattgtgtcttgtctttgtgggtatgtgtatgtaaaacacttatccctatcttgtggaatagtgttctgtggagcatgctttaggaaatgctgagttactctattatggtagttttcagtttttttttttttaagacggcatctcactctgtcacccaggctggagtgcagtggcattatcttggctcactgcaacctccgcctcctgggtccaagcgattctcctgcctcagcctctcaagtaactgggattacagccacccaccaccacacccagctattattattattattattattattattattattattctatttttagtagagatggggttttgccatgttggccaggctggtctcaaactcccgaccttaggtaatctgaccctctcggcctccccaagtgctgggattacaggcgtaagccaccatgcctagcctattggtagcttaaagttttattttaaatttttaaatagagatgggatctcactatgttggtcaggctggtctcaaattcctggtctcaagtgatcctcctgcctcggcctcccaaagtgctgggattacaagcgtgagccaccgtatccagcctggtattatggtagttttaaatgtttgccatcagctcttctgcattcttaggcagatgaactaaaggaggacatacacttacatctgtttctaaacttgttttcccttcttatcctcaagtttagtagatatatggatgtctcctgccacatatttcccacagtatcttgaaatggtgatgcatcttgctgattttgtttaaaaggttttctttattttgagacagagtcttgctctgttgcccaggttggagtgcagtggcatggtctcggctcactgcaacctccgcttcctaggttcaagtaattctcctgcctcagcctcccgagtagctgggattacaggtgcctgccaccacgcctggctaattttttgtgtttatagtagagatggggtttcaccatgttggccaggctggtctcgaactcctgaccttgtgatctgtctgcctcggcctcccaaagtgctgggattagaggtgtgagccaccacacctggcctaaaagtatttttaactagaaaatatttcaaaaatcacaaaaattaaatagtgcattacagacaggtggttcagtttagaatgtatgtttcccttctgtctttcacatgagcaacattttataatttctaatagcatttattttatttttaaaaatttaaattttgcctgttacacagccctcaggaggtcctgagaacatgtgcctctcaaatagcattttaaaatctatgtgttgcttgacttgcagcaaagattaatgccattctgattttctactaatttatttctattaaaaatagtgatattatacatgacatcgctaatatcaactgggtttcctatactatagtaatgtgagtcaggatttttctttattttggactatctgtttagaagtctatgtttgggtccagttatctttttctactgataaaagtaatgataggtagtgctgtcctgtgcagccccttcagacctgaaggatgtatttccccagcaggtgggaattgccgccgctgaagatagctgcctttcctgaggtcatgcctccttcctggaatctatgcaggggtgtataggcccctttgcatcaacttgggctaacgctgtaggtcagcccagcttcagctctccagggcatggacagaagccttcattctgactacattgcatcccagcttctctctctgcccatttagcttcatttcctgcctcactcccccatgaatgttgaactcaacggcactctccagtaaactttctgcacacagatctccatctcagagtttatttcttggggaacctgacctataacactaggtatatatatattatgtgtgactgaaatgtgggtcaagtggcatggagactgtgtttatacttattttcctattcacagggcatgccaggttcatgcaattttagtggacaattaaaaattactttacaaagtatctcttgctttagtagcatttactagttgatgtgcacctggtggcagtttcaaaatgttttcttccatttagtaattatctgttgccagatactgctccacatgcagggacacagcagtgtgaacagagagacaaagtccctgtcctcatggagcatagtttctagtgggggtaaacgaaaaatagttagtagataaataaataaataaatatgatttcaactaataacaaattccaagaaggtaataaaatagggtaacgggatagagagtgactggagggctttatcaggggtagtcctggaggacctccaggaggatgtgacatttgagctgagacaaaaatgatgaagagcagatggtttactattaggttgctgcaaaagtaatcacggtttttgccattagttttgcagcaacctaatagtttgtaagatggcttgtttcaattagataattttgggtgcattataaatcttaagggggccaatggctagatacatgatacagccatatattcaggtagagggataattgatcatatgtctagtcagatctgtaaattttttttcagtatacatattctgtatacattttataaaaactacgtttgacttagaagacagttttggtgctcttgaagacttgaccctggcggggaggatttgaggggctctgttgttcaaaaggagagcagagcgcctcacttggaagctactgtaggagggtagagggctgtgtctgtgtccaaagggtgaggtttgtgcagtctgtgccacatgtataaaataggactgaagaggtgtgagtgctgtgttgcatttgttaatgctgcctgtgttttgcttttgcataacaggttgaaatagaaaagaagtggattaaaatcgatggagaagacccagataaaattggtgactgcataactcagtaggagtagcaagagtttatgatgacagcccacttgtcaaatatgtaattcaccgaaaccacaccaagtcctgctactgtagagtggaaatgacttctgaatagcggttttaggacaggtctgatggctgtgtttagagaagtttagacctaaaaccgaacaatctgtattttttgcttttcatgtgtttttgtcctaggggttcgatctaaaatgtttctataattcgtgtgatgttttgcttcctattgaaactcaaaggcactgttactcgttgtgtgaccccgcagccagtatgatttttgattactcagtggctgactgttttgctctctggattactgaggtgccgtcttcatttcttcccatctcttcttgctgcttagtgtctgtactagagggtaagggaatcaaaggagacataaaccaaaatagttaattttccctctttcttgcctctgaaatgtggctaggtgtagaatgatgttgaaaccacaggctaaaatgtagatctggaagtatctgtgcttttgaattacttatttacctgtcctcttaccgttggtaaataataattggctatatttggtacctgtctctctcctactgtattgtcattttcaaaatgtgtttgttttctggcgcgtgctgcaaagaagctatttctgttgtcctacatattttagtataaatcactaagacatatttcctttcacttggcaggattcctttcaaaatggaatctgagtattagacactagttaacatatttgtgtatattaaatatgaatttttaaaatttataaatactattttccaaaagtacagactctaaggacatattttgataaagtattatttgtaatgaacacaagcctctcttgagtagaagtctaaatcacattatgattattttatactagttctgctatcatgctgttttatgctaattctgcttattttagagtatttttcattaaaaggtgagcaaagtgaaagatacttggtattttacccagatttctaagtggcaacatttttattcttcagagtcaggtaaatgactataatagtttggtttctaatgaaaagtcaatagcattagcagttataattctgtttataatttcctttcagcatttacagtgaaaagtgagaattttaaaatttatgaaatctatattccaggtattgtttttagtctgaaaaacaaactcccccatgtggtattaatataccttcaatttatgttgagtcttaaacataattaggagatatttttctctatttgctagatttgttttgagtcaaaactgatttagtgttcttccaaacaacatttatgtgttggcctacagagtttatttcatgtgttttttttaatatttaatattatattacattcattgaaatctgttcaaaaacagattaagacaaacatttatgatggtctgtatcaatcagcagattttattgcttttcattattttactgtaaaggcaaagaatgcaataggtgatggttggttgaaaggaattgttattgctgtttttattttttactttttttgagacagagtctcactctgttgcccagcctggagtgcagtgtgtcatcttggctcactgcaacctccgcctcctgggttcaagggattctcctgcctcagcctccaactagctgggattacaggcacaagccaccatgcctggctaaaattcttttgtatttttactacagacggagtttccccatgttggccgggctagtctcgaactcctgacctcaggtgatccaccagcctcggcctcccaaagttctgggattaaatgcgtgagccaccatgcccggccgctattgctctttttaacttcatttgatgccttgcttataatatcatatgcttgaggctcactgttgatgtagagtagggcaaatctgtgtgtgtatgtcattaaaaaaattctaccatctttctttatcatctggtgtgggcgcactctacagtgacttcagtctgctcagaacgaatgtggaggccggccgaaactgatgctgcccacagtcccagtgaagttaggtgggttaattactgccattcctttctaagtgtgttttatggcatcctgcccacaaagaactcacagtctgattaggatgaacttaatgactatttacacctcaaaatatattcagcaaagggttcacttagttgcccctcatgcttcacaggttgactagtatctgtgggtacctccctgcccaggttattcactcacaagccaccgggccttcaggacatctcaagattcagtcttgacaatataatagcaaaagctggactaaagcccaaatggattgtctgtggcaatgcagaagctgatagcattaacagcagggtgttacagcataattgttaattcgcacatctattaggatccttaaatattcattacttaatgttaaattaacattctgtgtagggaggggaggcttattcaattcttctgacctcagaactggcagaaggtcagatgtgactacagaactctaggtgaaaaatcaggtagggttcaaattaagtagaactgcccttgccggaatagtgatcttcaaaaaacccttgcttttaggggagggaagcggggaaggaaaggaatgagggaggaaatattcctttctagcattcattttgcttagatcactccattgtgagtttgaccattttggagtcaaatgagcagacttccaaggagttgaccagtttgtgactagtctggtcacctttccagttacaggatcatattaactgtgtaaatgaattcatgggtagatgatttgtgcagatctgaatttaagaacatttcctttttctgtgggaatcacaagagtttatccactaaaaaaagatatgtaaaaaagatactttccagcacataaataaaggctggaattttacaacctgatgtatatattagacagttctaggatgttagttcccttcattccagagctatgcttgtgatacagccccttttcttataaagtcagttagaaggacttccttaacaatgactattataatgtcttacttaaaatacagttttgtattctgtcaatgcaaatataagacaggttgagccttaatcatgtaacaaaatattttgtagattacatattgatttttcaaaaattaaaaatgtatttcaaactattcttactgtgctgtgaatttatatcttcttctgcaagacctggggctatttttttttcttaaggtatgaaatcaatttcaataaccttaaacaattgaccctctgtcaggcatatgtcaggctccactcttaaggagtcagtgaccatgacctctttgcatatcctggaaaaatgacatcatcaaagtatagttgataatgttataaaggatgattttaaaaatagggtataatcatgactcacaaagatatgaggctgggtgtggtggctcacgcctgtaatcccagctctttgggaggctgaagcgggtggatcatgaggtcagaagatcaagaccatactggctaacacggtgaaaccccgtctctact

SEQ ID NO: 56 - DNA, 265256 bp, Homo sapiens
acacttcactcaaatggctggctgcagctggtgctagttatggtctgggatctcagatgaggctgctaagccgaatgtgttgttactcctttacatcgtctctccacatggcttgaacttctcacagcatgcctgctggattcgaagagatggcattcaagtgcttaaaaatgtaagcaaatctcttaatattcagtcttagtattacatagggcttctactgccatattctctggttgaaaacaatcattggatcagcccaaactaaaggggtagagaaagaaattccacttctcaaggaaggaatgacaagttttgggccctttttaatcaacatccaagtaagctgcttgtgatgaaagtgaaggtggggaacggaaaaagtgggaaggtaaagatcaaagcaaaatgctccagagtccttaaaaagctaaccgtgtaagcttggattccaagagagagactccagatggagctaggaatagaaagatttcctagtaattgggagcaaggtagatgaacatttacagtttctcctaatttctgtagtcaggcttcaggtacaaacttaggctaatatgttgtctgttaattatatgtatttcttaatcatatattggctgaggagataccttgggagggttgagagggaagataactgagagatggtgatattgctaatactaccgatatacgggacccctctgcaattacatcttttagttaatttcatgtgtatatattcagccattgacagtataatctgtatcctctgtgggtaggagccacagcactgtatttatttcgcattctcaatcacgcctacagattcagttcattcagactgttgtaaaaataaatgcggctcaaaaatgcagctcccccatgtaacctcctaggcaaaaagagacagaataaaatcagccaaccattttttcacaaagattgctgcctagtaatttcagggaataaacttttagttaataccgtaagtgcagaggcctgcagcatacacccaggtgaaaagtttcaccccacattgacctgtcttagggagaggcaagcacttgctgaagaagcaagttctcattactaattagtaattcattattgcatggtttcaagggaaacttatgacctgttaagactaaaaatgaacacaatcattaatgtttccatcactttggaataggaaacaatttcagtctaaagtgcatgatttctggaatgtatttctcgatgcttctgttttttgttataatatttcttgaaagcctggttaaaaaaataaaaatagctatgtttagcctaaaatgattacttttctctgccattgacaatgaggtagcatttactacaaaattggcattacatgttctttgctatgaacataactttatttgaatcaaaaaagtcaagcaacaaaagtttaaactcatttctttgaattttgacaagggtgtaaaactgggataattttcattaaatgtgttatacatttagcagagtaaaagcaaataagtatttattcactactgagaaaattacaaattataatcatgtgggatcctaacaccggaatagaaaacaagagaatagattataagaaataataagaaaaacaattgggattttttcccccagaaatctgggggcaagtgttgcaatgagaaaacataaagttactgattattgtattttattgtcaaatatcatcttaagtcatattgaaaatgtggccatctgttctccagtgtcttcaaaatctaagaatagcccaatcccaatcctttcaaaaacattctaaaaacaaaggatgaaaattatttatattggtagagatagatattttaattgaaatcagtttataaatatataacatttgataaatctgaacacataaaccatttttaactattataaaattattgatttctgcctccaaaattccagtgaaattgtccctaagccactaatcccatggttctattggtttatggcctgtttgagacattttgcttctcttttccactccctcttacaattttttattcccttggctttgtgggcacctctatgccctggtagttttcctcccctctgattgcgttcatctggaacgcaatcctttccctctcccacctttgttccacatgtctgtttcaaatcacccattcctattaataaactcattataacttttgaatctcagaatctccatccctggactatctgaaactcgccattttaaaattcagtacattatcttcttacaaaaaatgttttccatctccttaattaatgtacctatatagcggcatcaccattttaatagtctccttggaaagaaatctaagccatcgaggtgcctctatcctctcccttctatgttactgcatccaatatattaaactctcacaattcagtttctggcatttgtcttgaattcattctttcttctctgaccccatagggtgccagccctccattcagtctttttcctcaacaattctgattattttttctgtgtctttgctcccaaaagttgccttttttatcatcttgggagcttcctctttataatatgtacactaggacataaaactaaataaaatctctccattttctaagaaaaaacatacagattccatagaatccgtgcaatagctatcagtcacctaattgctagtttcctctcctaacactcccagtcctttcacctttgttatctaacattagaggaccatgccaactgaagcctatctccatgtcaatgtacatgatttttcttcctcctgaaatattctaaaattttcccacctggtaaatttcagattactctttaagacccaggtgaagtgttgttttatctgcaaagagtctcttaaggaagttcattctctcctatttgctataatattaatttgaacatttctttattattacctgatgttgcattgtatttatgaaggatgattgtatgcatgaaggattataccactaaacttcagcttcttgaagaagtagtccatttcttcttgatctttatattaccagtgccacaaataagcactaagaatacttaaatgagttacttgcattattttgcataatgcactttagtgtttggcaggcctatactcaaagctcactctgacacttagttgggtgattcaattacctaatttctcaaaatcacatttgcctcatctgaagacattggtacctacctcacagagttgttgtgagaactaacattatataatgcatgtgaaatacttagcatagtgtctgacacttaataagtactcaataaattctgactgctactattataaggcttcagttgaatagaaaaggaagtagagacagatgaaatagaatggtttgggataaaattgagaagtcaaaggaatgaaagcttaattaatttgagtgatcattttggtagagataaaggaatgagaataactggaataaaaggaggttgtagtgagagagtgttataaattattatattctgtcagcagtttaatgttctgctctagagcactgcattttgatgacatgatccaaaatactgtcataagtaagggtagacaagatggattgtaagataatcagagttgaggtgaacaagaaattaaatgttgtgaaatattattgttgaatttggaaatgtttatattcagtgattgtcatagaaatttcagatagtagataggccttgggttaagaggaatagtgtgaatcagtcagcagattctttaaaatatgttcaggagtgaccaagaaattggtaaagaacagtgatgtgaatgggttaaaggatgacttatacaaggatgggagtacaatgaactggaaagttagatttgtgactcaatcgtttgcttttgtgaaacaaggcatacgggaggatggacactctctactgtaaagcaggggctgatcaccaaggcccttaaatctggcctgctgcttgttttgtaaatgaagtttcattgaaacacagcaacactcattaatttatacattgtctgtggctgtttttgtgctgcagtgtcagagttgattaattgcagcaaaaaccatatggcccatgaagcctaaaatatttactatgtggccttttatagggaaagcttgcttaaccatgttctagaagtttgcagccaaatcagtgtcttctaatatatgctagggtataattaatgcaaggaattagaaaagaattttgtgtctagttgagaacatgaagaggagtttaccacaaacagtggatttcagaaggtctggtgaattttaagagaggtaagaaaggaagcaggagaaattgaatgtgtccaggaggagcagcattgagcaatatgagagtggctcctagaaggtggtcaaactgaaaagcttatctttggggcagtgactaagaatttctaagcataactaaagaggcctaatgacacctaaagaatcatggtgtcaggttctataagcgccggtgtaagctaatgcctcaggtgatgccagatacctgacaatacaaaattcgcccacccaataatggtgaggccctggttgggatcctaagcctggggacattactgcataaatagaagtaattataccaaaaacaacttaacacccctaggctacaagtccttgtatatcccaaggattgctagaccacaaaccaaaaatgaagacaatcattgtatatgagcaatctatcatttcatttcacagtatagcatctagatagatagatgagtgatagaatgatctctctctacatgcagaaatatatatcaatatatgtatatacattatcttatctatctttagtcattctttttcaggtagagaattctagatgggggaatttcaatgctcaattcttgaactacacatttttacttaggacaaaggaaaataggctgtactttttagaatataaaatattcatcatttcccaataagcattatagttaccacagcctgcttaaagttgttcattgttaactgacattcaaactgtttggatttcaagtgaattaaactgtcaaagctcagcagtatatttatcatctgtgctacacacacaaatttatttaccacacacttcaaacatctgttactacattttaatagtagttgttgacatgacagagtaaaaaagtaaaatgagtccatttaaaaggttgattatggtgcaaaactggtaaaaatgtcatgcatgtgtatatccttcaaagatatctatgagcacagggaatgtgatcggggcagcaaatttaaatccagaggtacagaaacacagtgagcaaccttcggtgatatataaagactcatatttagttttcatttaaggcctagataattcctgaggagaaaatgacaatacaatgtaattctcttattgcaaagtaataagagaaatgaatataaagttctgcctgagggaatgagaaatacttcacaaagaatcaaatttttatcctaagaagaatgagtaggaattcactacccaagaggagagactgtgtttggcttgccttactgttacgatagtaacagaaggaaagtaagaatgtgaaagtcaggtaatttttcaaaggcatcattgattttaaccattactcaatttcagatatacattcagttgtgtgttgatacaaataattatttacctatcttttattggttgcattcatttatccattccttttaaaaaatatttattgaaccactgccatgtgcgaagtgcagtagtagtcctgggtaaacaaagatgtgaaccttggaacgtttactcaggtaaaaagacagaccttagagggatcagtgcaattcctggagtaatgttaccacagagatgtggtaatgttgtaatgtgtaatgttatcacagggatagtaatgacagaagtttttcccattgctaggtgggaaagtcttaattaaggggataacttattatagcaaatccacaaaagtataatttttgtaagaaaattttttatgctctttttaggataaatctttgatagtaaccaggctgacagacaaggcaaggaaaactttctgtttgttgccactggaatggaagcaataaagatttttcaaatatgttgcatagcatttcaatgtggaaagggaattagtttagctaatccattttacttttaaagagttataagattactgcacttatcccattcaagaaagaaattattgctgacctctaaagtctcttccaacactgacagtctgttagttaataaccattggaaatgttaaaaataaacaatattaagtttcacctgagtttatgcagtgctgaggacaacgcttttttttttctcagacatcagaatgggttgtggcagaaattcctctcttatttctccaagacatcttatcatatttgtaaaagtaattaacttcaagtacatattttctgatcattttggccattgtttgtaatgtaaaaagataaattatactgctatgctatataaaagaataaaagaagtggtgttattttgattgtgtatttttaattttaaaatgtagattattttaatgttatattcagtaatatttttgaagttgcttgtatgtgattcagttatttatagcaggctaggaccagacctagaacaaaatcttcctgtataggaggaacaggcgctgcttatagaaactgaatagcagatgctgaggggaaggacagtctgaaggacagaatgcagtattcagagcagtgtcctgataaggaggtttgaggagggcatagagacaaattccaacagcagcattcaggattccaggagaaacgcctgaaggacacctgtcagcaggtagctcactggattgcaggcactggcctgagtttcaacgttaaactttaagcagggaacctggagaagcaaaataagccacagtcttagagaagctggggtcacagacatgtcacaaagactttttaggcacaagaaacaatctaaatatccagttaccaggtctagtatattgggaggacagtgagttcaaagaaaagcagtagttcaaagacaagttttgtggggaatagggaatccttgtacactcttggtgggaatgtaaattagtgcagctatgatggaaaacagtatggagattcctcagaaagttaaaaatagaattatttgatccaacaatcccacttctgggtatatattcaatgaaattgaagtcaggatcttggagagatatctgtactttcatgttcattgtagcattattcacaatagccacaatatggaaaaaacctaaatatccctcaacagatgaatggataaagaaaatatggaatatatagtgtgtgtttacatgtatatatatataaaatggaatattactcagccttaaaaagaaaggaaatttgctatttgtgacaacatgtttgaatctagaggacattctaagtgaaataagccaggatgaacactgaatgaccccaacttttatgaggaatctaaaatagtcaacctaatagaacaagagactagaatagcagctgacaggagctggagggagggagaaatggggaagtattggtcaaagggtacaaaattgttttagtcatgcaagatgaataagttttggatatctactgtacagtgtatggcctgtggttaacaatgctgtattgtatacttaaaagtttgctttcatggatagatcttatgtcaagtactcctgcaaaagaaataaaaaataaataaaggaaacttatggagatgatagataagtttatggcatagattgtggtcatgattttatgggtgtatagttacctccaaacttatcaagttatatgcattaaatatgtacagcattttgtatgtagattatacctcaataatgtgggtattttttaaaaaaagcagtaatatatttattaggggcttagtctctttgaaccatgacattttaattccttcccttgtcccttccctatcaacaccagatgtctgacgtggagtccaatcagaggtagtaagtcagtggttattagaattgactcagattcgagtattttcaaaccaatatttctaagttctcaaaattatattaaaagtgtttaagaaaaaggaaattcaattattcattaataagcatttatagttcttacactgtgtaccagttatatattaagtgctgaaaataacaagatgaataaaacatgacatctgtccttgagaatctcacagtctagaggacaaaaggacctgataaagtgtaatgcagtaaggtaagttctgttatcacaaacctgaagaataaccttgagttttttaagggatagctcttgctcagaaactcttaatcgttttaatatctccccatctattgctaactgaaaaaggactatgctttatcttgctgtcaatccagcacatgccttacccacatctaccatttccataagaattctcccctccacttcatactcagattcttgtgatctaaccaaattactggcttacctgtcaaccctcagacacaatttattattttctgcacttttatttgtgcttaaggaatttctttcaacctaaaattttcatcttttcctctccatttttcaaatccactgaaggtcatcaaaaatattgttttctccttggagtgtttactgaattctccagacaaggcaatttctccttcctttagactggcataataaattccatgtttcacaggaactgttcatagacattgagcagtgactagagttacacttcaattatttccattcaaaccctatcatagaatcataatttagggactctgtgcaggaaccatatcttggtgattattttgtatctgccttacaatacctaacccagagcctaatatatgataagcacttaaaaaataccatgaatgcttcaatataatataattccccaaatagagtgagcctccatattcccaatgagaattttactaattaaatgattttgcccaagaataatatacattcacttatcagtttaatgtttatgaggttatctaataactagttttaattcttagtttattaaattagttacatttacatatttaaaccgcatattttaggctgagctcagtagctcactcatgcaatacttgcacttcaggaagtctagggaggaggatcacttgcatgcacaagttcgagactagcctgggcaacatagtgagacctcatctctacaaaaaataaaattagcaaggtgtggtggtgcgcacctgtagtcccagctctttaggacgatgaggtaggaggatcacttgagcccaggaggtcaaggcttcagtgagctataatcatgccactgcactcagtctgggtgacagagtgagaccctatctcaaaactgcaaaaataaataaatagtatatcttttcaaataacaaaattattaagaaatggcatgttttttcatctcactcttaatacatgatacaacttactcaagctcttacacaaaacccgctcatcaagatctttatcttctctagagctacatttaaagtcctcgtgatcatttcccaggatgcaatctaagcgttttttgaatatgtgattcttatagtctttggaaattttatttcacagacataatcaatttacatatcttctaaatggtctttttttttttcatttgaccttggagcatttactgaattctccagacaaaggcaatttctataggtgtatactcataatatcaacatcatatacatctacttcatttttgaattaattggttttatttcttaaagcagcttttgttttacagaaaaagcgagtaggaagtacaaagttccctataacccctcactccctacagtttcccctattattaatctcttacattagtatgataaatttgttacagttgataaaccaattttatatattattattaactaaggtccttagtttacaggtaggttcactctatatgttgtatattctatggctattttacaggtagattcactctttatgttgtatattctatggctattttacaggtagattcactctttatgttgtatattctatggctattttgttctttaaatagacttttttttttaaagcagttttaggttcatagcaaaattgagcagaaggtacagagatttcccacacactctctgtccccacacatgcataacctccccaattatcaacatcccccaccagagtggtacattcactacaattgatgaacatacacagacacaccattatcacccaaagcccatagtttacatcaggatttactcttggtgttgtgcattctatgagtttttgataaatgaataatggcatgtattcatcacagtatcctacaaaataattttaccatcctaaaacttccctgtgctccacctactcctccatccctttcttccatgaactctagaaaaccaattatctttttagtatctccattgtttggtctttcccagaatgtcatacagttgtaatcatatggtatgcagctttttcagattggcttctttcacttaaaaatatgaaagtaaggttctgtgtcttttcatggctggatagttcatttgttttattgctaaataatatttcattgcaggtaagtgctgcaatttgtttatccattcacccattgaagtgaacactcttgactgtttctaagtcttggcaatcaggaataaagctcctaaagatactcatgtgaaattccttgtatgggcatagtttttcaaagaaatacatttcatattacaatgtaatatatacaattgctagattgtacccacaggaatagttatgaaatctgatttaatgtgtttgcatcttttttacacatttttcctgttgacctcaatatatctttgaattcaacattaattgaggttgtttgtggctatggaatcttcaccttggagtcagaaagtttgtcttattaactgattgtaccatttacaagctatattatctcatgtagaataatctttccatatattagtttatctatatgtaaagtgactatattttagggttgttgagagtattaatggtaaattgtagctatatctattagaaatgatttaaataggccaggtgcagtggttcatgcctgtaatccgagggaggcctccttagagaggctgaggcaggaggatcacgaggtcaagagatagggaccatcctggccaacatggtgaaatcatttctctactaaaactacaaaaattagctgggcgtggtggcatgcacctgtagtcccggctactcaggaagctgaggcaggtgaattgcttgaacccgggaggcagaggttgcagtaagccgtgatcacgccacggcactccagcctggcaacagagcgagactctgtttcaaaaaaaaaaaaaaagatttaaataataacttggaaaatgatgcacatgtaaaaattccaagcatatacttccaaaagagcaagcttggattgtctaactcaaaaaaattgacatgagccacaaaaactcacctcctagggccctaagaaaacatacggtattggatacctaaaaaatccaaacctcaccatgcagagttccacaaaattgacagatgtgcattaatatataattttaaactttgccttagaaatatgcaatgtactaattacaaaatcatacacactcctcaattctcagagtattgtaaaatctttggaaaagtaaaatttactggatttgtttttatatactttattaatatataaattaatttatgtacatatgaattctttcattaattatttcactcatgtactccaaaagaaattataaactaattgcagaggataagacatagctggtgacgtctagagaagcagttctgtgttgcagaatagaaaaaagtttttctctgtagccataatgagctggagaggagctgaatcccaggtcagtgattaactagctatataaatttggcacatgatttaatctttctaatctcaatttccttctgtgtgaagttgagataatatttcttatctttctgggttatttgtcaaatggcaagcaatatttgtaaagttcctgattcataataaaagatcttcaaatagtaactcttgtttggatttccttacctaaatcctttatctgagccctttccagcattctatttttcagcaagatatgtaaatggcttaagaaaattggctcatacattagatatttttaaatcaagttttcctgtgtatcctgtgacttaatcttctagatctatcttatatatcatcattgagaatgaaatatataagaatagattatcaaaactacagaattgtttttatattattgaaatttaaaatatttgggtaattctctatgctagtaaaaaattaataatataaatcttccatcatatcccactgctgcttgagctcttttacaaaaagtttttgaaggagataaggtgatattattaataccaccttgcagaagaaaagaaattgggacccttaacaggtaaaaggatttaatctaagttacataatcagtactggatgtgctgacaagacatctcagcctctggcattcttcacatgttatataaatggcatagtattgggtctctaacttttaaatttaccaatagcataattttgtgtatatatgaagttaaagaatttgttttgaaacaaattactggtgttactgtgattgcagagttgctactttttaatcatatatagctccattacataaccaaatgttcaggaaatatttgtaaaactaaaaaaaaattcttactctgtatattaatagaaatgaatatgagattatatgaatgtgacattaaagattgaaggaatgtcctataagccaaaagctttttgagaaatactcaccatttgcctggaaattgaataatgtcacactaaagacaaagctggattgtgtccccttggcattaactatatggcgttaatggcagatagcatgtgaaaatgtgagcagacagttatcataagggatataaaaatataagaagaagctagatttaaataacatttctcaagaaaaatatagccacgattaaaatatagcttttttatcgtatgatttttaagatttctcaagtttaaagacacagaaatacaatttaaatgatctcagggaaaaaagtaatttattggaaggattctaggtcatgttatggaaaccaaaccagaaaaaagagagggctatatttgtaccccagggacactggatctagtgacaggtagtgaacactagaactcacatgacatcagggacttgggctttcatctctgctgcttcttgaatgctcacattgtttttcccttccttttcaaactttctcaacttagcagtaaagttgactacaagcagttttaaagttgtacacctttcaatttaacctccaaagagaaaacattactaactgctgctatctctggttccaagtccaaaaactgcagagaaggtaatcatttgttcagcttggatcatgtgcccaaaactggacaaacagttgtggccagagaaatacagtcttgttagcaacatggagcattcatagacttatggactgttataactaggagacacattaaacatcacttttctaataattttgttttagatattaatgaactgtgacaacaaatgttcagagacttgaccaagtgacaaaacttgaatttgaataagtatctagtgtttttgtaatgcttaaagttattaaaaggaaaataaaaataaatgaagtaggaagagaaggaaatgaagtagaagaaagaagaaggaggaagagagggagaaggaaaaagaaggaaagaaggaaggaaggttgaaatggagaaagaaagtaaaagggaaagaaaggaagtaaaaaacagaaacaaaaaggggcagctcctactgtaattttattgatggagtgagtgggagaagaggttatattataaagtggctggaaaacaatgccatacttgcccattatagtctatgaaccatgacttacgtagtatatatagcaagtagaataaatcaatgattatatttggcttaaattgtcagattattttactcaatttctctcattttgcaatagatgtgctttcccattttgatttttcactcatcttcccttttatctacagatctgtaggctgtttcttataaaacagattcctgggtgaaaaaatttcttggcatcatcacacaaaaaaataattatttggttctgcctagtttaaaatatcagtgtaaaattaaacacttactacaatgtacctccatttcttaataggcactaagcttcattagaaatgtaaattgagcttttacaagcaatatcttttttttttttttagatggagttctgctcttgctgctcagtcgggagtgcaaaggcacaatcttggctcactgcaacctctgactcctgggtttaagcaattctcctgcctcagcctccagagtagtggggattacaggcacgtgccaccacggttggctaatctttgtatttttagtagagacggggttttaccatgttggtcaggctggtcccaaactcctgaccttaagtgatcatccacctctgcctcccaaagtgctgggattatgggcgtgagccaccgcgcctggcctcactagcaatatctttaatgacgccttggtatactaggtaactacataaattattaaaacacagccataggaaaatgtgtctgtcttcatccagattcatctctaaatgtatgaatgtttgagatagcactattgatgtattgtagtattttctttggggctatctgagtaaagtgaataatttgtttaacaatgttgactatttgcctactaagtgccacgcaggtacttagaagtggaacagaaaataagataattcttagagatctagtccagttgagagaaaaagccttgtaaaaggtcattatagacttctggtaatggcaaactgaatattttgaaccagacttcctgaagagcataacaaagagctaaacaaaatatatgaatcattttccttatgtcatcttataactaataaagtaggaaataattatggcttcaatacctggaagaaaccagaaatctagagagaagagcctgctttttggaatccttctgctctgtaggcattggcagcccagaataggtatccgacagattgggcagtactttgggaagattcctgggtccatggaaaattgccttggaaataaatgtcaccaaatagtgtggctctggtaaatcccttgagaatgggttggaatcagacaagcgtactctaggtctgttacaggtagttagacaggcatgagcatggcaggagagggctgttcacccctacccactagcaatgtcaagtgatggtttgacaattatcacactgcctctctaaaaatgataatttggcagcctgtgccagggcatcagggagagacaacctccttaccatccaaagctattaacattaaagtgttaaaattatgcagcagccaggaagaagcaacttcccaggcatatgcattaagaggcaaaatatcagagtatgaccttctggggcgactccaccggaaaagggaaggaatcctcagatgggcatgtgtaccacttcctaaagacagtgcacgtgctcacttcccaagcgtaaagagggcactgcgcatgagggcagctccccctaagggaagaatcacaaaaaggggcataagatgccagcctacaaagtcctaggatgacagctgaatgcgacacttgttcttcaagtcgcccacttggatctcttccaagtgatctttcctttttttcctgttctaaagcctttttaataaacttccactcctgctctgaaacttcctctttttctgccttatgcccctaaattgaattctttcttctgaggaggtaagaattcaggttgctgcagacccgtacagattcgcagctggtaactcagatatctgccaccagtaacaggtctaagagtgcatcagaagcaaaacagctattaaaagtttgagtcatgtgggcgatctcggctcactgcaagctccgcctcccgggtttgcaccactctcctgcctcagcctcctgagtagcagagactacaggcgtccgccaccacgcctggctaattttttgtactttttttagtagagacagggtttcactgtgttagctaggatggtctcgatctcctgagcttgtgatctgctgcctcagcctcccaaagtgctgggattacaggcatgagccaccatgcccagccaaaagcatcagttcttaaagttgggttaaagcaaaataaatgataaaatatgcaggtaaatttaaatgaataccgactgcaaaaaataataatatattgtctcaggggtcttataatatgtacataattaaaataaattttaaaatgcatatactttgaaggaaaaggtgttctgcagtgcttgcattgtctgggaagagagtatcaattaattctagtacatgtttctcaggaaaaccagtgaactatagtaaaagaggaataaatgctgagttaatttgggggaaaagagaaaagaattttaatatgaaagaaggcaagaaaagagattataaagtataagactacataagacaaatagaaaatgtagagcaagattgtagatttaaagccaaatactaaaaatatttaatgtaaataaagacagttgttatctgcctagacaaaaaacgaaactcgattttacactatttaagagatatatgtaaaaagaaaatacagaaaggttggaaagaaaaaagataagaaagaagatggggaaaaagacgggaaaaaagatgctcctgtagtcccagctacttgggaggttgaggcaggagaatggcgtgaacccgggaggtggagcttgcagtgagcctagattgtgccactgcactccagcctgggcgacagagtgagactccgtctcaaaaaaacagaaaaacaaaacaaacaaacaaacaaacaaaaaaacatataattctgcagaatgcacatcatttttattgtctcaagaagaacttaatagcaattagccaaacactagtcataatgtatattcataaaattcaaaggactgaaatcatacagaatgtttcttgaccacaatttagttgagctagaggtcgatagcaaaaacgagccaaaataagaaaaaataaaattaaaactgaaaaatgctcatgtatatacagaaatcatttccaggtggattgcagatctgaatatgaggttgtaaaccaaaaggtatttgagacaggtctcaatcaatttagaaagtttattttgccaaggttaaggacatggcccctgacagagcctcaggaggtcctgaagacatgtgcccaaggtggtcagggttcaagtgtgcttttatacattttagggagacatgagacatcaattaatatgtgtaacattgccttaggtacagtaaatcaggactacttgaggggggcggaggcaaaagactgtattcttttgagtccttgatcagccttccactgaatacaccaatacacaatttggtctggctcagtgaatctacatttttacataaacaatgcagtggagaaagcaatcagacatgcatttgtctcaggtgagcctcagagggatgactttgagttccgtctgtcctttgtccacaaggaaattccctgtgggggaggtatgtagctttttatctttgtagctaccttatttaggaatacaatggaaggcaggtttgggtgacatagttcccagcttgaattttcccttggcttagtaatttgggggtcctgaggtttatttttttttttttcacaaaagtaaacaatgcatgttttacaaagaaaacataacaaaacatcttattgctcttagagtaggcagtaattttgcttatttaaaaaggtatagcctgggtgcggtagctcacgcctgtaatcccagcactttgggaggcccaggcgggcagatcacgaggtcaggagtttgaggccagcctggccaatgtggtgaaatgccgtctctactacaaatacaaaaaccagccaggcatggtggtgtgcgcctgtagtcccagttactcaggaagctgaggcagaagaatcacttgaacccaggaggcggaggttggagtgagtcgacatcatgccactgcactccagccaagtaagactccgtctcgaaaaaaaaaaaaagtataaatcagagaagaaaaaataataaatcagactattttaaaatgtagaactactgtttatcaaaaatatgccatcaagagagtaaaaatgctgccaataaagtgggaaaatatccaattacttagatcaagagcacgtaagaaatgatgcttaacatccttagtcactgtggaaatgtaaattaaagccactatgccagaatggctaaactgaatactcttcagaaatgagaataaacaatgtacagttacaagtaaaaatatggattaatttcatgaacgtaactgagcaaaagaagttacattaaaaagtatacatattctatgattaaattgcataaagtataaaattaagtgaacctaatctatggttttggaggtcaagatagagattaattctccttcccatagggtgtggcatgttgacaagataaagtattgagccatacacaataaaccatactatttgtttgtttaattttgagatagggtcttgctgtctttcccaggctgcagtgcaatggcataatcatggctcactgcaggaccaacctcctaggctccagtgatcctccacttcagcctcctctctgcaactacaggtatgcaccaccacacctgatgaatttcttgtctttcatagagacaaggtctccctatgttgcccagggtggccttgaactctggggtcaagtgatcctttcaccttagcctctcaaagtgttgggattagtcataagccacagtatttggccttttaaaaatacatacatatatattgaaaatcacttttttttctttccaactttttttaggttcgaggggtacatatacaggtttgttacatgggtaaattgcatgttgcaggggtttcttacacagattatttcatcacccaggtaataaacacagtacctgagaggtggtttttcacacctcactctccttcaaccctccaccctcaagtaggccctagtgtccattatttataaccatgtatactcaatatttagctcccacttataagtgagaacatgtggtgtttggttttcttttcttgcattaactaatttaggataatggcctccaattccacatgtgttgctgcaaaggacatgacttcgttcttttttatgactgcgtaatattccatggtacatgtctaccacatttcctttatccagttcagcactgatgagtgtctaccttgattccacatctttgctattgtgctttaataaacatatgcattaatgtgtctttctggcagaacagttatattcttttttcttttttttttttttttgagacagagtctcgctctgtcgcccatgctggagtgcagtggcatgatcttggctcgctgcaagctccgcctcccaggttcgtgccattctcctgcctcagcctcccgagtagctggaattacaggcgcccgccaccacgcctggctgattttttgtatttttaatagaggcgggtttcaccatgttagccaagatggtctcgatctcctgaccttgtgatccgcccgcctcagcctcccaaagtactgggattacaggtgtgagccactgcacccggccagaacatttgtatcttttagatatatacccagaaatggaattcctgggatgaccgataattccattttaagttctttgagaaatctccaaactgctttcctcaggggctgaactaatttacattcctgctagcagtgtataagcattccattttctccttaatctcatcagcatcaactttttaataagctattctaactggtatgagatagtatctcattgtggttctgatttgcctttctctaatgattagtgatgttgagcattttttcatatgcttgttggctgagtgtatatcttttcttgagaaacgcctattcatatcctttgcccatttttttaatagggttattttggttttgtttgtttgtttaagttccttatagattctggatattagacctctgtcagatgcatagtttgcaaatattttttctttcaatttaggtttctttcaatttactctgtggatagcttcttctgctgtgtataaattctttaattagatcctacttgtccatttttgttttttttttttcaattttggaatctttgtcatgaaatctttgacaggacctatgtccagaatgtttattcctaggtgttattctagggttttatagttaaaagttttacatttaagtctttagccctcaagatgagttacattttacatttttcatttaactcattaagtctttaacccatcctgacttttgtttatagtaaagagaaggggtccagcttcaatcctctgcatatggctagccagttacccagcaccattcattaaatagggagtccatttaccattgcttgtttttgttaactttgtcaaaagttgtttgttgtaggtgtgtgaccttattcctgggttctctatcctgttgcattggtctatgtgtctgtttttatacttgtaccatgctgctttggttactgttgccttgtagtagagtgtgatgcctctggcttagttctttttgcttaggattgttttggctattcagactatattttggttccctataaattttggaatatatttttctaattctgtggaaaatgtttttgatagtttgataggaacagcattgtatctataaattgctttgggcagtatgaccatttgaacaatattgattcttcctacagatgaccatggattatttttccatgtttgcttaatctctgattactttcaatagtgtttcataattcttattgtagagatctttcccttctctggttagctgtcttcctaggtatttttgtatgtgtgtggctattgtggatgggattgtgttttaatttgcctctcagcttggatgttgttggtaaattgtgtttatttcgatcttcagttttctttattactccaacttgtggtctatcaatcttattctttcaaagaacccactttttgtttcgttaatctattgtatttattttaatctcaatttcattcagttcagctcggattttagtatttcttttcttctgctagttttccggttgatttgctgtaagttgggttcagctgagtggctttgtttctggatgatttcacggggggccaggctcagctgagcactcttgagctgcatgctctatccataaggtgtggtgtccaggcccataacttcgttctctgtccccgtgaggttaagcagctgctgtgctggaggtgctagagatgttcccagtccacaagcaccagtactctgataaggggtgctggaaaaagcacttcatcaggatagtggcatcagggtccacacatgcacacacactgacaacagtgtgatggcagtgtgatggagtctgtgtacacatgctcatgctagtgatggtggagtggctgggtctccatgcacataggcaccagcaggggctgggttatggtggtgagttccacatgcatgcatctgtggtactgggtgatatgttttggctgtgtccccacccaaatctcatattgaattataatccccactggttgggggagggacctcatgggaggtgattagatcatgggagtggttcccccatgctgttcttgtgatagtgagtgagttctcatgagatctgatggttttataagaggcttcccccttccctctgcactcattctctcttctgccaccatgtgaagaaagatatgtttgcttcttcttccatcatgattgtaagtttcctgaggcctccccagccattcaaaactgtgagtcaactaaacctcttttctttataatttacccagtctcaggtatgtccttatagtagcgtgagaatgaacgaatagactggggttgtgagaggttcacagagtgcacaccatagcatagtagtaggaagaggccataggcaggtgcttgggggcaaagcagtggtaggaggctgctggcaggtgcatgtcatccgggcctgtctgctaaagctctccgatggttaggtagagtccacaccaagtagctatggtggcagctgctgcaaaatgcctctgttggggatctcaggctgcagtgcaaatgggtgtggccggggaggtgccccagagaaggaccagcaaacaggggtgtgttcagatcagactggccccgtcccatggaccagatagctctgctctgttcaggtctgatagtcaacaaaggccaaagccacctaggggagtgtggtaagccttggaggatgtgcatccctggctatgctctactgtagtcatgctgtgccaacaccccccagttcccagccccaaaggctgacacttctccaagcagctctccatgccagctcggatgtatatggaggtcacggggattcctacggttaatactctagaggtccatggtaagtccatgggccacttctcacctatttaactcactccttccaaggagtcactgggggctgggaacaagtcctggtgcttggcagtctcatgcagggttcccagcttcctcccccttcagcccagtgtctgcatgctccctttttccactcttaatgatttccttctaaagatctccttagagtatactggacttcatgatggtctgttttcaccatgggagatgcttttccttgctgtttctagctagccatcttggctcctctcgcttttttgcatgtgtatttttatgtatatgtcttctacagagaaagcaccaaatttagatgacttcactgataagtcctaccaaatattcaagaaagaaatcctaaactaataaatcctaccaaatattcaagagaactattatataaaacctcctagagaatagaaaaacttagaaatattttcaatttattttataagagcagcataaacataatgctaaaagcaaacaagtatattatgtggaaagaaagtattaataggctgggcatggtggctcacacctgtaatcccagcactttgggaggcaaagggcggggagcacaaggtcaggagatcaagaccatcctggccaacatggtgaaacccagtctctactaaaaaatacagaaaattagctgggcgttgtggctggcgcctgtagtcccagctactcaggaggctgaggcaggagaatggcgtgaacccggtaggcagagcttgcagtgagccgagattgcaccactacactccagcctaggcgacagagcgcaactctgtctcaaaaaaaaaaaaaaaaagaaaaaaagaattagtaataagttaatttcatttatatacagagatgcagctgtcttaaatcattagtgcacaaatccagcaatacataaaaagtacagtattatcacaaccatgcaagatctattccagaagtggaaggttggcttaataatgaaaaatcaattaatgtaatttacttttatattaaagcagaaaaaatcatgtacagaaaaggctattgataataaaaatcaaaagctagtgataaaatgcaataatcatttatggtacagtatttagcaaagtaggaatagatgaaatttttctttttttttttattatactttaagttttagggtacatgcgcacattgtgcaggttagttacatatgtatacatgtgccatgctggtgcaaaaatttttcttatctaatagaaggattttgcaaaaacttgtagcaaatgttattatgaattgttaaaatattatccaatgagattagaaattagaaaaaaagttcctaatattatttccctttcaaattatactgtacattcttgtcaaaacaggaaggcaagaggaaaaaagttataaggttgaaagaaagcaataaaatgctcattagctgcaaaatacatgattatgtatctataatatccaatgaatgtacagatgagttatctggattattaagaagtttagcaaggatgttggtgcaaggtaatacatcaaaactttatgtataaaccagtggtaaacaattgaaagtaaaatttaaaacataatattataatattattgatatatcatatatcaaaaaatagtcctgcaagaatcttaacagaggaaactgtaaatcattattgagaaatcttttatacatgttcatagttaaggaagagttaaataaagagaagagaatatatgttcatgaataggaagactcaatattttaagatgtaaattctcctcaaattgagctatatgttcactggctaaatcccagtcaaaatcccagcaggtatttttagatatcagtaagcagacttttaagttatcctgcttttatttcagaatatggccaagaaaactgagggaaaaattttcacttcacacaactgagccaagttacaggatatttccatgactggatcttccaagttccagaacagaaatattaagctgcaattgtaagatctggttctagatgagtggctattaatgctggttgaagaatctgcaaaactgctacaaagggaagaatgagcccactatgcacattgggatgggaaactattaaaaaaaaaacaaaaaacaaacaacaacaacaacaacaaaaaactcctccaaaattagaaaaccaaaattcccatttccctgaagaaatgtaatgttgatcttttggcaagtgtgtcaagttctgtgttgcaaacaaacaagctccaccttatttttatgaaaaggctacccagttacccactttgtcactactcttagattcaaggttcatgatgtggtttggatttgtgtccctgcccaaatctcatgtttaattataatctcccatgttgaaggaggggcctgctaggagctgattgaaccctggggccgaattttcccccttgctgttcttgtgatagtgcatgagatgggaagacagtatctgagtgtttaaaaatgtatagcaccttcccctttgctctcttcctcctgctcctgtcatgtaagacatgcctgctttcacttcacccctccatcgtgattgtaattttcctgaggcctccccagccacgctccttgtatagcctgcagaactgcaagccaatcaaaccccttttctttataaattacccagtttcaggtagttctttatagcattgtgagaatggactaatacagttcaggatttgcaatttaaggaaacatgcggtgcattctatcatattctctattattagtagatcttttataatacggtacatttcaaatgtgttcctccccaaccacaaagccatttatttatctaaacggccttgccatgtcaaaggcaaggctactgttcagtaaacccctctaaatcagaatgtcattagaagaaatttaaattatatgtaaaggaataaaagctgaaaattgaaggcttttgttttgaaaagttgaacttacaaatttgcaagtgtcattttctgtatttccgaaatactgtaaaatttatttatcataaagtttaatattagaaataaaagcttattactaaaaaaagtaatgttaagaaagacaaataatatagcaaacactcaaaattgtaatttcactcatataaattcattttctacaataatcagaggaaaattaaaattacatgttcaaaatttggaggtgaaagcagggatcaactgtctattaaagttactaaatttgtcataaaaaatttaaagactctggaagatttggtttcatttaatgagttcagggaattaaaaaaacatgtttttctgtatttttttgcaagttcttgtcagaaagcatttggaaaggcaaaaatatatagcagagagatcaaatacggttggagttgagattcagaggcagagataagtgatatggttggagtatatcaatctcccaaggagccacttcccaggttcggaatgtagaaaccaagccagaagtaagagtggcataaaatcatctccctaccacctgcaaactacctctcccatctatctaaacagtggaaatttctggtaatttaacaaaaagtatttatgagttgttaacaaagatatgaaaagctaaaccattgtttcaggtaccatgcaaattgacaatgaagtgttgaaaatgaaacatagggcctcttttctgaatattattatgtattagtccattctcacactgctacaaagatactacctgagacttggtaatttataaacaaaagaggttaaattgacttacagttctgcatggctggagaggcctcaggaaacttacaatcatggcagaaggtgaaggggaagcaggcacctttttcacaaggcagcaggagagacagaaagagcgtgagcggaggggaagtgcccactttcaaaccatcagatctcatgagaactcactcactatcaggagaacagcatgggggaaaatcccctcaataatccaattacctcccaccaggtccctccctcaacatgtggggattacaattcaagataagatttggttggagacacagagccaaatggtatcatatgatctaattgttagacagaatcataaatacacaaagcataggtgaaaagtctcataatagcattaacaccataaaattatgaaagaaggaggagcccattcttcaaggaatgtcaggaacagtttcagaaaagaatctttgagctaggtcttgacagatgacaaatacatagtctcatatggttaactcttgagccttatgaggatgaaaaaccagtatcagaaataaagaccaagttttgatttatcttatgtgccatgttaagtactttaggctgaaggcagtaggaataaatcagctgatttttaaacaggagagagagatacgggcaggttacttatatcggaatcagtgggtgggatagattggataaaaggggcggggaggagaagaaggggcagagaagggaagggagaggagaggataaaccatagttttattatctaacaaaaagcttccagggaatttaggcagacgatagtttttcttaaggctcctttttttcattgactcctttctaattcccccaagtctcaattctgttttctcatttttaatttctatatctcatgtgaacttacatctgcattgatatgattttcattagatattataaagaagaatatttataattaatctaatgttaggaatatttagcatgcaacaagtgaatataggtgcttactaattaatgccttggattacagtgtcctaatgcctggaggtttttggaagtaactctgatctcagtaacacttaccctattgctgtttatctaacaaaacaggcattgcctcagctcacagcatttgtacttgctgttccctttccctgggatgtactttcctcaaacatctacagggcatattcatgtatgatctctgaaatcaccttgcttctgactgcagtatataacatagcaaaggccgctgctcaatttcccaccacctccaattctgtttttccaattctgctccccttttttccacagtatttattgccatctgacattctatggatttgcttgtttgcggccagcctcccccacgagaaaggaagctcctcaagagcaagaattttgttttgttcactgttgtatgtccccggcaccaacaacagtgtctggcacagtgtagatgcctaggtgatatttgttgaatgaattagtaaataatattcctataaaatgtggtgaaaagaattccacatgaggaaattaaagtctagagaaatacaacaacttgctgaatataacttaacattagcaattattatcactgtcattttagtactatttttacaaacctatgctttgacatataaattagctccagtcatcacagcagcgctgtaagatagatgttgcagacagttgtatagattgttcaaggtcagctagctaatggatagaagaataattttctgaccaaatggtgatttgttatatttggatggaatctatgtttcctagcaatttacctgctgggttgcacttcatctgccttatatcccttagctttcttccaccttctgcttacatattgaagaattacaggcttatcattatatatttgcctactgattaaatgtattgtaatcctttatggaattaccataagagatactatggataggctagaacaaactttgaaagagaggtggtgtattcgtttcctagagctgctgtgttagggttcttcagggagatagaactgataggatatatatatatatatatatatatatatatatatatgtatgatatatgtgtatgtgtgtgtgtatgtatatatatatatatatatatatagagagagagagagagagagagagagagagagagacgagatgagatgggaattttttaggggaattagctcccatgacaggctttctgcaacctgaaaacactgaaatgctgatagcatcgcttagtccaactctgaaaacctcagaacaaggtaaacaaatggtgtaactcaatctgaggctaaaggcctgagaactcagggagttgctggtgtaagttctggagtccaaaggccagagagcttagagttctgatgtccaaaggcaggagaagaagggtgtcccagctccagaagagagagagaaagaaggagagcaaatttgcctttcttctcgctttttgttctacctgggtccacagccatttggatgttaaccacacacattgagggcagatctttccccattcagtcaaccaactcacaattcatgaaccaatctcctcagaaacaccctcacagacatacctcatggaaataatgctttatcagttctctaagtactccttaatccagtcaagttgacatctaaaattaaccatcacaattgctgtcacaaaataccacaaaactacagacataaaactcacgtaaaactacagaatttttgtttgtttcacagttctgggggctaaaaaatcaaaggtgccagaatcaaaggcccaaaatcaagatattgggagggccatgctccctgtgaaacctgtaggagaaaatcttccttgtctcttcctagcttctgacggaggtcattgatccttggcattccttgggttacaaatgcatcgctccaatctctgtctctgtcatcacatggcattctccctgtgtgtttttatcttcatgtgttcatcttttatgtacgtgtgtgtgtgtgtctgtgtccaaatttctcttttcttatgaagacaacagtcatactggatttgagcaatccctaactgacctcatcttaactcgattatacctgcaaagacccaacttccaaatgaggtcgcattcatagatgccagggtataggacttcaacatatatttctgcaggacacaatgcaacccatagcagatggagagcatcagcatgatgggattgctaataatgggtttaacgtatcaagctttttctcaattcagagacttctcatgtattgtctcctctgtctgcattacttttctgcccactctttgctcaagttctggtgttgtactggagccatctcacaccagctcctgagggtcaattgttaaattatcagaagccagttgccaaacacagcaattattaaaaattaaatatataaacataattaattacatttaaagcaatggtaatacattctaaaaactcatccatttctagctattttgctacatttgattattatctatctatactctttagattatttgcatctattatatttacatagcagaaatataaaatacttgtattcatatgtctccctaaatacatattcagtgacctcaccttggtagtttgaaattggccacagagtggatatatttataatacagaaatcagctaccagtacaaatcaggtctttttttatccttggaaaagcagctgttaaatatttaccagatatactggttaattctcgtacttcctttaggcctcatcttcatctcctcagaccagctttccatagcatccatttaaaatagactccttcctctcattattctctttctgaattcctttttctattcttcttgaaactcttttttgtaattgtgcagttatacatgcatttattgaatatctgtttttctcactaaattaagtttcttgagagcaggacccatgatttttttatttctgcttatttctagcacagaaatacagcatttagcatatgacaggcacttaataaatatttgttaaatatttatgatgcatttgaggatcaaatggaaaatcaaaattatgagatagtatgttaagtttggtgatcaggcaaagttaaagcatggccaaaaggcactgagtttccagttacctgctaagatgtgtaattaaatttaggtgaaaattgagagtgttaattccttggtatctatttttcctgcctctttgcacttatgatttgtgatggtaaacattaataatcagatgcatgggacaactgaagtaaagagagatgtgtatggcgtatacccagtgagaggttcctagaatgtagtaaatttattctgataaaagaatctgacaattgaagaaaggaatgcaaactggcctatggcatagttaccgacttaccatttgtgccaacgaatccttgggtgacctcactgtaaggagctacatgagataaagatgggctcaatgtagaaatgaaaataataaatgccttcaatgggaggataggtcaacatatttgaagtattctggggtactactaagcctgggaaataatctagggacagaagaggtgggcactagtcttggcttccaggctttaattaaacacctatatatgggcagcatcagctgtagttaggaagcagttcattccatccagagacttggttaccgaaggcccagacttatcaagcatggccaaatggtaagagtaagagtcttgaaagtagacatactgagatattaaaattaactcttagtttattaaatgactttcagtaatgtaattaatctttctgcagttggtttctttatgtcttaaattggggtaacagtacaaacatgttggagaaaggagaccaccactaaagtttaaggaagttttgcatgaattagtaaagggcatcgactctgagctaatgcagtccctctagctaatggcttggcaagaaaatgactcttttgcataagtaaaaagatagtttcttgtttctggtgctcatactcagggtacaagactactggcctccaaatgcaggaagcaagagatctgtacaatcattctgggtcctggggctgaggtaaagattaaacaagatcttatattaaaacactgagctgtatttgaaaacttaaccctgtcacaaatgtcagtttccttcccaaaaatctctcctccttttcttctctttcctgtctccctgacaccactatcaagttggatttccttgcccttggagacaagttagttcaactttaattttctacaagtatctttgtttcagaccctgaatagataacagagagtcatttaccctgttctcattgctctaccccatgtaacccccatcccatgtaattaatcgtaaagtatattttgttttatgaggtatcctgagtaagtgctaatggagactaagtttagggagcatgaaatactgctacctttctccatgtgccaataaacctgctcagtctcagctgtaaaaaaacaaacaagtaaaacctgtttttctcttgttccttaaattatgtcagtacctggcagttgtttatgtttaaaaagtcaacagaaggcagtcaagggaccaggaacatgataagtgtttaaagggtgtgatttactactcagcagtgtgccagtgatgtggcatgaattaaaaacaagaagtcttccaggagaaaagatttctttagagatgtaattaattgacctggcttgggtccctcctttcccggaggaaaaacttctccttttccggagtagttgtcagtgaagtgtttcaaatactgccctggttgtaattattgttcaagttcatgctgcaaaatcatcttcacttaataattctagcattcaccacccaaaaactcataagcaaggcttttgtattgccacacagtttgggattttttttctcagaattaggaagcaaatgtagccagcaattattttagatattgctttcagaaatgaatttttcccatatctgtcagatttggctcagagttctttttcaatttaatcattgttagcagcatgaaaaactgttaagttaaatgttcaggcataagcaagtcattactccatatttgaactctagagagctactggttgtcatggtaatatgactgcacgtgtgaagttagcattggcaacatcacattttcattaaaacatcatgcatatttgcatgaacttctgcccagaccattgttgcaggattggctcctccaccccatctcataatggtgccaagagatttcatatttcagatccaaacttgttagagtttacagcattcattattcatccctcagagatagaagttgacctgtattcaaggcttaacatatatgaatagagagctcactatatatctctatggttaatcctactaattaccgttcccctgaattgaggtaaccctcccatttcttttagtgaatagttttaattactttctttgacttgcctcttcccaaattagggtatgtttcttcaaataactccccatggatttgtagtgttgctattactcctgaagatgtaggtttccccctcccctcccctcccttcccctcccttccccttgatggagtttcaccctttcacccaggctggaatgaagtggtgtgatctcagttcactgcaatctctgcctcccaggttcaagccattctcctgcctaagcctcctgagtagctgagattacaggcacatgccaccatgcccagctaatttttgtatttttagtagagatgaggtttcgccatgttggccaggctggtctcgaactcctgagttcaggtaatccactcgccttgtgctagaattttttttctccttatgccttcttcccagaacctctattatgtttcctttggtttagggctgtgattatacttatttgcccatatgatcatttatttattcaattaataaatatttattatggtttactatgttgtagggtagatgttagatcccaagtaagccagggcaacaattagttgattagagatgtaagctcttgctgtctaccctgttcttggccaaattgtctgtatttcaatgcagcagatatcttcacaaaggtttttttagcacacaaactgtttgttaagtcctataaattagcaaacaatgctagtttactttttgtttccatgtcattgtttaaacattcttttgttgagctaaaggtttgaatgaataaaccaacaatgaggaagtgccagaacagttcctgtatataccctgcatatatttatttgcagattttactagctattaaatatcatataatacatatcggctctctcctttctctgcttacacatacatggttcctgattgatcaataatttaagtgttgcatttggagattactataggagtttcaaatggtgtccatggtacttctgtttgtgcctctgttcatattgctccttacacttagcctgcctttcccgtcccaaattcccactgaagacctggagaaggcctcatctttcaaaattcaattcaagtatcatttcgtttatgaagtgttatataacaataagaggataaattaataacaggataaataaagaataagaaagcacactaaaaactcttttttttttgaaacaaattcttactctgttgtccaggtagagtgtagtggtgcaatcatggttcattgcagcctcaacatcccgggttcaagtgatcttcctgctttggcctgccaataactgagactataggtgttcactaccacacctgtctaatttttgtgtgtgtgtgtggagatgaggtcttgccatgttgcctaggctggtcctcaaattcctaggctcaagcaatcctcctgccttggccttccaaagtgttaggatttacaatccagagtcactgctcccagactaaaagcattttttttttaacaactctggaagtgaattccagcagaaccagcaaaaagaatggaattaattacctctggggaaagtgcctaagggtaaggagaactggggcaggaaactattataagtcttgtaccactattaagcttctaaaatcatgtacatgccattttaatttttaaaaagataaatttttaaaactctatatgcttacattaaaagtatactagttattctgtagtatttctcatcaaattattttaatttggatttttttttcactaaatttaaatggacagcagacccagatgaataataaagcataaagtttgatttcagtaaattgataacttgataactttgatcatttgtgtatttatgccttctaattacagccctctaaaaatacatcagattggtttttaaaaatgtaatctgtaaaagcctttctaccgattgctaactaaatgtcaacatctaccatgtactcttaggaatcattaagaatacaactgagggtcatagatttagaaagatatttaatccaccctaaagatgagataccgaattaggtaatatctagaagtctcttgcatgcctccttccaagatatttataactatacctgaatatctatttagatacagatatctaaaattctggggattgttggatctaggcaagttgcttttaaatgaattatgtgaaaataaaagatctcagaatatctgggaatcttcagtaagagaagaataatgagaaagaatagcattctaaaatattaaagcatattatgcagctgaaatttaaaaaatattattggtttatcaatgaatttgatagagctaggatggaatataaaactcaaaaatacatatgtgaaggtagtttatgataaatgtggaatttcagatcatggtgaaaagaatttttcaatagtggtaggaccacagttttacagccatttagaaaaataaataaaatgcaattttaaaacgctagatccatgttttatgaaaataagagattcccctcccccccttttattttgagcatttactttagaaaacttgtaattatacatacttgatactatttctgaaaaaaaaaatacatccttttgaaacctaggaaagacttttttcagcttaatcatccaggaatatctttctcaaggacctggaagctgtctctttgaaatgtaaacatcaaaggagttagtaccctgcctgccagtttccgtgagcggataggagtctaacttgggtaggcacttccctccaagtggcaaaactacctcttgtcattaaaaaaaaaaaaaaaaagatgtttgtttctcttctaagtaaagccaattccagttagctaaaataaatggtcaccccagttatctggtaaagataaaatggtgctgtcaagccctcttactcgaagactagttattatttatcttgataatatgtgtgtaatgggctgtatctgcttggctatataaaatttctttctgtctttgcaatctctttgtggattgcctgtgatatgctcacattctagattaattcttattcaataatgaatttttttttgtctctctactacttttataggaaagatttctagattgagagattattttatcaccaatattgctaatgcagatttcctctgctgtaaatagcctttgtattagtttgttttcacactgctataaagaatacctgaaactgggtaatttataaagaaaagaggtttaattgactcacagttccacatggctgggaaggcctcaggaaacttacgataatagcagaaggggaagcaagacagcaggagagagagtgaggcaggggaaactgccagaaacttatcaaacaaccagatcctgtgagaaatcactcaccatcatgagaatggcatggggaaactgtccccacgatccaatcacctcccaccaggacaacccctaccctgcccttgacatgtagggattacaatttggattacagctggagatgagatttgggtggggacacagccaaaccatatcagccctgtttttatattggttctcttgtctgtgttggaattctgactaggaccctgtgtggggtaaaacactgtgggatagagatggggcaggttaactagcctggttttctctggggtgagtggcaggaggtatctttcagctgggattaaaaccaagcacattgcttcaagaatttcttactgcttgacttgaatgaaaatgttattactgatgataattttggggcataatctcatgcctaactggtattggaataatagtaagatgtgtaataaacacatgtgagtcttgagaattccgctctgattttgactcacagtaagttacttgataaagtttgtcctacagtctcactacttctcagcaaaattcttactgtgtgatcagatactaaatttctttcagtttattcccagtaaatctgatggaatgtctagattctgcagactttgatccaaagactgaactaaatccaatgaactcaagagaacaacttttaagtagttattaagctgatattctgtgttcagacctgtgcctgggactgaaagaacataaataaatgtaactgaggaagtgttctttctctttgatctagatggtaacttacctaggggacaaatgggagtgggcagatctgaagaaaggaagaatctgttgtaatagtctaaatgtgaggcaatgaattataaggtttccataatagagatgaaaagagacagaaagataaactaccaaaagaattaaaggagcttgataagttcctctgcaaaggctaaattaaaatgagacgtaaatgatcaatgattgacacaagatagtacagcagataaaaatatggatttcggtgtctatgagaactgaattcaagtcccagatctgacattggaattcaacagttacatgattcttctcagtttcagtttccttttgtgtaaaatataacaaacagtacttccttcagaaatgtattataaagttagtgtttttaaaactacaggttatgcctttttcttgagaaattaactttacagtttaatgaggaacagataacattttaataagaaagatctggaaaagaaaagtagaatgcgttactcatggtaaaaataagtatttttgtaacacttttttatagtgattgtatatatgtgtgtgagtgtgtgtgtgtaagagaatcattggattaaaaattaaaataaaaataatagctatttatgacaaatccacagccaatatcatactgaatgggcaaaagctggaagcattccttttgaaaatcatcacaagacaaggatgccctctcttaccacttctattcaacatagtattgaaagttctggccagggcaatcaggcaagagaaaaaaaaatggtattcaaacaggaagagaggaaatcaaattgtctctgtttgcagatgacatgattgtatatttagaaaaccccatcatctcagccccaaaactccttaagctgataagcaacttcagcaaagtctcaggacacaaatcaatgtgcaaaaatcacaagcattcttatacaccaatgatagagagccaaatcatgtgtgaactcccattcacaattgctacaaagagaacaaaatacctaggaatccaacctacaagggatgtgaaggacctcttcaaggagaactacaaaccactgctcaaggaaataagagaggacacaaacaaatggaaaaacatttcatgctcatggataggaagaatcagtactgtgaaaatggccatactgcccaaagtaatttatagattcaatgctatccccatcaagctaccattgactttcttcacagaatgagaaaaaaactactttaaatttcatatggaatcaaaaaagagcccatatagccaagacaatcctaagcaaaaagaatgaagttggaggcatcacgctacctgtcttcaaactatactacaaggctataactaaactatactacaagtcaccaaaacagaatggtatgggtaccaaaacaaatatatagaccaatggaacagaaaggaggcctcagaaataacaccacacatctacaaccatctgatctttgacaaacctgacaccaacaagcaatggggaaaggattccctatttaataaatgactttgggaaaactggctagccatatgcagaaaactgaaactggagcccttctttataccttatacaaaaattaactcaagatggattaaatacataaacataagacctaaaaccataaaacctgtagaagagaacctaggcaataccatgggcatgggcaaagtcttcatgactaaaacaccaaaagcaatggcaacaaaagccaaaactgacaaatgggatctaattaaactaaagagcttctgcacagcaaaagaaactatcatcagagtgaacaggcaacccacagattgggagaaaaattttgcaatctctccatctgacaaagggttaatatacacagtctacaaagaacttaaacaaatttacaagaaaaaaacaaccccatcaaaaagtgagtgaaggatatgaacacacacttctcaaaagaagacatttatgtggccaagaaacatatgaaaaaaagctcatcatcactggtaattagggaagtgcacatcaaaaccacaatgagataggatctcatgccagttagaataggtaccattatggcttacacctgtaatcccagcattatgggaagccagggttggcagatcacctgaggtcaggagttcaagaccaacctggccaacatggtgaaaacccatctctaataaaaatacataaattagctggacgtggtggctggtgcctgtaatcccagctactcgagaggctgaggcaggagaattgcttgaacccaggaggcagaggttgcagtgagccaagatcatgccactgcactacagcctgggcaacagagcaagactctgtctcaaaaaaaaaaaagactagctatcattaaaaaatcaggaaacaaccgatactggcgaggctgtggagaaatagggacacttttacactgttggtgggagtgtaaattagttccagcattgtgaaagatggtgtggcgattcctcaaggatctagaaaaagaaatatcatttgacccagcaatcccattaccgggcatatacccaaaggattataaatcattctactaaaaagacacatacacacatatgtttattgcagcactattcacaacagcaaagacttggaatgaatccaaatgcccatcaatgatagactggataaagaaaatgtggcacatatacaccatggaatactatgcagccgtaaaaaagaatgagttcatgagttcatgtcttttgcaggggcatggatgaagctggaaaccatcagtctctgcaaactaacccaggaacagaaaaccaaacactgcatgttctgactcataagtaggagttgaatagtgagaacacatagacacagggaggggaacatcacacactggggcctgtttggggatgtgggaaaaggggagggatagtattaagagaaatacctactgtagatgacgggttgatgggtgcagcaaaccaccatggcacatgtatacctatgtaacaaacctgcatgccctgcacatgtatcccagaacataaagtataataaaaaaattaaaatgtacttattgttatggattgtctttaaacaagtttgaaaaagcagcactctataatacataaaaagtgttttatgtgatactaacacatttgaaggaaacaagacgtgtcacaaaaatcaagggaggagagcttcaaggatgggctgattaatgctgttaaatatagtagagaacaagggggataaaatctgagaaaaggttggttttaagaataattagcttatagaaaattaaacgtgaatttagtctgcaactattagtaataacacacagtgacattttttataatgctaaatgatagtaaataatctaaaaaatctagtgaaagaaagaaatatgcaagatgatttccacacaagaattacaataaataatgaaaagcagttctgggccttttggtttgctccctggaaggagataaaatagttaattaaagttttattgcttttgaaacattctccaatttaagaaaaggtttgagatttgttatatatggtgcttacatggaacacatgaaacctttatgagacttttttccctgtttgatagggaatgaaactttggttgaatttccagtgggatggggtgagtctggagataagctttatggtttctcctgctggtgtctccagatagcaaacacagcagcggcttccagtctgtggtgcaaagaaagaaatactattctctagtgcagataccatttcacctatctttttataaaataccagattttggtgaaggttcttaagatattcaaataattatctccaagtatctgctgggtggcatggcaggtgaaagcaaggagaattgagacaaatagatagacaggaagtcaaatatctcacttctttttaccccattagaggaaaggcctcactgtctaggcctcattttgagggtcccagtacaccttcctcattctccaagtttctgatcccttctccataccctgcagtctttagatctttttttgctatcaaatgtccacatgtctcagtcagtctagattactacaacaaagtatcattgacttagtgtgttgtaaatgatagaaatttatttctcacagttctggaagtggcagtcccatcaggctgccagcattgctggcttctggtgagggttctcattcagtttgcagatgaccaacttctcatgtatcctcatgtggtcgaagcagagctagttagcattctggtcttttcctataaagacactaattccattaatgagggctcaactcttattacctaattactttccaaagacacctcctcctaaatgccatcgcactgggagtagggcttccacatatgaattttaagaagacacaaacgttcagtccattgcactgtatgttttcattttctctagatcagtcacttttttcctacaaaatttatacatatttagtcttcctccatctcatctagtatctcctaaaattatcaattttaattaaatttccaaggtttttcttttttctttttagttactgttgctctgcagaagagtggccatgtctctttgttcataactcctgtcatgtggggatagaatgtggtgagagggtccataaattattgggtctatgcataaagtgctctagggaaatactggggttctattgctgcatgatatagctatacgttcccagcgctgattctcaaccacagctatactttagaattacctgaaaagctttaaacaatacctatccttaaactcttctcaattaaagtagagcctctgagtttggatcctgaaaatcgtgtgtgttgtgtttatgagctgctcaattgattctactgtgtggccaagtttggcaaccactgtcccagacagtatttcttctcaatctttaatgttgtattaatcacttgaatatcatgttaaaatgcagattaaattcagtagatttagggtgagacatgaaattgtgatttctaataagcctctatgagaagtagatattgtagtttcagggactacactttgaagagcaaggtcctagaatatttaaaattaattatatctcaccagtttattgtcttctgaaatatgctctttcctactcaagcttcaagaaggagaaattattattccatgagtatattctagttttagatgctgacaaagagcatcttgccatgtccgaaaatttactgtacctcattaatctttgcttactgttgtttatcaagtaactgattcaattaactaaattaatggtatcaattgtccccccccatgtgattctatggcaatatatagggcatgagggactctgtatgttaattctacaagtaatttggtatagtcagtagtaggggtcatttggggaaaggatgagaggaaaggctgcagagagaaggacaagttcattaaatgacaataatgttgaacattcattgcacacttactgtttttcagacactttgttatgtgctttatatacattatttaatttaatccccacaccaagtctacaagaagaaaatacttattaaaatgacaaatgagcttagaaactgctatggtttgaacgtttcctccaaagtttgtgtgttggaaacaattcattatgcaactatgttgagaggtgagaccttgaataggtgattagttcatgaggtctctgcccttgtaattgggtgaatgctgttatcatgggagtgggttagttggcacaggagtgggttccttacaaaaaaattacttccgcctctttcctctctcatgtgcatgctttgttgcctttctgccttctgccatgagatgttgcagcaagaagaccctcaccaggtgccagcgtctagacattggattttccagcctccagaactgtgagaaattatttttttctttataaactacccagtgcgtggtattatgttatagcaatgcaaaacagactaagacagaaaccataagaaactgaaaagtttatataaatggattcagatcacatagctaataagtggtaagagccaagcctctatctctctcctgagtcccagctcttatcctgcaacaagcttaaatgggaagtcaaagacagcttttaaacacaaaagaaagatgatccagcagcatgaaggatataggcagggtaagaatggaggcttagatcccacttaggattcctcctctaagaggctgaaatttcataagcttatcaatataatttaagaactggaaacatgtctttttttaattactatcaccaaacacagtgcctggaatatagtagttataaatagttattaagtgaataaatgattgctattataattatgcagaagagtaattttgagagcctgaactaaggcagtgacagtgggaacagtggttgaaatgaaataaagaactagttgaaaagaaattttcagtaggttaataactaatgttacttttaacagccacaatgcttaaaatgcagagaaatttttaaatatttttcaactcaatggactaactctaatatttaccacaggaagaccaaaaatgaagtaataggcgtacaggggctgatgggtgtgccataagtcatacaatgcaggcagactcattttccatatcagacaggtgctgtacagactaaggaatgtggggtcaaactccgaagtcagaggactgtcgtcaagtctctttttcagtagtaggtatatgacattggttaaatctgacactctgctttttcatcatgacaatggaataatgctgcaggaaagagagaaaataatgatggtgagagctttttttttttttttttaagcagtacttctgctatccaaatttgagtatttatccaactattttcagttcaggggctacaatgcctcaaccatatttacatttgaggtatctaaatgtaattctggtgatgtattgtcatctgtaaatttctctattgtgacattattaatacttacattgaaggttattaaaaacttactaaaggtgtatttgtaaaaccactgaaaatttacttatattttttgtgtattgtaagttttttacaatgatcatatattatttttataatctgcagaggttagaaatgttatttcgaaggatttttatttaggagtcatggccgagaaaaaggtttctaaattaaaaaccagaaaagtcatttttactgttttaacaggtagattgtcaagtttagactcataacacagtctttcaaaggtttctactggacagaaacagcctcattttcacaatcgtagtcaaagcagaaaaacatacacagaactaaatgcctagcatctgataagatgaccttttgctgaaaaatcatttggaacagcacttgttctgcagtaactgtcatggtaagtacagacagaaatgggacaaaaaatgaaagctattttggtttccttctattcaacttacagaccacaacagcaagagcacaaattactagctaatctaaatataaaagttcatgagactttgctaaataagtatcctgttactcaaaggagactgagcatctggacttggttatggctgctaccgagttttttgtttgtttgtttgttgtttggtacattcagtaattgggtcgggtcataggatatatattttctttaagggcaaattttagggtgttataaaataatatgagttttaaaagtttaagggcaatgtggctttgaaataaggtacatgtgaattgaaaataagactgtaaattttttttgctgtatgacatacagcaaattactgagccactctcagcccagcatgaccttactacaaaattggaaaagttacacgtaactaaccgtgttgtaaagatgaagaaagactctaagattcatcttttctaaaacttcttaggtattcagtatacattgcttcagtgcaggaatccttaaaagatgtccatctagactatgttattattgtcagtatgttaagatacaatgctgcctataccacttttaaatgcctcttttacttcatgactttcaccttcttttgctaaagcactctgaatctctgagtcactcgccagtgttcagttctgcctttatttgatgctgcacttcagaagatgatttaattctattgtggagcaggataaaactaaataaaagtggtggtacctacctttacagagcttaaagtctaggagggaatgcaggcaataaataaacacgtaaaatgggaacagagattaggaaaatataacctaaactaaaaagctagaaatagcctcttggaggaaaaaaacatttaagcagagatttcaagaagaatggaataggcttagcagagtagaaacttaacaaatattggttgaaatgtattgagataaatcagaccaaatcattgcccatgcctgagcctgaaattttaccaacacagggtttaatattatgagtctacagtattagaaaaatggcttctattacttctattttttcagaataatatatttatatagttacaaaaaagagcacaggattacataaatgaaaaggaacaggttccccttttcttttcttccccacttttactccccagcaatatacttataagcatatctaattttatttctttcagtggtcacctcgactattaataaaatgtgtataattctatttcttgatctatcaaattcagacaatatctatttactttccacaatgatctatcaaattcagacaatatctatttactttccacaatgacaattgaggagttaatgttagttgacttacactatctgtcatcctcatacttttgctggttttgatgattctattagaactatacttcttatataaatttataatatactaaattttttgttgcatcaattttagacagcgtcctcgactccctattatgtaaaatgaagatatttgcatatttatcattctatcacttttcctcctcacaccctcctttaaaattgtcaggaatatatattgcttttttgttttgagggtagagaatacttacatttttctgtagctaaaatccagtcttctctaattcgtagccatgttaaatctgtaaatgaaaaactgataaatataatcaacatgttgtttattgaggaaccaattaatatgtagaacaataggggaaattgtaacatatatgtgattctatatcaccaaatcctttccatttgaacaacaacttctaactgtcaagattgatcacataaaatgtctttcttccatcttgtcaattcttgacaagcagattcactaatttgcttatttattttttctttaaaaatttttttatatagatttaggcagtacaagtgaagttttgttacatgggtatattgtgtagcggtgatgtctaggtttttagtgtagccgtcacccaaataatgtacattgctttcatcctatcacatagctttcctatcttatttatagtgttgaaattatggaatctattttctacatgatggcatttctaaagagctttaattttctacataagggcatttctgtagagctcctacttcagtgaaggtctgctcctccaacagaatttcaatatacttccctaccacaaagttagctgttagcattcttaaatcccctatcttccttgaattatttttcctattttgttggagtgcgtctcttgctatttttctcaggagtatgagagaagaaaaaattttcagtcttaaattgaaaatgcttttattttgcctcaacactttaattagaaacctgagttcctgcccccaggatgcgatgctcattgcatggagcaaggtgatgatgtccttgttccaggcagtgaagaaagggataaaaagggagagaacaaagaacaccactaaaagctgccctatgaaacatggactagttcttattctcatggccacatccagctttagggcatgctggggaacaggatttgtattccggacagaatctgcctggcttaatattttattactttgcaactaagaagaatgcatattggctcacaatcaacaaggtttgccatagccttaattaataaagcctaaaaaaaatcacataacttctaactttaaacagggtaaattctaagtaggttatagtaaattagttgagcagagtgccctgaggtatctgaatgattgaccagttatatagaactgttggctaaaagccagacaaatattagaagacatataatagatataatattttcgttttataattattttgaatcattcttagacaataattaggaagcagaatcaatcttcagttgtgcacaaactcaatgtattacaaaaacattgtgttttcagtaaaaagagaaatatttacccttcttttagtagatgaagagcaaccatgaggtgttaaacagtagtttggcccaagtgtggtggctcatgcctgtaatcccagccctctgggaggctgaggcaggaggattgcatgcatccaggagttagagaccagcctggaaaacatggtgagactctgtatctacaaaaaaaaaactacaaaaattagctgggtatggtggtgtgcacctctactccctgctacttgggaggctgaggtgggaggattgcttgaggctgcagtgagtcttgattgcactactgcattctagcctgggtgacatagtgagaacttatcttaataataaagaaataaatgaatagtataatttgaagactcttgctacagagatttttgtcttttatcaaatgacgtttacttattctttttctggtttagaaacatgcttttattttatagtgaaaacttctcaagaaattttttaaagtgcattttctgtacatttaataaaaatttgatattaaatgttcatttctgaataaagctaatgatgagtatatcacttataactaataaaatatttgtctgcattcagcatcaactatgctgaaaaccagaagatacatatcttctgaaaaaaaaatcagtatatggtttaaaagttatttgttaacttaaaaagaatctaatacctggtagtgtattgctgctataattaaaatctaaaacatatgttggcattgagacctggttgttggaagagactgaaaggactttgaggaagtagttggtaaaacttgaaggaaagtgagaaaaatattattggaggctggggaaaaaaactcttcttagggagtggtggaaatttcgacagcactgttgtctgagataaggtagaaaataggaaatgtacccactaagtcaaggatctagctatagacaattccaggcagaattttaaaagttttaactgcttcttctaactttctataataaaatataatatggagaaatgaactacagaagaataaactattagttttcaaagagaatttaagaggattttgagggcctaaggcagagtttccagtcaacaaaagtttctctaagtaaaacactgcctcggggtaaagatggagtaaacaactataaaacaccttggtaagtcctcagaaaaatgtaaagtactttgttgactcttcaagtaaaaggctgttattagtgtcttaagagtttaccttttggattctgtttgttaaacaatagaactcctcagaaaggacctcaggtagagagggatctatcttagaaagaaacatggtcttggtgggccaagctttcaattttttttttttttttttttttttttttttttttttttttttttttagacggagtcttgctctgtcgcccaggctggagtgcagtgtcgcgatctcggctcactgcaagctgcgcctcccgcgttcacaccattctcctgcctcagcctcccgagtagctgggactacaggtgcccgccaccatgcccggctaatttttttgtatttttagtagagacgggatttcaccgtgttagccaggatggtctggatctcctgacctcgtggtccacccatctcggtctcccaaagtactgggattacaggcgtgagccactgtgcccggccgaagctttcaaaatttttaaagaaattaggatcatggcacaaaaaggggcagcaagagttcaaaatgaaaaaaaaatggcttttgaacacctaatatatgagcaataaacatgctgaaaaactacttagctgtaagtacaggcaatttcttatagaaatggaagaatgactcggaggatgaaagaagtacccagctggcaaagctaagagacatgaagaatcattcccagggaacaaaaccatagcctaataaaagaactgataacatgtactagctaggtttcagaattgttctggactaagtatttctatatggcttctttttctcttttttgaataggagcatttactgtggatttcccatgattgtcttggcattttatgttgcatgtatgaggacacgggtattacgttcctttagttcacaaattttcacagtgagaagaatgacaattgaggtgcctaatctgttcttaggctagatttaaacgatgagatcttgaaactcaagcctgagtctgcttccataattagttgagaatctggggagacttgggagggagagggtatattctgcaggagaagatgtaagtaatttatgaccagagggtagattaaggtgaattaaaatggctgaaaattctttgacgctcttccaatggggagattgggtacatgactgctccccttgtcctgggtgggatctatggctgttttgaccaaaagaatactccagaatactactatgccagttctggtatcaggacttaggagtctatcagcctctatttcctgtctcttaaaagactcttggagccctgagtcaccttgtaaaacatgaaacttaaggcactcattctctaagaaagttagagaaagaaagagaaagagggtgggtgaggaagaagggaaagagagagaggggaaggcaaaaaaggagagagaaagggacacagagccaatgggaaaagagaaatgtctgtcagtcagtttggtctgccataacaaaaatcccataaacttggtggcttaaacaacaacagtttatttatttattatattaattttttttttgagacagagtcttgctctgttgcccaagctggagtgcagtggtgtaatctcagctcactgcaacctcctactcctgggttcaggcgattttcctgcctcagcctcccaagtagctgggactacaggtgcatgccaccacgcctggataattttgtattttttagtagggatgggttttcatcgtgttagccaggatcgtctcgatctcctgacctcatgatctgcccgtcttggcctcccaaagtgctgggattacaggcgtgagccaccgcatcctgcccaaaaatttattattttttttatttgtgactgctgggaagtccaagatcaatgtgtcaggcgctttagtttctggtgagagctctcttcttggcctgcagaaggcagtcttcttgctgtattttcaagtgttggggttgggagttggggaaaagagagagtgcaagctctctggcctcttatagagcacttgtgtcatcaggttgacctcatccccagcatgacatcatctaactctaatttctcccagaggtccaacctcataacaccatcacattgggagttagggtgtcagtatatgaaattgagggggacacaaacattgagtccataacatctggcccccatatatcatggagcagagataagctctccctgctacactttattcttaacttatgatctaggaaattgtgaaataaaaaaaaaaaatagtggggtgttttaagccactaagcactgagttttggagaaatttattacttagtaatacataatgaaaccccaaacagaagatgtagaaaggtcatttccatatcattctgtgaagcatccttttctatttagatcaaataagtgttccaaattcatttaattctatttcaattccaagttttgctgggcatgtatgaaaagtgaaggtctagctgttaacatgttgcctccattatcagaagcagaatttcaaaaacaattttatatcagtgttaccagatgcttcaaataaataattattaaggtaattcaattttaaattttaaagaagattgtcagaaatttgatttttaaaaagtgaaaattaaaaccatattgtggagatttctattcaggacacgaacaatagctcttatcagattaacctgcttatagatgaaagttttaaattctatacaaaatattgaaataaacaactacatgtaggctgtgaagagcaaacaaatgcagccaggttttggaagttgtttggcacatagatgaatggaactgcagttgggtgcatttccccatgttgatggttttcagcatgaagacagattccagtccatgctaagagacatgttaacttgttaaaacaaaacaagacaccagaaaaatagaacaaaatgaaaaacagcagagagccagggactggagaaatagggcaaaaaagcactagttgttccaaccatattctggtttaagattggatgaggaaagtaaaagagaggttatcaaagtaggtggttggtgtaggaaaactcaaaaggaagacggagtagagatttgagttagagctggagatgaaaaacagacatgctacagccatcttttatgtcgtatgtgcttgcttgcctggaattagtgttaaaaatctggacaaagtgtgagtctagcagagaacatcatagtgttgtacaaagtcaactccaggattgagaactggccttcaaatggaagagttaatatgtgatcgattttttttcaattcgatagtacaggtaaacattagataagtgacattactagatctaaaaataagcagtttagcctcgggggggccctgagtgtctatgctttgctttttcttaatacttgcattttgaaatttaactatcttatgataaacttgagcagaacaaatgaaatatgtctgtttttagtacaatttttatataccatatataaaagggtgtttacaagcactgtataataactatatgagagatacttatgtataactatacatattatataatatgtatatataactatacataaaactgtagatatgtataactattgagagagattataaaaagatataaatatgctttttaaattaaaacaccttattatatattttaatgaccaatatgaaaaaatcaaataatatactcagtaggtcataatgtttgcttaacatcattttagaacattataaaaataaagcaattcctagttttgactaaggacgttggctgacattttacttccaacatgttacattctgtctttatatttttaaacaatggcaaaaactcaaaatatgaagagccaagctgctctccttggctctggatatgccttgctttttggatttcagtcaaaaatttcacaccagtgcagcttacttttagattgttactttcagaagtgggcataatcccatttgtgtagttcagatgtacaacctgaagttctccaataactatgtagttgtttttgaaatgaatattcacacaacacacacttctcattggaaatgattctggtatggaagaaagagtggaagttttgaatcagtgtggacttgaattttggcttcatacattgggcaattgacttaacctctccaaatcttattttcttgagtaaaaagtgggaatggtaatgttcaccttacgccagacatagtatctagctgttcataatcataaccataaccatagccataatcataataatgaggaggaggagaaaaaggagtagccacagcaaaagaagaagtagtaataatagtgctactggcaatggaagtagtgttaataatatttacagtaatatttattgagtcactcctgatgaaccagcactatttgaagtataagaacatataaatcaatttaattcttgcagcggctctacaacactttagataactaaagtagaacttggaaaaggaagcagaaggatcatatggaactgcagaggtagaaaaggaccagatcgctgggcaaggtggctcacgcctgtaatcccagcactttgggagactgaggcgggcggatcacgaagtcaggagatcgagaccatcctggctaacatggtgaaaccccatctctgctaaaaatacaagaaattacccgggcatggtggcgggcgcctatagtcccagctactcggaagactgaggcaggagaatggcgtgaacccgggaggcggagcttgcagtgagccgagatcgcgccactgcacaccagcctgagcaacagagcgagactccgtctcaaaaaaaaaaaaaaaaaaaaaaaaaagaaaaggaccagatcaagaaagattgctgagaaccctgagctttactgaataggtgacagggatctaccaaaggtaattaaataaaaaaactaacatgatcagaaagaaaaccccgggagcatattgaaggcagcggttagtaaagttttccgggtaagaaaaagtgcaggactgaactaaagcagagaccgtgggatttcctttttactcagtgcttctatctttggaaatttacctttctccatggctgaaataaatagactgctttattttcaattgctttttaaattaggttttaggagaataattaatctgtaatatattatgacagtgtggctataattaatttttatatttgttatctaatttcaaaaagtttataattattaatttggaatctgtatatatgctacactctttagttaaaagtttgtatacagtcctttttttttaaactctgtatcccagagcacagtgcctatgtctggaagatgagagacacagaggaagacagagaaaaagagtagagaaaggaaaggagagagagacagaagagggaaagcaaaaagcagaaaggaggagaggctgatcaaaataaattacatgatgcagagttttgctacaacatctggcgttctttggattattttttgagggaggtagaaaattcctttagtgtgtaaattaatgctgtttcttggacagttatttggccttggatgccactgaaaaatcagtgagagtcccatagggaacacgtttacgtgtctcttgactgaaacgttagagtgaaagtcagttaaagagcatagtcaaataactaaacaccaaatggggttggatgattagttaaaattatatttaagaagaatattaagtgtaatcacaaatatgtctgtaacacatattcataaaaagtgactggaggacagtagaaaaatgctaacttttttttatcttaggggactgagatttaatggttcttttatattcttcctttttttccttgtaatgtgtttgtattactctgataagaaaaaaatgtaacaagaacaaaaaatttaaaaattctcagattgcggagacagattaacctcttgtaatgaataaagctctattttaagttgcttttcagttttatgaaattaagcttcaaattcaaggctttaaaattgcgggaaaaaagttcaggcttttagagaattcttcctcagaatcgatagttatccactactagacacaagcagtcacaatgtaaacagccctatgtgcaaactattgtggatatgaacagtaaaaccaaaagactgaaatgagaatccagtacgacagccaagcttgccaaagcatcacatcccagtagttcatcaaggtcaggtatggtttcaggcaagactccagggcagtccagtctactgggtaaggacatctgatagaggagaatctggcagaactctgagaccattctaagctgattttctttgctgacagcactctcactcacttagagaagtggactcagtccccgggataaggccctggcaagagctgtacagaagaacctgaaccttgcccagtgggatgtgatatgggacaaaacacgattctgtgggaaattcaactattatgagaatgaatcatgttagttatgatatgtggtgagcaggtaatgtatattgaagaggaggagaggtggagagagaagatgtggagtaaagacaagggtcaagcctatagatcatgccaaccaggtagagagaaaaaatattgtgactcagaaatgtctacaaggatattcagggtttatccttggcatacaacatctggataaatctcttgtttctgacattacctgaggccagctcataaacttcaggtgtgacctgtcaaggccaatctcaaagtatcaggaagcacaaaggcaggaacacaaagtctgtgcttatccgcacaacaaaagccattcttcagaatgtctaggcatcttcctgccttgtctaatcacagaacggtgccactgagagtgagcatgactgatgccccaatggagaataaggagaaggattaaaacagaaatttgagacttggagtaagtgggaaaggaattaaagctatccttttgtaataggaactttgttctatttgacctttcaacatatttatgtattagacaagacagaggcttgagacaagcctgagacaagcttaagacaatgctctacttcaaagcatcatcaccatagtcgtctgtttcaggggaaggatgtgggtagtggtgagcagagacaacctgggatagatgcagaagaaaaaattcaggacaagctgtgtagaatcaacagtctttacagaaaacaataggcagaggtctgtgcaggaaaatgttcctgagtctactgcagatagccgtagcctggggtcttttgttcagagatggggctctagttcttgggatctaagttatttgacataattactttagctgttatctataacaaagaactcacaaatcttaaaggcttaacagaaaagaattttagttctcactcaaaatgcatgtgaagcaaatttagcagccctctagagcagctttttttcaagcagcaacacagggaactatggcacaagtaatttcttctgaacctgcagtccaagttagatgaccttatgtcatgtaaccctaaactgtcctctattattacatctggcttgtgctgttgtattgctgtgagatttctcccactagactgtgaacttctaaaggcagcaactatatctttagtttgtgttagaggtagtcaaaaatgtttgaggcaggaacaaaaatggaaggaagactgatataaaggaagaatatataaaacaccaatttaggaaattcaagtgcatgagcatgtcacttgttaacaataggaaaacaaggccaaaattgtagcaaataaaatatacctcatataagtgcctactatatgtcacacactgtgctagacactttatatagtttgattccaatacatacattcataatttgagacacatagtattatctctgttttttaaaattgtctgtattagttcattttcacattgctatgaagaagtacctgagactcggtaattcataaaggaaagaggtttaattgactcactgatccgcatgtctggggaggcctcaggaaacttgaaatcatggcagaagttgaaggggaagcaagatgcatcttacatgatgacaggagagaggaagagtgagcagggaaatgccacacacttttaaaccatcagatcgcatgagaactcagtatcatgagaacgtcatggaagagaccacttccatgatcctattgtagcccaccaggtccatccgtcaacatgtggggattactattcaagatgagatttgggtagggacacagaacaaaatcatatcattctgcccctggcccctcccaaatctcatgtccttctgaaattttaaaacacaattgtgtcttccctacagtgccctgaagtcttaactcattccagcgttaacccaaaagtccaagtccaaagtctcatctgagacaagggaagtcccttctgcctatgaacctgtaaaatcaaaagcaagttagttacttcctagataaaatggaggtacaggccttgaataagtgctcccattccaaatgggagaattggccaaaacaaagggactacagaaattccaaaacccaacagggcagtcgttaaatcttaaagctccaaaatagtctcctttgactccatgtctcacatccagggcatgctgctgcaaggggtgggctcccaaggccttgggtagctctgcctctgtggctctgtagggtagagcttccatagctactttcacaggctggtgttgagtgcctgcagtttttccaggtgcacagtgtaaactgtcagtaaatctatcattctggtgtatggaggacagtggccctcttttcacagctccactaggcagtgccccagtggggacttttgtgtgggagctcaaaccccacatttccactctgcattgtcctagcagaggttctccatatggcctggacatccaggcatttccatgtatcctctgaaatctaggtggaaactcccgaagcccaactcttttatctttgcacacccacaggccccacaccacacggaagctgccaaggcttggggcttgcactctctgaagcaatggcctgagctgtaccttggccccttttagccatggttggagctggagtgcctgggccacagggcatcctgtccccaggctgcacaaaacagcagggccctgggtctggcccagaaaactgtttttccctcctcggcctctgggcctgtgatgggaggggctgctgtgaatatctctgaaatgctttggagatgtttttgcagaaggtgaagaggaagcaaggcatgtcttgcttgatgacagtagagagagtgagcggggaactgccataaacttttaaaccatcagatctcttgagaactcactcactgtcatgagaacagcatggggaaaactgcccccatgacccagtcactctcaccaggaccctcccttgacatttgggaattacaatttgagatgagatttggctgggtacacaaagccaaaccatatcaatgtcacttagtgaaactaagtgactaccaagttcactcaggcagctagcatttggtattcaaattcaggactgttgacctaaagcttctgtgtgtcttaatgttgactaatttgagctggtaatctaggtgtcttaaaatcactgttgcttagaaagaggttcagtcttcaggttgtgggtgaagttgaatgtgttggtgagagttcaatggcctcagggggcctcatagaaagaaatgcagggttagagacctacccagagctatgttgatctttataagaaaaaacataagcctctggggtcaacttgatctttgagattggagaaattttgtgcatttatcctcttgatgaaaataaatcctggcatatttggtgttagaactcttagattgcaagtaaagaaagccagctggagctaacttaagcaaaacaggacagcaaattataatgtaacaagggagcgtcacagagtccaatgagaagattgcagctgggtcactggaaggattggaattatattctgggaatagaaataatcaataactcaggaggaaatctctcttcaccttcactcttctctgtacctacgtttcttattttctctacggtttagcttcctctgctcccctgtctacagagccacatgtatttcccttacttttatttatttctcattaattttaaataccaagagaaaagactccaattagctcagcttgtatcaggaacctacccctagatcaattaactctggccaggaaggagagaaatggtgtacttcaggtaatgaagtgaatcatatcctaaaaaatagacaactaatccaggtgaggtggctcacacctgtaatctcaacactttgggaggccgaggtgggtggaggtttaggcaggcaacctgaggtcaggagttcaagaccagcctgaccaacatagtgcaaccccatgtctactaaaaatacaaaaaaaaaaaaaaaagtagacagatgtggtggcacatgcctgtaattccagctactcgggaggctgaggcaggagaatcacttgaatccaggaggtggaggttgcagtgagccaagatcatgccattgcactccagcctaggtgatagattgagactccatctcaaaaaaaaaaaaaaaagaatagacatctagaacaagtgaagatcaactaagaatgtggtattatggagagagtgagggaaaggaaattatgggagccctgtgagttagatagatactctgaagacatctagtatgttgacagtacttacagcctacagctggaaagaacatgggatttggagccaagaaaatctggatttggatattgtttaaccttgcacagatcatttaagctcaatttaacataaacgcagatctgttttttatttgtaatattgtagtataatttttacttttaataactactgtgatgtttaacaataaaatatgtaaggtagctaggacacagtgagtgctaaaaactgatatttgccattacagttcttttcttgtgtttttgtttcttctaattgttttatctatgtgtaaagcaataacttcaaaattgagtgaaatgggagccattatcctatgactattacccacataatttcttcattatgtccaatctttgtacattgtgtccagtttgataaacagctctgatttattttcctgtcttgaatatatttaccagtgaaagctttccagtgtgtcactgaagaatgaaagcattaaactgtctggagacagaacttaagaatttgtgtatctcctttggccacagtttatcttgttttaaaagtgattgttggttgatatttcgtcttctgttcttttgctagcttcttcaagaatctttagtttataaacatctcaggatatacctggagtaaaaatcaagtaaactatccaaacatcatatgtatgtctttttaacaagtaaccttggctttagggctgtctaggatctgttcccaggtatttaactacttaaatatcttccagtattattgcttatatggtacagtgaaggtctgtgtaatcaggctacttcactgagtttctcaatgcattcctttctttgcttactccaacatccagtttggttttagttaactagattacgattataaattgaacacatttatatttccttttttcttccttaaagctagtcttattacaaagtcatattaaaaataaacacaaatatacctgcaaaaacccctgaaaaggaatgtaaatgtttactgaggttgtcttgaggacactgagagagggattagatgcaacatcagacacagaattttctatcaatcccagttatctattcattactacccctcaaaagtcaaatttatgacagccacacacatttcttcctcgtctttttttttaattctttctctttctacactttctggggatttgatttcttctgtttgtattcttatcttctacctgttcacaaaacagaagttgtctttattggataccactcttcatagaaaaggagggagaagggacttgtgagaattgttgcttaatattttgtcctatcacataataatagtatccagcataattcaagttatagtgataaagatagatagataaattgattgatttgtcagtcagtcaataggtagatatattggctggcagatagatagattatattagtccaatttcatcctgctataaagaactgctcaagactgagtaatttataaaggaaaaaatttaattgactcacagttcggcatggctggtgaggcctcaggaaatttacaatcatggcagaaggcaaggaggaagcgaggtaccttcttcacaaggcagcaagaagaagtgctgagtaaagaggggaagtgtcccttataaaaccatcagatctcataagaactcacttactattatgagaacagcatgggagaaatcatccccatgattcaattacctccacctagtctctcctttgaaacatggggattgtgagaattacaattcaagatgagatttgggtggggacacaaatctgaaccatattattctgctcctggcccctcctaaatctcatgttcatttcacatttcagaaccaatcatgccttcccagtagtccctcaaagtcttaattcattccagaagtaacctaaaagtccaagtccaaagtcctgcctgagacatggcaagctgctttcacctaggagcctgtaaaataaaaagcaaggtagttacttcctagatacaaggggtgtacaggcattgggtaaatacccccgttccaaatggaagaaattggccaaaacgaagtggctacaggccccatggaagtccgaaatccagtggggcattaaaatcttaaagctctgaaatgatgtcctttgactccatgtctcacatccagttcacactgatgcaagaggtgagttcccatggtcttgggcagcttcatccctgtggctttgcagggtacagcccctctcccagatgctttcacaggctgccattgagtgcctgcagcttttccaggtggacagtgcaagctgttggtggatctaccattctgggttatggaggatgatggtcctcttctcagagctccactaggcagtgtcccagtgtggactctgtgtgggtgctcttaccctccctttcccttccacactgccctagcagaggttcttcatgagggctccatccctgcagcaaatttctgcctagacatctaggcacttccatacatcctctgaaatctaggcacaggttcccaaacatcaattcttgacttctgtgcaccctcaggcccaaaaccaaatgtaagctgccaaggcttggggctttcagtctctgaagcaacagcctgagctatatgttggccccttttagccatatctgggacacagggcatcaattcccaagactgaacaaagaagcaaggccctgtgcccagcccacaaaaccagttttccctcctaggcctctgggtctgtgatgtgggggctgctataaagacccttgacatgccctggagacattatttctgttgtcttgctgattagcatttgactcttcattacttatgcacatttctgcagcaggcttgaatttctcctcagaaaatgggattttcttttctattgcattgctaggtggcaaattttctgaacttttatgctctgcctcccttttaaaaataagtttcagttccaaactatctttatgtgaatgcataaaactgaatgcttgtaagagcacccaaatcatctcttgaatgttttgctgcttagaagtttcttccaccagataccctaaatcatctctctcaagttctaagttccacatatttctagcgtaggggcaaaatttcaccagtctctttgttaaagcatagtaagagtcacctttattccaattcccaaaaagttcctcatctccatctgagatcacctcagtctggacatcattgtcatattactatcagcattttggtcaaagccattcaacaagtctctaggaagttgcaaactttcccacatctttctgtcttctgttccaacctctgcctgttacacacttccaaagtcacttccacatttttgggcatctttatagcaacaccccactctctccagtcccaatttacttctataaagaactgcctgggactgggtaatttatagaggaaaaaggtttaattgactcacagttcagcatggctcgggaggcctcaggaaacttacaatcatggtggaaggcaaatgggaagcaaggcacttctttacaaggcagcaggaaagagaagtgccagggaagagccccttaaaaaaccgtcagctctcatgagaactcacccactatcatgagaacagcataagggacactgattctatgattcaattacctccagctgctctctccctcaacacgtggggattatgaggattatgatgattacaattcaagatgatatttgggtgggaacagaaagcctaaccatatcgtagatattccttatataagacttgaaaattgatattttcatctctgttttataaagaaggagatcaaagttcagggaaacatgttcagtattaggaagtagcaatgcttgtggtgatgtttatcccagttatccaggtttgatcattactcattaaatgcttgcatcaaaatatatcagatgtaccccataaatgtgtacaactattatgtacatataaaattttaaaagtttaaatgcagtatgtttttaattaattgacagattctaaaatgtatatgaatgttcaaatgacccacattagtcaaaaaaattttaaaaagaaaagcaaagctgcagaacttatacaagctgctttcaagacctactataaggctgtattagttatgacaatgtgttattgacataaagattcatgggaagaataggtggcatctgaaatagactcacgtatatatggttaattttggaaaaaggtataaatgtaactgaatggagaaagagaatcttttcaacaaatatttatataaaactgaatattgatatgggaaaaagatgaacatcaatcttgacctcatacaatacagaaaatattaaattggaatagattatagacatgaatataaaatctaaacatagaatttatagaagaaaatgtaagacaaattcttgaaaccttcaggtggtaaatattgctcatctagcacacaaagattataatcctccataacggataaatttaacttttaaaacaattaaaactttggctctacaatggacatcattaagaaaataaaaagacaagttacaaaatgggagaaaagatttataaaacatatatatctgtcaaataacctttatccacaatacataaagaacagttataacacaataagaagagaaacaacccaaaacaaaaatgagcaaaacattttaagaaacattataaaagaaaataaaccaatggccaatgagcacagaaaaagtgctcaacttcagtgaaatgcaaatgagatacattgcattacacattacaaatgaggtacattacatatccattagaatggccaaattaaaaaaataataataccaaatattgactagaagatagaacaactggaactcttattcactactcctgaaatttaaaatggtacaaccactttagaaaactctttggcagtttcttataacgttaaacatacatctacaatatgatcaagctattccacatctaggcagctattccacacctaggaatttaaagaaaagaataaaaagagatgttcacttagagatttgtatacaaatgttcataacagctttatttgtaataattccaaactggaaagtgggatgaatctaaatatcactccctaggtgattgaaattttaatcatgcattatattcatataatggataactactcaacaattaaaaagcagaaattttaatctgcataacagtttgtattaatcttgaaatcattaagctgaatgaaagaagctatacacataaaatatgattctactcataaaaatgcagaaaatggaaactattttataatcaaagaaaacaaactagttactgactaggaccagggtgggaacaattaattggaaatagcacagggaaatgttgtgtggtgttctcaccacaaaaatgttaatgtgaggtaatgcatttggtaattagtcagattaaaccatttcacgatgtatttatatatcaaaacatgtacatgcaatgaatacacataattatatctgtcaattaaaaaataatactttttttttaaaaaagaaaatgttctgtatcttccttgtaatggtggttgcattagtgaataaatttattaactcttcttggaatgtgcccttaaagtgggtgaattttactttatgtgaacctcaatatgataattcaaatcttacataggagtatgaatcaatggtctgatatggtttgaaagccagagaaaattaggtaaactttctgagccttgatgtttctcacttacaatgtggattaatttacaactgtcatattgaaattaatgatataaccaaagtattatacctagaaggtactcagtacttgttagttcctttttccttacattattttaactaattacatagttttcctttgataggccttaaattaaaagaatcatttccaaaactattccagaaaggatgctaacttaaacctacttgacatttgtagtaagcaggcattaaacagtgctctatattgtatttaaggttaatacattttcagaaacaacttgttttataatggactttcttgagggtagaacttatggagaataaacagcatctacttaaagtgtgcattagaaagattttgacagatttgtatatccataaaccaccacagctaacaaatacagaacatttgcatcccaccatctttcccatttccaaaagtttccatgacctcagtgcagttcattctcctctggccccagggagctgctgatctgttttgttttgttttatttttaaatcgctatggattagcttgtatttttaaatttttatgtaaataaaatcatgctatacatatgtttgtgtgtctactttcttttatccatataatgattttgagattattcatccatgctgctgaatgtactagtagttagttccttttaaatgatgaataggtttccttgcatgagtatagcatgttttgtttatctcttcactcattgatggagtattgaattgcttctaatttgaggctactgagaagaaagccaccatgaacagtcatgtgtaattttttagtgtggacatgttttcattttctctccattaaatacctaggattggaatgtgtgataagaatctcttttaattcaatttctacagagaagaaaaacagagtaggtccaaataatgaacagttaaataacaaagcctggttatgtatcttctacacagtaaaatatggtcatttagatggcagcttttaatccatctgtttctgtaccagcctttcaccctcagactactttacgtttatatattctcatttatttttattctctcattgctgagcttacttttgcccttccttgaagttatcagtatacctgctattaagagttctgtgctttccagccaggcaccatagctcacgcctgtaatcccagcattttgggaggctgaggcgggaggattacgaggtcaagagatcaagatcatcctggccaacatggtgaaatcctgtgtctactaaaaatacaaaaattagccaggtttggtgacacgtgcctgtagtcccagctaatcgggaggctgaggcaggagaatcacttgaacccggaggtgggggttacagtgatccaaaatcgcgccactgcatttcagcctggcgacagagcaagactgtctcaaaaaagaaaaaaaagaaaagaaaaaaaaagcgttctgtactttcccacttattgggtctaatcagttatcctgggagtttgtatagctaagtgagttaagtttgttgtaagtgatggtgaaacaccgaatgagacctctctaccgtgagtcctaggaatacttagtttgatttattaaagggctttgtttcccttttgccttctgaataactgtggttgcctgggaagtactctgcaataaaatgtagataaactcctaaggactaattctactttccttggtagatacaatttttatattgaaaacaattaagtttacttttattttatgaataaccttataaaatcatctgaatcaacctcaaatatttctcaaattattttattttattttaaacttttattttggattcaggggatatatgtgcaggtatgttatcagggtgtattgtatgatgttgagttttggggtacaaatgatcccataaacccagttactatgtgtagtattcaatagttggtttttcaaaccttggcactcccagtaaaccccagtttctactgctaccatttatgttcatgagtacctaatgtttagctcccatctataagtaagaacatgtggtatttggttttctgttcctgttaatttgcttaagataatggcctccagctgcattcttgttgctacaagggacataatttctttttatggctgcatagtatttgatggtgtatctgtgtcacattttctctaccaaatctacctacattgattccatgtctttgctattataaacagtgctgcagtgaacctgcaagtgcatgtttctttttggtagaacaatttgttttcttttggatatatacctagcaaagagattgctgggtcaaatggtagttctgtcctaagttctttgtgaaatctccaaactgctttccagagtggctgaacaaattgacattccctccagcagtgtataagctttcccttttcttgacagccttgccagcatctgctgttttttctttctaacagtaaccattttgactggtgtgaggtggtatctcattgtggttttgatttgcatttctccaatgatcagtgatgttgagcatttttcgtttgttggctacttatatgtcttcttttgagaagtgcctgttcatattttttgcctgttttttaatggggttatttgttttttgcttgttcagttgtttaagtaccttatagatcctggatattagacttttgttggatgcatagtttgtgattatcttctcccattctgtaggttgtctgtttactctatcagttgtttctttcgctttgcagaaactcttttgtttaattaggtggcactggacaatttttgtttttgtagcaattgcttttgaggacttaatcatattttttttttccaaggctgatgtcctgaatggtgtttcctaggttttcttctaggattcttatagtttgaagtcattatttaaatctttagtccatcttgaattaattttgtatgtggtaaaatgtggggacccggtttcattcttctgcatatgactaaccagttattccagcaccatttattgaatatggagccctttccctgttgcttatttttgttgactttgtctaagatcaaatggctataggtgggtggctttattttagtgttctctattccggtccagtggtttatgtgtctgtttttctactggtactatgccattttggttattgcagccttacaccgtagtttgaagttggatattgtgatgcctttggctttgttctttttgcttagtattgctttggctattcagggtcattttttgtttcatatgaatttaagagtagatttttctaattctgtgaaaaacaatattaagagtttgatgtgaatagcattgaaactgttggacaatatggccattctaacaatactgatttttgcaatctatgggcatgaaatgtttttccatttgtttgtgtcatctattatttcttttagtaatgtttcatagttctttttgtagtgatctttcacttccttacttagacgtattcctaggtattttatgtgtgtggctattgcaaatggaattgtgttcttgatttggctgtcagcttgaatgttattggtgaatagaaatgccactgatttttgtacattgattttgtatcctgaaactttactaaagccatttatcagttccaggagccttttggcatagcctttagagttttctagggatagaatcatatcatcagtgaagagagatagtttgttccttttcctatttggatgattttatttcgttctcttgcctgattgctctagctagcacttccgtcctatgttgaacagcagtagtaagagtgggaatccttgtattgtttcagttctccaggggaatgcttccagtttttgcccattcagtgtggggtgttggttgttggtttgtcataaatggctcttattattttgaatttcaagcatttttaaagatccacattcaaaagttctaataactttttatttcttagcttttttaaacatcttcatactacattttatttagagaattcaaactattcttttgctccttgaatgtgtgtttgtgtttgctgatagagtgagggatatatgctttgaagtataattcctaatattttgttttggcaaggttgtgcaaagaaacattatggaatctggaaattagtgggaatcattagtatatttcttataaattccgtaaaaatgacatgacattatacatctttacatatagcagaggaggaaataagacattttaccttttttttagcctcttcagggcaataactgtagcgcatgtctcattgtgtacccaatatccctcttccatattggggagctacgccttccccaacccttttcagttctaatgggactatcaagcactgtttgctccctgatcataatggtacaaactcattcctagtcaagcagcctacctcattttacacttcatagtaattggtccaagtaatgaacatagaaatggtagggtactttattatatccaatatataaatattatgagagaaagagagagagagaatgatgctttcttatctgtgttgttaaggtttaaagatgttgccttggttctgcctgtagcagaaaagagttaggtcaacattcacagagggcagagataatgaaagtcaagaaatgtaaagagaatcagacagacctgatattggtgagactctgaatataaatgttatatatttgaaatacacactcttgtactgcttatatatgttagctaagatagttccgttcttcactgcaggattttaacgactttattggctgctccctagctcttgaaactttggcttcattgatctcttctttctgaactgcttcttcttacccgatgaataccaacttatatactgatagtctccttacagatacccttaatttattttgttggaaaaaatgttcacctcttttaagatgataaaaattctcatagatcttacaaaataattttagatacatcaatacattacttcttatatgtttttaaactttttattcagtacctcatttacctgcattttatcttctgttcaaaactataatcaccttaaaacctagggttgtttggttacatctgaaaatttctctacagtatacagcacaatttcatattcataggaagcactcagtaaatggagtcaaaaataaataaattaaaatttaaaaatacaagatattttctacatgaacaactttccctaactccctgaaaaccatgtgaagtgactttcttttatgctctcagattacttttcatttgcttcaaacatagcacttctcacatggtttagaatttttctgttgactcatcttccttatttctttataatgtaattgaagactttacaggtggtgtttattatttgataccaacaacctaacacagtatctaagaacataatgaacactgagtaagtactttttgacttatgaataaatgcaatgtaatgcagtcctatgtaaggactacaaaatattctttaccatctaattttttacattaactctattgctcatcttttcagtgatttttttatcataatcacagatagatctttaaatggaaaattattaaattagaaattaagaaatttttaaaaatagagtatattttaggtgtcgtccttagagcactgtggatcagaggtctggtgaattactccacgtcacatggttcattaaggaccaaccttatttcctttccattattcttttattataccatacaacttttctatcagtattggattatccaatttggcaaaagtgtagagcagtgatttttcacatatttttccttaagggaggaggacgtgctgtggattcaggttttagttaccagaatgtcaaaggaatagagttcacccagaccaaatgctcctgacatgctcttgcaaagaacatgcagatgactattgcagatcatttttaaaaataggaattactacgatagaatccctaaataatcatattattttagtctgaatagatactaattctgatcatgtttttcttgattttattgtttttttttataagcaagtagcatctttgtcccccccccaagactttctgcagtcattgtaagaactttgataattgaattcctgtggtcattttttatagctgtccataaaccttttccaaattttggttggtatgaattaaggtctgttcctgttaaagtacaagcagtttgtttggattgaatgcttgtctcttccaaaaataggtttaatttttctttttatttctattctttacttgttactaactacaaattcttaagtgtgtttcaacttttatgtcaatgtttttcaaagttgaaaaaccctagctctgtttagccaatttatttaatcttcattattttgggatttagtttgtgtgtttgttttccgaagagatttaatgtaaaagtgtctatactaacaatgcttttttgaaattgctttattaaggctagatatagagtttttaagttaattaagtctagttaatatagaattttacaaatattcctccatagatttcactttatttattcagtaaacatttattaagtacttgttgttttccaggctacacactgggtgctggccttacagtggtacacaagatcaacataatccttatttaatggtgtttatttcctcatgagaaaagtatatattaaagaaatcacccagcattttggcaggctgaggtgggaggattgcttgaggccatgagtttgagaccagcatgggtaacatagtgaaactttgtttctacaaaaatgtttttaaaattgaaaaaaaaaaaattagccagttgtggtgtcatatacctagctactcagaaaacagatgggagaatcacttgagcccaataattcaagactgaagtgagctatgatcatgcctctgtgcctctgtactccagcctggatgacacagcaagaccctgtctctaaaaatgaataaataaataaataataaaggaaataagcattaacaaagggtacagggtgcttttgaagcacatagaaaaagtaaaggaaggattgcttggtcaagtaatgtttaaccagatatcaatatattgatgagcggtcaaccaaataacttaaaaacttgatgaacttaaaaactcgataatccagaccttaagaaatatagcaggacattttacattacttttaataatcctggccaatgaaataaaaagtttttagaaaaaggtccttgttagaaacacatttttaaatatgtctgacatatactcttagatataatacagttatgacttgaataacatcaaagtgacataagtgagagtatttctggtaatggtggagagtggtcatttaagccctttgcatatttcaattacgcattgaaccgaatattaaaaataattattcaacatcttagaaaacaagaagaatgaggagaagagcaggaggaggaggaggaggaggaagagaggaggaaactgcagccatcactgccattgagtttgttttcgaaaaactgtagctgaaagggcaagcattgcatgtttaaggctttctggcagaaagaactccccaaatacccacgatgctatcaggcaagaacagcagacacccctagacttactggctcaaagtaccaaagaattgtgtttatgactgaaataacagctggaagttcaaaggggaaaaatccggcattgaaagaatttcaggagtaagacccaaaatatgactataaaccctgcacaaataccactttgacagccagactttacatgcagataagaccctcaaggatcctagtaagaaatgcagtcagagatcagataggagcctacacttgaaaaatagtgctgaaccaggtaagatatgagtttgctactttttaactgagtgaattcctcagcagtatggagttcagaaagctgaaggcatcttatcttgagatttaaaaaaaagcctgagattgtcagagcagctgaaatttagagaggaatctagaatcaggaaaccatagttagtctgatgatagtataccttgacagtgtttttctttgtgttcatttgattagggcttgtgaagcatatcgagtctctaatttctattgatctatattcaattttactaaatttcttacctctttgaatttctcttaaaagatataggactgtttaaaaccaaaactgtaacattgtattttgaggtttataatgtatgtagatgcaatacatgtgatagcacagtactaacagggaagtgagtggaaatgtattgctgaaagattctgatttttttttaaggatgaagagaaatgacatcatatggcaactcagatctaaagaaattaataaagaacattagagatgccaaataaaaagtgaatatataatacataagaaatatcactgtagaaattaaaggagaacaaacaaaaagccaatgcaaattgttaggtgtaacaacaaatttattggatgaacttaacagtggaatggaggtggaagaagatgtagttaatgcaataaatgtttttcaagaaatttgggacattttcaggtaatttttttgcaacagaataaaaagcctaggaatagccgcacatgtatatggtcaactgattttcaacaaattacttttaagcaaatattgctagaacaacaggattctatctggaagaaaatgaatatctattaatcgtcccatgccatacataaaaatagatttgacatgaatcatagacctaagtatatatgctaaaattatagaatttctagaataaaaaagatttttacaatcctggtataggcaaatatttcttaaatagaacagagaaacataactattaaatatattaattaattgggatttacaaacattacactcttttaaaaagacatcattaggaaaatgaaaaaacaagacacagaatgtgaaaaaaatttgttatgcatgtatttgaaaaaaaaaacttgaatccaaaatatataaatgtaaaacagacacactgcaataagaagattttttaaccaaagcaataaagaggagaaaaatttgaacagatattttacaaaagaagctatataagtgacatagccataaacatatgaaaaagatgttcagcattataaatacttattagaactgctaaaaaaaactcacgctaaaaaaattggcaaggttgtagagcaaatggaactctcatacacttctggtgaagattttaaagggtacaactactttgaaatagaatttatcagtgtcttattgaagtaaatttttatgaaccaaatggcttagcaattgcactcctggatatttacccaagataaatgaagataactgttcacacaaaggcttgcacatgcatattcataaaaattgtatttattctagccaaaacttagaagcaaattaaatgtctattaacaagtgaatggatgaacagatgtcatgtcattttcattccatggaataatactcagcaataaaaacaaatgagctattgatatatgcaggagcatgcatgagtttgaaaaatattatgctgacctaaagaacagaaacaaaagagaacatataaaatgattaaatgtatacaacactcaagaataggcaaaattaacatatacatttcatccaaggaatgcaaggttagtttaacacacaaaaatcaatgtaatgcatcatcataatagaacaaaaaacatgatcatcataggagacacagaaaaagcattttataaaattcaataccccttcatgataaaacaaacaaacaaacaaacaaaccctcaacttaagggcacctatgaaaaacccagagctaacatcataagaagtactcaatgctcttcccctatgatcaggacaaggttatctgttcttgctaattttaataaacattttactagagtttgtagtcagaaaaactagttatgaagataaaataaaaattataaagaaatacaaattataaagatagaagaaaactatcttttttgtatattagttgattacatatattgaaaatcctaaggcatctgtgaaaaactgttagagttaaataaattcagaatttttagaataaaatatcactttacaaaaattaactgtaattctatacactagtaatgtcaatatgaaaatgaaattaagaacacaattccatttacaacagcattcaaaagaaaaaactactttagaaataaattttatttaaaaagtgtgatattcatgagctaaaactacataagaatcttgaaaagttaaataaaatttaaataattgaaaacccaccccatgatcatgaagcaaaagaattaatattgttaaaatgacaatattctctgtcttatttcgttctgtgctgctttaatagaatatcatatactgggtaatttataatgaatagaaatttatttaccttgtggttctagaggctgggaagttcaacatcaagtggccgcatctggtgaaggctttcttgttgggtcataacgtggtaaaatgggtaaagcttattaaacataaattgtaaccccataaatattatttttaaaaatgatattagtaacaggaaaaaattgagtagtagaaagagacatggatttatgttatggtttccttgcacattcattcagtgatcttcagcagattactcatccatctcaaacttgtattctcctctataaaaataaagataaaaatatatacatcacaggtttgttctgaggattaaataaaatataattttttcaaatgccatatttatgtcaaataggagtgtattagtcagggttctctagaggcacagaactaatacgatggattaaaaacaggagtttttaatctgcatttcttctggaggctatttttttgtttgactcaattgtattgcaaagattattttgcttatgtttgaaaaattatattataaataaataccttaatttctattgcatatcattgcacattctctatagctagagattttttcattgctttggatttttgttatttggttttcagtgagatttaaagtcaagtattccataggatctagtgagttaagacaaagctctgttggaattccttctatgaatgtgatttttttttttttagacggagtttcattcttgttgcccaggctggagtacaatggcaggatcttggctcactgcaacctccacctcccaggttcaagcagttctcctgcctcagcttcctgagtagctgggattacaggcatgcaccaccacacacagctaattttgtatttttagtagggatgaggtttcaccatgttggtcaggttggtctggaactcctgacttctggtcatctgcccgcctcagcctcccaaattgctgggattacaggagtgagccactgcacccagccgaatgtgaaaatattatagtttcagagagtttcacaaatattcctccaaagatttcagttaaatagcttacttcctcaacatattttcagaactgagtatgttctcagaactctgctagatgctactcatacagtggtgcacaagtcaagatagaatcctactctgaagttctttccctatctgtgttgctacatacagaccagtaactgcaagtataatcagtgggcaagaaccacaggatgttttagaagtgtatggcaaaggtgggggaagaatttaatggtcaagtgatgtttaacctaagattaagattaatcgcagcattatttacaacagccaagatatggaaacaacctaaatgaccatagacagaagaatggagttaaaatatggtaaatacatacaatgtaatattactcagcctaaaagaaggaaattctgccatttgtgacaacctggataagcctagagtatgttatgcttagtgaaataaatcagtcacagaaggatgaatacagcatgattctacttacatgagttacctaagaaggtgaaactcatagaatcagagaatagaatggtaattatcagggtctagagtgagggaggggaaatggggagttggttaaatggtataaagtttcagttgtgcaatataagcatattccagagatctgctgtaaaacatagcacttacagttaataatattgtattgtacacttgacaattattaagagagtagacctatatcaagtgttttattataaaaaaggaaaaggaaaaggacacagcaaattttggcaatgatggatatgtctattaccttgattgtggttcgtagttccatgggcgtttgcatatgtccaaactctttaaaatgtacacattaaatatcagtaacactttaataaatgtgttaaaaaagattaatgtattggcttcattaagaggaaacgatgcaatatataaggcaagctgataacatatcaggtaaaaaattcaaataaaaattttctattgagctcagagccaaattcagcaatataaacacctactaattacatctgtaatctgcaaacagagaagattgatggtcaaagtgagaagtgtgtttcttcaatatgtttattatttcagtaaattgtcctcgtcttaaaagacgtaggcctttttgtaaacaagtattgtgtgaggtatgtgtggactccaagagaaatctggagagtggctcttctctttggaaaactttactttgttcaggtaaaggaaagctcctgaaaacaagaaacctgaaaaataatttaagtgattctaaacccttaaatacactccaaagaagcaattttaggaagcttccactttggcttcaagagttggccaaatctgatattatttaaaagaggaaatagactatttctgacgcacagatatttgtaatcaggattctatttttgtcatcggaatttctgttagcaattagacggtccattgccttcaacaataacccctagttatgtaataccccaccagtaaaaccatccccagtactatgcattaatatgtggaatctaaagatgttaatctcatagaaacagggagtggaaaggtggttaccagaggatagggggaagagtaagggatgaaaaaaagagaaacgttgacaaaagggtataaaattttaattagactggaataatcagttttagtcatctattgctgtaatgcccacagttaataataatgtattgtatgtcccaaaattgcgaaaagaatagatttttaatgttctcaccaaaaaaaatgatgagttcatgaggtgatgaaaatgtgaattagttgattgaatcttttaatgatgtatgcatagatcaaaacatcacattgtactccataaatgtaatattaataatgattatttgtcaattaaataaatttttaaaattcgtaagaactccaaagaaacaatggtagcatacctacatatagcacgacacaaagaattatgtttagaaaaaataatgcaattacaaatatttcagaaaatgtttatctgggacttttgaagcaggaggaaaagagattgtgttaaaattaggagaaaatacattatctgtccttagatactgaggaggatgtactacaagaccagaggtaggcagtcttatgtagatttgttttaggaatggacacagctgaaatgctagaatgtaattttataaattaagcaattcctggatccaaaccgatatttctcaagtaatatgcataggtaccatgtaagccagaagcatgttgctgctaaaatggaaacataatcctatttcaaaaaaatttatcaaacattttaagtttataaaaagttcttgcttttttgttttctctgaatttttcttaaactatgggtgtctgctattatttatctattctacactcaagtatagagtgtcttctgattctgtaaaaattacataatttgttagtaattaaaaatacagtattccacattcttttgcaagagtttctgtgactttatgttactgtcccatctgagcaatattgagaaccattgatttggaactgtagtaatctcactctatcatattcgtagttaagccagagaagatctcagaaatatggaagagtattttgtaagtttcatatttttgcctagggtgtgttcacctatctcagctaaggcaaatagaagctatgtcttggggcatcttttaatctctaaatagaaaatataagcttctttgctctgcatgatttatgaggaattttcttcatcttcttaataagtaactcaggctgtcactctgtaagatctgaatgagcagggtaccttctaggttacgcttgaaagtgctatcactttggaaagcctgaccatctccttcctgcctagatgtctaacaggtgcattgcacagtagcctttttatgccttataatacaaccaatatctaactttttcgaaagaatccacagattccaaagaagaaagcaggaagtcatctatttaccactccgtaggttcaaattacctccattaatggaggctgtgtatattcctactacccatcattacccggtcatttctttgtcttgcaatacctagcagtgcctggcatagaggaggtagagaagtttgagtggacatttttcatctttatgtagagtgctatcagagcccttgagttgattacaatcagtggacacggacacatcgtgttttagttttccttccaacccctgattgttgtgtgttataaggcaggtcattgcaccttgctaaatctaaatggtttactttctgcccttgtggttcttttttctgtgctttcaaggctgattaatttcttctctgatatactctttcatcagatgtttggcaaaatttagtttaaattcattaacaaataccattctaaaggtcatgatggctttcctaaatctttatgtatttatcttacaatcactactcattttcctagtgtgtaacttgttgatggctcccaacttttatctctatctaaagtaagttgagtcttagagataggcaggggcagcactggactgaagaatttgtcttctttgtaatttcagacaattgctgcccctacaagtaccattataaatggcaattagagctgggcaggacagggagacagagagacccctgacagtatatgacattgcccttttgttccaatgaagtcaattcatattccagattgagactattttcaattaatcgtgctggttaatgtctaagagacactattatattagtaatcaagatatattgtttcttttgaacttccaatatattttggccatgcaattctgttggaagaaaaatggtaattaggtttgctcagaatgatttattatttacaagtatattggtatattgtgcttattgtttctgattcaatttttttgaggaacagaattatgatattcattatttaaaaaataaaaacattttaagagtcatatgttcataaagttctcagtgacatcatgatttgaattgagaactaaattatgtttcctgaataataggaaaacaccatttttaaaaaaaatctctgtgctgagtctttctgactggacaactgtgtgcaatggaaactttgcagctttacaaacctggatttaaataacaactccgtcactttgttgctttgtgaacttgacaagtggcttcacctttcagatcctcagtttttcagtctgcaaaatggggttaattatagctacctgagaaagtgttttgagcactacgtaacacagcattgagaacaggcctggcctggtgccggggagattgtaggcgcagagttaatgttagtttcttttttactcccatcctctctccatgacttcttcctcatatccgtcctctccaaaaaatgtccctgtttgggcagtctctcaacatatcaaaaaatatgaaaagttatgacatgtcatttgtcacatgattatgttctatctcattgcttagaagctggcacgttcaaaacaccataaatagtttttaaagatataactgtctttattttctcaacacgagtaatcttagaaaggctcaagaaaagaaatatttcagagttactggtgattaaaattaccatcaagtgtactggcaagctctgaacaaaagtacacttgtgacctgggctgtctggccacaggtcagtcaaagagtgacacttgtcagagagctggcgctcatttacaagacatcacacctgtagtacagacatcctgagtgcggtgctttgggaacttcacttttgaggatgtttgtttttctacctaatgcaagtatgaattaggtagcctataaaccagtatgatattaagattctcatagctaacagtatcttggagggttacaagaaagtcagtttacataccaatagtttttgcattatattatttttaaaagcatgtttatttatttgatcttcctggttgtatatattaccaatgaatgggcgcttcgtataaaaataaatctccttctatataaactatgagggcaaatataacttttgaatgtgtttagctgagagagtatttggctatttggattttaattcctatttgtttagatgctttgacctttaaatgaaactttgacttttctaagaaattcttacgtttttaaaggcccatcactgctattcttggtggtaaatagtaattccctttagaagcttacctatcctgaactcaactttgaattatctaatatttaccatgtgcaaactactaggctgggtactgcagaaacataagagtaaaagagtcaatgaaaataaccataatgaagcagaatgttatacaagagatattctaaagtggaataaccacattcgttttggatactgaattgccccatgggatagatttgagaatagcttttagcaaaaagtcatttatatacctatatacacacacatagttttaatcttcattcaatatatatgtatatattgcaatatatattatgtaagtctgtgtgtatatgtgtattacattgttatatattatatgacatatgcattgtatattatgtgtattgtgtattattatatatggtatgtattacctattatgtgtattattatatattatatatagcatatctatacatggacatatacacacacgtaactttactgagtcatagttaacattaaaacatctcacaaactgcatttatgtaaaaggtacaattgggtaagttttgacatatggatacacccatgaaaccatcaccacaatcaagataatgcacgtatccatccctactaaacgattcctcaatcttttttgtaatccctctataacatccgttgctatcccagcccaccccagccacagaaaatcttcatctactttctataaatatagaatatagtttttattccctaggcatttgtgaaaaatggaatcatgcagtacatatttttatgtctgatttctttcacccagaataattactttgagattcatacatgttgtagtatgtatcgagagttcattccttttattggtgaatagtattgcattgtatgagtataccagtttccctgacaccatttaaagcctttttaatcttagccattctgataggtatgtagtgctatcacattgtagttttaatttacttgttcttaataactaatggtgtttagttatgtttgcctatgcttatttgcaatccatatatcttctttggtgaggtatctgtatttttcattggactatttgttttcttatcattaagtcgtaaaggtcttttatgtactttagatacaagttcttatcagacatatgagttacagatattttattcatgtctgtggcttctgtttttattctcttaacagtaacttttgaagaacagaagttatatactttaatgacctctaacatcaatttttccttttatagatcatgattttggtgtcatattttagaattttttgactaattcaaggttacaaaaattttctcctatatttatttctaggtattttatagttgtaggctttacatttaggtctatgatccattttgagttaatatttgtgcatggtgtaagatatggatgaaaatatttttcttcctttattttttcctttgttcctttcttccttcgttctttttcttcctttcctttccttttttctctttctttctttctctctctttctttctttctttcttcctttctttttctttctttctctttctttttttctttctctctctctctttctttctttctctctttctttctttctacaaatggacatccaaatgtttcaaaactgttattaggaagactacagtttctccactgaattgacattaaacattgtcacaaatcagtttccatatgtgtgtggatctatttatgcagtctttaatcagtttcattggtttgtttatctatacttatttttatatctatgtttatcaataccataaatatacatactgcctcaacatagaaactctctcaagacagtagcagggacaatcataaacctcaccctacttgttttccatttttcagggatcactattcttcatcacttcatgtccaatgtcttgaaagccattgttttacatattttgtctgtttttatagttaatttaggaggaagactaaatatatttctggctttactattttatctggaagcaaaagtccaattaatggtaccataatattttatagtaattacaaataatgtacttatttcatcgaactgatatcagtcaagtttcttttacactagcaaattatccagctctaagattcctgttttctcctcacattacactcccatcaaataccacaagatgtttttagtctctttgccgcacatttcctccagttgtcccctcagtaactgcactctagccatatcagcatactaaatttcagagacctctcccatactaactactcctctgagtagtatctgagactcctctgagtctcagcttacatatcaggtccttagaaaggcctttcctggtcctcacactctcattaaagttacgcttacttttaatggcaaaaactgcaataacttttgcaccgattaatgttattatttatactgtttctaattatatgttaatttatttactcatttaacaacttatcgggctcattagaacatgatctcctcatagacagtgacttagcttgtctttccccactgcagaccaaattctcttaatgtattttgtgtctagcagggaagacagacattaatgatttctaacttaaaaagtgctataaaggaaaaagttaatgatatttaagagtttataatgaggggacctaatattcctgtgttagggttctctgggaaaatagtccttcctctgagacttaaaaggtaagtaatagctaacaaagagtgattaaggcaagaaagcagaaattcctacacttagcttatagaaaagacgcttggtaagagagaaagatggggctagaaggcaaggtggcaaccaaaacccagcttgacatgtttgaaatgttgccataccaaagaagaactaatcatattctgtattgctttggggatcggaggtgagacaagggaattagaacaacaattaaagtcaaggaattttggcacagtatcaagaagatctttctaacattcagaattgtccaaaaaccaattgtcttctttaaaatgcaataaatcctccgaaactggaggtgctcaaagtttgtatgatcattgcttaaagatgcagtgaaacagatgtctgtattaattcacaaaataatattctacttacaaatatcctgatgtataattcacaatggaacttagactagcagttgaatacggaatcatctttgattcatcacaattttggtagaccctagtttccaaatatgtaaaaaatctatccatttctttccattgtaactataacaactctgataaagtcattgtctcttatcacctatctacttcagtagcctttgttctatttttcccacaccctctattgccacatcctgtctattcatccatgacagagtgatgtttttaaaagaaaactgataacattgcatccctacttaaaacatgtctattttgtcccatatattatatttttgtatggagtgcaaaatgtatattggattataaagctccaagtgaagtgacgctgtctgtctccccagtgtcattttatgccactttttctgtcaccctgtgtgttccagcaacactagcttgctttcagcaacttaattgggccaagagttctcttccaccacaatgaatttgctcatgctatttcctctgtctggacatcccttctgctaccactcctccttgtctggctattgtccttcagatctcatcttaaaaatttgttaatcagatatgattccatagcactcaagactacgaagattttgttattttgtaccccacagcattgcataccctttgtgtagaactttcctcaaatacaattaagtgttttgtgttgtaattattaccataggctatgtctttccacttgatagtaagttccagaaggatagaaggatagggatcatgtctatggtggccattcatctcagctttgatctagtatgatgtctaacccaaagtgtattgctcaattaatatatgttgcatgagatttcaatgttataggatggattgggaaatttgtagaatcacaaaactctagaaccagaaaataccttagatattgtctagcctgtcccattaatcttatacattcagaatttgaagcttaaaagtattaaattacttgtctaaagttaataaaaagattaatggcagagccagggttcagtggaagtcaggaattccaactccgaattcactgccctgtccaatatatcagaatacctctctaacatggcattttcaatctcacaacctgatttttttacttattgagtaaaacaacagcatgtccagtattaatgagctgaaaagaggaaatgtaatttgatcatcaatagtagaacgaatggcagtttttttaacattgtgttgaatattatactacagttatattattccaatgttccccatgcatatttcctgtttatattctgctagagaccttattaatgagtatcatcactcagataattaccataaatagaattggactcttttgttgtttaaattagtctgtatgggagagtctagttgaggacttatctctctgtgacctcatgatatttgggagtaatatcagtagtatagcatttgcaactgaaaatttggctatgggattccaaatatataaaaaggaattttaacatattttgctaacaagtgcctgtccacatttatcgaacacttactctactgttgttcttccaaatttgctgttaaaataaatgatttaaatagtctaggacaaagaaataaagataaagggtatttttcatttatataggccagatatgatgagtaataattcaactcttgaggagaaggtacaaagctagaccctaaggtgacaactacaattaatagtacagggaaaagaattgtgttcatttttgaagtgtttgaatcatacaaccattcttattttgctattttcattttgtgaattatttgactaattaatgaaagaaatatggattcattacaaagtcagttaagtctaggaatatgaatattacgatatattccctgaattatcaataacttgtgatgcaaacatttagcatgttaatatggctgtgtttctcaacatcaaaaatattcttctgtcatcaattcatattgttgtaattcaattatagcatttagagtattgactaagttactgtaacacgaaaattccaaaaatgatggtggattcatcaaaatgatagttttattctccctcatgtaagagtcaatccattcttggctaacagggacctttgctccaggaggtcatttagcaatccagtttcttattgagttgctcaactatctcctagagcatagtcttatttgatcaaagagagttcatcagcacatttgtgttccaatctcatgaatggggaaacagagaaaatgaaatataagcaattttctctttaaccgataagactagaaagtttaacccattactcctactaatgtagtctcatgcccacacctacctgagtaggttgcaaaatgttgcatctagctgagcagttctgtgttccgataagactcgtggggttctattagtaagtggactaggggataattaataacaatggataggtatcagtctgtcagtttgcccttctaacaacccaggtgtccatgcaccctcatctttcttcataaatacactcaaatcctcttcaagggggcccacataaaatcttattcagttactgctgcagctgaaaatccaggactggagtgaaatatagtcttctctttcaggtctggaagtggctccttgtgctctggcatcaacttacaaacttacaagttacatatcttcctttgtcctgatatataatggtggagtagggacaggataactgcaacaaaaactcccattcagaaacataaaaactgaaaagcacccagctgtttctggctcacagtaaatctcaaattctcctgggtagaaatggtgaatactctccatcctgctgatgtattagttgtttgggttaaccagcctcttgttctgctctcagtgagtattttcttcgtccattgccccctgcagctttgactttacatatttgggaggttcttcttcatccactgtccacatcagaaggtggcaagagtgagtgttctctccttggttcggcttggaaggacagaggattgtgttagagagctaacaacaaaggtcgttgtataccagccttgtggttcttatgataataaaattctttcagacccttagtagtattcttgcttatttgcttccaatcacttccatgtggagtaaccacagcaaaaacaatcttttgagcaatgtctatagagtctatagatgctcccctttttattatcttctcttctctgctcatctttccttcccttaacttaatataagcgaccttaataccacccaaaactaccgctctttacctctgagctgactctgagggacaatctaatatcatgctcgttcatgctcattgggatatggaaacagttagcttttctacactctgaagtctcaaattaggggaattttaatctattaaattgcagatcacaggcagagagattttccattagcagagctttcttttcttttccatttgcaaatgggccacttcttgcctaactttatttcatgtctcttgtaacattttgctgaaagttccaagtagcagccaaaacataccaaaaatacgacattaaaaaaaatcctgttctcctagggctacagcttggtaataatgcagtatatttccaagttggcatatgttttgtaatggcatatcaaaggacatcactttctagcctgcaggtcctttctacctgccccctaatgtgctaaactaatgtcatgtattttgttttttattatgacaatgccccacttgcaggaaccaatttctataataacaggctataataagttaagcagctgtaacctaaaatacggtgccttgaataaagcagtttatttctcataacattaaagaagtgaaccatataagtgggtagctacaactcatttacaaggtcatctaaatttttaatatcttatttcttcattattcttcagataatatctttcattatccttcattgtccttaaattcatgcttaaagcatatttccagcctgtgaaataggagaaaaaggaaaatgtggaagaaatttcctttgtaaaaggacatacacatctcttctgctcacatctcatttgtagaaacatggtcaatgtctaatcttgacagaaagagaggctaaaacaagtaatgactagttcacagctataatccagctgaaacttagggggttttgttgctaaatgaaagaagagcagaatgatggagaacttgcaggctatgtgctcctccagtgaaattccactgatatgaagacatttggttgacaaataattgcatcaccatataataattgaacacatacaaattttaagaaaggactatgaaagaccacaggaagcataatgctgccttctgtaggagactgaatcaaaagggtctccaggcaaaaaattgacagaactgacagaaatggtaaaaaggaataaggtacaaaactttcttcttaaccaaaaatttcaatagtagaaaagaatgcagaaccctaagatgcaagattattctccttttaaacatttgatcttacacaataatctttcaaagatgttgaatagtcctgatatgctaggcaacacataatagaatacattacttaggggagtgaattcttaggaggaatagtaatgaaatatgacaggcataacatctgaagtacagatgttacattctatgccatgtaggtaatttacctttctaatagaatcttattcctgtaatagtttttctctcaatgtaacacagtattgaagtccaaggttagaatgataaataataatgagaggtgctcaagcattatttttaaaaaattaaatatccactgattaaataatgaaccaggcattgtgctaggccctgggattacaaagattaattccacagtttctttgactggcagttgtctgattcccatggggaagacagataaaccaacgtattatacagtgtggtatgcactaacattagagacatttaagctattaaatcgatataagtaagagtgatccaattgtgagaatggaaacaaaaacaaaaaatactgtgaaattcccagccttaaatttttggagagtaggaaagtttggctgaaggctaaatatcatgccagattgttgaggaagaagacaagacaattgtcaagtttatttgtttatttatttatttctcttattcctgaacttcttctgtaacaagttctaacctaaaacctttgccacactgttggcaattagaatatttggtgaatgctgagttttcattttgaaaataacctaaactggtttcacatgttagacattaatttatttattcatttgttcattaaatatattttgagcacttactatgtgccaggatttatgtaatgaagaaaaatttcttgctctaacaccagtgcagcctctagttcactgagctgcagccaaaggacaaggggtgtaagtaaggaaatctctattccatggctcctacaaagtggactgcttgcaaatgacccatagtaaactgcccaggaagcaactagctaaaaataactagctacaaatgcctcttgcgagtgcaccctctaccggaggggtaaagaaacctcaccgaatgctacaaatgccgcttgcaagtgcaccctctactggaggggtgaagaaacctcaccgcaagccttatactgtagtgcttcatgaaattagatattatgaaaagcccattgaacttctgattcaaaaacttctttctagcatctggtgtgaaaaatttctcaagacttcaaaataggtctgggcttccagagtgcagctattggtgctttgcaagaggcaagtgaagacctatctagttaacctttttgaaggcacaatcctgtgtgttatccatgccaaaagtgtgacaattatgccaaagtgcattcaactagcatgccacaaacatagcaaatatgcttaagaatcccctgtgatgggaaacatttcatatccctcggccctcctgccgaattcttttcttcctattattagtcattctgaacgttatttttttcccatgggatccaaaggtacccaaatatatgcttgcaagtggaaaaatagggtacagaaatcagttatttgcagtttttctattttcattcgtatgtgaatttttaatataaacgggatgtgaagcattaacgcaagtcaacatacttcggtgaacaagtttcagcaattcaactttatagcaattataaataaacctgttaagttattctggacatttggattgacgttgggttggcaagtaaattttttactgacagcaactaaatgatgtttatataatttttatcatataatagattctatctttttactatacttttctaagttgtcccacatgcaaatacatgtttttaatgttatctatcttctgtgctgtgcctataagtttgttattaaaatacattaaacaacaacataaacttcttttcctcaaagtacttctagtctagttggagaaacaacctagaaaatgcaccaacaaatggggcacaataactactctgagagagagtggcacacagtggacgcaaagaagaggttcctgatgcagctgggaagagtctacatgggcctctagcaggagaagatactggtcttgagtttggagactaagtaagcatctccaggtaaggtgtgccatgaaacaagtaaagcatacacataaatggaaatgtgagaaaacaggatatgtttgggaaatagaaagaattaaagaagtacagaatatcatattagtgtaaaaaagaaactgtcagtgtgaaataattattggaagagaagtcaggaaatttagattctcctactgtctttcatttctttcattaaaaccattactgagaccctactgatgttccaagcccagtgtgtggctctgggaaaacaagaatgaacaaaacagacatgggatttgcctttgggaatttcacaatttagtcagatatagacagatatagtcattaatcaaacaagctcatcaataaatgtataaataaataccctctaagtgtgcaaagacgcagtagcatgaaggtgctcggtgagctcaatgagctgagaaaaaggctttaatttcctttctgtaactaaaagttatgatgctttccaaagcctcttccaattccaatgtttttatgactgtaaaactcatattatttaatgtggattctaatagtttgagtttaagattttcttaatatattcagaaagtgagtgagactatagaagtccaatcatatttcctcaatactttaaagctgtttgaagatgcaaccagaaaacatggattcgggtattaagaatattttttcagacacttctgtttaaaactttaagaacagtaacatttcacacacatacaggaattactgtgttaatagatgtgttcaggaaatgccatgcaagataaagcacaaatgatatcataaacaatagacacaacagtctttggagagtgtgcactgtcttggcaacacaaaggcctgctggtaaatctctacacacctgggatgactggggaaagctgccaaccacaactgcatttgtggccttaagcattagaactaagaacaggtagaagtcctggttcaacaatgactacatgaagtagaggaaggagcaggtgtattcgctcttggaaatctactacttaatatcatggttactttgggcaaggtagttcaagttagttactgtgcatatgcctcagttctgtcatgtataaaattagaatgaagaaaataatggccttacctaccttcctaccttatagatttaaggaacaaataaagaaaaacaataagagggttgctgtgaaatgacagagagaaacataaagagaggagagagagagcttctttggaagctgaaggcagtcagtatttcttacatttattttgtaaaaaatgaattttctttaataaacacagaagtgaatgtatttctgtgactgttgttttcagtttgcattttaaaaattgccctaattgcagcaaaatttgactagtctgtgttggtttgtatttattttttctctttttttttttacagctctattgatctatcattggcatataaaattttatatatttaaggtgtacaatttgatgttctcatatacatatacactgtgaaatgattaccatgttttttcttcttgaaattttattggtctatgaaatctagaagtttggaaaagtgtttaatgtagggcaattctaaataaaaattcattattattcagttttattcaacaagctttcattgaacatcttcattttgaagttcttaaattgccttcacatttgtaagccttattttccaacaaagtatctggtccttaagggcataaggacctctccaatgtcttcagaatttctcaaggagctaacccagccatgtgggtgcacggtagacattcctaaatgactgaatcagatgatggtctacacttgtttttgtgtagaaatgagaatgagtcactgtctggaacttgtcccccgacttgggaatgttaagcctttggaccacttttccctggctccctggtgggcctttcatccttgcaagggcctcagggacatgatggagtttccttttctctttaatgtccctttcggttactcaaacctctaggattcttttacccactctaccagtttatgctgcatactgggatggagctttcctaggttcctcttttctcttcctgaaaaaacacacaggctctttttacattgaattttaatactaatccctcctggtaattagacatgaaataacaaaaatggtaaactatatcaaattacaatggttaagaaatcttactgaattctatcaggcatgtttcctggtctataatttttgacttcttgagggaaatgctaactaggagtcccaaacatttattctttaaggtaaatttctccagaagtcttattctaaggctagcatatccaatcagagaaagaaaattaatatgatctaggttaattaggtgctatcctaggctaaataatagccacctaaagataacatatcctaatctcaggaacttgtaaagttactttataaggaaaaagggactttgcagaagtgattaaatttaagtatcctgcatagggatattatcctggattatctgggtgagccctgaatacaatcaaaagtgtcctggtaagagagaggcagagggtgatttgacacacacacagattgaagaggaggaggcaatgtgaccaccgaggcagagattagagtgatacagccacaaatcaaagaatgtcagcagccactggaatctggaagagacaaggaacagattctctttagcacatcagaaaagatggtgcattagttgcagtggctcatgcatgtaatcccaggactttgggaggctgagtctggtggatcacttgaacccaggagtttgataccagcctgggcaaaatggcaaaatctcgtctctacaaaaacaaaaaacaaaaccaaacaaacaaaaagcaaactaactaaaaatgaaccaggcgtggtggtgtgcacctgtagtcccagctacactggaggctaaggagagaagatcacctgagcttgggtggtcaaggctgcagtgagccatgattgcaccactccactccagcttgggtgacacagcgagatcctgtctcaaaagaagaaaagaaaatattgtgatctggtgaacaccttgattttgaaccaataatactgatttcagacttctgacattcagaactgtgagacgataaatttctgttgttttagcccatgacatctgtagtgatttgttagcacagccataggaaactaacagaagggcccacttgtcttaaattcctatcgtttaacctgtggggttggtaacatccattttaaggggttcttgccccgtttctttaccttttctggtcattaattgtcaagctgagcagaaactatttttatattactggagagttatgcttgagaaattgggatttgagaaaggcacggaaagaaagatgatatacttaaccactattccttcatctaataaacgttgtgtaaattcctactatgtgtcaagctatgtgctaagtcctagaataaaaatggagtaagacaggatttttgtccttaagaagttcagttgagtaggagaattagacacacacatacgtataattaaattaatttgtggaaaatgcagtaatgattatgtagaaagagtattgtatttccccagtgcatttcatattttgaaaaacactgtctacaaaaaagtttctgtgtttaagtaatatataataggttaagaacagttctaactgccaataggttttataattaacataggaagatcagtgttatactactagcttaccattatttcagccaaaaatcaaaggtatctgtcatttgagtttttattgtaaagtctgttcctggagaaagtgtgaattttcttataatatttaaaatactgatgtagctacagaactctctccccattactttcaagaatggcctttcctagtttgggaaatacagcaactatgtcattaaacaatctggttggccaggcacggtggctcacgcctgtaatcccagcagttagggaggccgaggctggtggatcacctgaggtcaggagttcaaaagcagcctggccaatgtggtgaaaccccgtctctactaaaaatacacaaattagctgggcgggttggcacatgcctgtgatcccagctactctacttgggaggctgaggtgagagaattgcttgaacccaggaggtggaggttacagtcagccgagattacgacattgcactccagcctgggcaacaagagcaaaactccatctaaaataataataataataataataataataataataataataataaaacaatctggcttagagaaaattgtattgcaaacaatctcattaatgagagttcctgcgtaacaggacactagctctgtcccttggggatggcttggagtactgtttcctggtaaagcaacataaacagatctcagtcccctcttacagagttatgaaataatagccataagtaataaccaacatttatataagcattccatcattttacaaaataattttacaaaagtaactgattataggttgttttaattggaagcaaacccagtttcattacctcaagcaaatttcttcatctcttttagcttccgtttctcatctcttttttttttttgagatagagtcttgctctgtcgcacaggctgggttgggtgcagtggtgcgatcttggctcaccgcaacctctgcctcccaggttcaagcaattcttctgcctcagcctcctgaatagctgggactacaggcgcctgccaccacgcccggctaatttttgtatttttagtagagacggggtttcaccatgttggccaggatggcctccatctcctgactccgtgatccacccgcctcggcctcccaaagtgttgggattacaggcgtgagccaccgcgcccggcagtccgtttctcatctttaaagtgagagtgctaacacgcacatggagggctactatgagaatggagtgagattttgtatatgaagtagcaaagacagagcctgggacttagtaggtacattattaagagttggagccattttttaaaccttttgtctttttgttatttttgctgttctgaaagtctctaagcttttaaaaatggtctcttattttactattcttgaattgtttcacgcttctcaactcatgacaagaacctattctgccaatgaacctcctgcccccatctattgaaattaaagcttaggagcaccagtgcatcccagaatttgacttccttccagtggagagaccccttgggtttttcgtgtgctctttccctgatcctttaggtgtcacatggtcagaaagaacatagtattatttataaacaatatgctctctaacttcagaaagatttaggacagctttctggatttggtcatgcatgaaacaggaaaaacaggctattagaaaattgtgtgaagtctaacagggacttgatatgaattcattttgatttttaaaactgaggactgcaatcattaatcagttcattaaattaattggaataagtatattgcatgtagtgagagtagtagtattttttgaaattttagttttaattatatcctatggcctgtgttgtaagattttttattttaagagtttaaaagccattcgattaagcaactagtagtaaacttttctgtctctcattagttgttaaatctagaaaagttattggtttaacaaacctttattggatatctattttgcatcagatttttttctacatgaatgacatttttttctctctcttttctaatactgatttgttgcagtgtcgaataggtacctgggtcaactccacacacttctcactcttcactggacctctggtacaagattgagaggattcctattacttacaaacagactaggtattaaaacaaaaagattcccgaatagagtgaacctaacctagagcccctaagaattacatcagctttaaccattaattccctgggttcttcttattcagtaatgtcttaaaacctttttatcagtatgggatgggcgggcaaggggataaagaaactggcggctggtgggaagccttaggtaaggctgtcaggggggctttagtttgggagtgggataatttgctgaggaagggtgggagaaacgtgaactagcacacaaaaggctgtttccggctcaaatttcgttaccaaggctctttgagatgaacttttttgggggaaaacaatcagtctaaaagagctgtgtcttcttgtgtgtgtgtgtgtgtgtgtgtgtgtgtgtgtgtgtgtacaagggggcggcgagggtccccacttttagtatgagtagcattgttcacatgtttgccagtattttggagcctggcaggcctgggtagaggctgcgggggacgcctccaagttcccacccgggacatcctgaacagcagcagccacaacaacaggctcgcccctagacaaaggggccggcgcggcggagcagactggtgcagcctgggccgcgcgctcagagcgctgggcgtctgggcagctgagtgggcagagctgacccggtgcgggtgggagtcagggcgcccggaaaacccggctctgggtagcagaccccgcccgggctggctcggcgccgggccttcgggcttccactcagtctttgaccctcggtcctcgctcagcggcccggcaggccgcacaactgtaaccgctgccccggccgccgcccgctccttctcggtccggcgggcacagagcgcagcgcggcggggccggcggcatggctgtgtcctggaggagctggctcgccaacgaaggggttaaacacctctgcctggtaggatggcgggctaggctctccttgcgttctctctgtcctgcagtgattttgattcattctctgagcgtgcacgggtgggaagctggaagtggaagttttgtcttaattcgaacattctcaacttacaaaactttatgctggagataacaatgaacactccccctcccaccccctcgcctgtcccccaaatgcatgagaatttttctgcacattgatgggagagatgtggaggaagagggaagaggtcattttccgtgaatacagcttttctttttaccctttaaacatttttgctccctttgttcttttcccagattacttctgtttgcttggggtatggtgatgtcattaatttcttaatctcattttgtacggcaggggatagctgtaaatcatttaggaaacctatttgcaacccaaatgcttagtctcaggtgaaagggctgggtaaagtcagatttgttttcctctgagtggttttcagcttgctggttaattgaaaatgctttctgcagttactgatttaggttccattgaaagcactgtgtcgaagaatttacctgtggtttctattcatcaggtaataattattttcaatttttgttttctgtctctcatgtctgattggtttagttcatctggctctccatgaatgtcctgcttttctggaaaaccttcttgctgtataaccaagggccagagtatcactacctccaccagatgttgggggtaagtaaggtgaacttggataatctggtggaatgggtttaacactggcagacattgctacaggtttggtcagttccattcattaaagaaatgtgcactcttcactttgaaaacctttgttgttctctaaagtggtcacattttcctgatttatcatttacacttgtacaagttaaaaagattgactctctcaagaaccaaaggtaatatctgctgaagtgaaacgaatgaacctgccagaccaggttattggtgccttaaaaaaattgctacttattgccagctgctaagtaccctgaaggatctgattcactaggaggatcaaccaataacaagcttttagtatatacttatcagtgcttttagcctgctcatgagcttatccagaggatttctgcactgtttgtttttactgacaactctcacaaaatatgggtctaatggggttattcatttctgggcagttctcagtgcttgctttgggttagtggctgatgatattccagtattctactataatatgagaaagatactgggcaaaacttttttctgatttattttatgttaatatttttctttcttttctatgatgtttctgatttcattcttctgttccatctccttcttatttgactgcttaacagaagatagtgtcactgaaggcatattactttgcacaaggagattgcgttttctttttctttctttctttctttctttttttttttttgagacagagtcttgctgcgatgcccaggctggagtgcagtggagtgatctcagctcactgcaacctctgattgcctggttcaagcaattctcctgcctcagccttctgagtagctgggactacaggcacgcaccagcacacctggctaatttttgtatttttagtagacacaaggtttcaccatgttggtcaggctggtctagaactcctgacctcaagtgatccgcctgcctcagcctcccacagtgctgaaattacaggcgtgagccaccatgcccggctgagattgcattttctaagcaacaagcaaaaagtgtaaaaccctgcaaaaacttagggaacctgaaaaaatagattttgcattttggtgagtgggggggtgcagaaaaaaacacattttgcttttttattttttttcatggtttaatgactacttaaaattaagacgagctcagacaaattcagtggaaccagctctcccttctatgttttacatggagagatcttatttatctgtaattctcagtacccagactagtgattggcacatattaagcctgcaacaagttgcagttgaattaattaattaattttttatacaacaaagtaatatcataatctgttgatcacacactttataaagtttaacttctaggttttaagccaatgggttgaaaaaaatagtctgtaaagctaaacccatttcatttatttctttcatccatccaatccaggaactgtcttgaaacctatacatttcagatgggcacccagagagtaagacctcacctcgcccctcaagttgcttacaatataatggaaaaaccaacaaataaataattataattcaataaacaagaaaaggtttcttctaataaacacatgaggtctgataactttttggttttgttttctagtatttccccattaggtgtaacttaatgaataggacgtttttcagtggaagctttatctcatctattacataacttgatgaacaacttggagaaaactctttagatatagaatggtaaaatttgctctggatcacgaggtatttgtattaatataaaaatctaagaactggaaatttattgcaataacctagaaagccataactgaactttggattttagctttgtgagatagtataagctaaaataacatcttatttcttaaaaaaataattatttggaaaccaactcattaattttcatgaacttggatactgtataactgaatttcaaatttaatttggtggtaagtcagatatgattaagatcacatatgcacagaaacataaaccaacaaatttggaaaacatttaaactatgtttcacctctctacttccatcccacttcactgcttctgcttgaataacagacagggtaatgagcttcaaggactgctgacacatagggctcaataaatattgatcaagggaatgaagaaaaaaaatgataaaaggaccaaatggaagactaggagcataaaggataagaaacagattcaagaaaggagaggttgttataaattagtttttaagaacacacaagtataattatagtgagttgatatttgagctatctggtaagtattctccattttaccaagagtcactgtggacaggaatggtctttctacatgctgagagataaaatatgacttataaacttctcagtaattatctgttatgaattttccagtcattaatttatctaagctattttggaataggtattttcagtctgtatattaccttttattggaaaagaaactccttctacagttttactatctatgaagtagtgtttaattttatgtcctaggcttatcttttctaatcttataataagtgttgcattatttcatagagtaacaatttgcaggcacttttcaaattgcaaagaaatgcagtataacaaagagatagaattaatttttaaataaatattgctggttctgatgttttacatttttaagaactatatgttattaacttagcatcttagagtgatgcatcttagaacttagcaaacacttggtcccactggtatacgcatgtgggattcctgaagagagtcaaggtatattataagtctcttttaggtggattttaggtttgtaaaaatcatgatgttatttctggaaatgtatttcattgtaccatttaaaatgcaaatagaaacaatactttcatggctgaacattttgataatagctttgagtataaagttgctgtcattcgtctgtgaaatgtaaggtaataacaaagttgtactagtacaggaaggacccacagaatatggtccatttattggaagacacagacaatgagaaacagttaattcttagtaattgcttgaaaatctctattttctattgaagaatgactttttattcaaatgtttacttatacctgtgatatgccaggaattttacaaatgttttgtttaagctgggaaactgttctctctgttttacatacaaggaaatatgggctgaggaagctgtatgactcgctgaaataccttttaatggtcagtgtcagagctaggatttgaatacagccctgtctgacctctgctttttcatcatactacgtagcttttctaaacgacttcactggtccatgtcagatacttatactactggttagtattaatttttaccagtgctgcccaacagaaacataaagcaagtcatatatataatttaaagttttctagtagcacattaaaaaaaggaaaaagaaaccagtgacatttatttaataatatgtggccaactaaccaggctgtaaaagagacatcaggacatgggtagtcctcttgctcctcctctactaagcaggaattgtcaaaggatgggaagttgtggaactacaaaaattattggtttgggaggccaaggtgggagcattgcttgaagccaggagtttgagactagccagagcaacaaagtgagaccccatctttacaaaaataaaaaaaatatacatatatatacacatatatacacacatatatgtatatatacacatatatacacacatatatatgtatatatacacatatatacacacatatatatgtatatatacacatatatacacacatatatatgtatatatacacatatatacacacatatatatgtatatatacacatatatacacacatatatgtatatatacacatatatatgtatgtgtatatatgtgtatatatgcacacaaacacacacacacacacacacacatatattagctgggcgtggtggcacatgcatgtaattgcagctacttggaaggctgaggcaggaggattgcttgagcccaggagtttggaggcagcagtgagctatgattgggccactgcattccagcctgggtgacacagctaaataaataaataaatatttaaataaataaatttatttatttatttatttaaataaataaataaaattggtatagaactataaaaatctccctgacttctgtctcatcttctgagttttctgaaggtgggaatctttgagaatgaaggtgaaagtatttacttctcagaactagagtatccacttttatttctgggttattattctcgtaataaaattaaagagtaaaaaaaatacatacgaattgatagaaaaaataagatcttaattgctagaagataaaatataacattgggattaatatgttttattgggggttctcatcatgattatccttccccagactggtctgatccagagtggaggcaacgtggtcatggctggtttatgcctgagttaatgtgctaatcagactgtgcacttcctaggagatgtttaattgtgacatgtcatgagttttggaatcttaaaattagctaagaggaaaaaaaaatctattgagagaagccaaaatgaacaccgaaacaagcaaaccaacaaaccaaacaatagcctgctccactcccccatggcaaccttttaaataagtcacttcattgattgcttaagattaaatccattttcatttatttattttcaagaatggaaaatgtagttgcctgaactttatagaaattagtaacaggttgtgttcaactctcagaaatgtagttttcttttctttttttggaaatattggagcagtttaactcaaaacaccatttataggagctcttgaattcatgtttacctgttttgagttgcgttttttacattttaataattaaagaatatcatgtaattcccataaacattttaacttgaaaagagaatgattttatgatatcagattcaatgtgtcttagttatatatatatattcaatgtgtcttagttatatatattatatttttccctccaaactattcaatttcaaactagttattcacatggtgtcaggataagattttaatttttattttgcttttattcacaaatattgttttagatctgctgcatgatcttgaagctttttttaaacttttattgaaatatctatgctcttgagcattcagattctttctagtgaaacactgggattatctttctttagtcaatcattatccattagaaacattaactaatttaccctctcaagagtcctagaagttatatcataacattttacagagacagaaatctgatgtcatgtgaatttcttaaggtcagagactggagtctctggacaaatggatctaggattttaagtcaatgttagtttcacagctggcctgggcagctttaattctgctgagaatgaatatatgatccctgttactttcagaagagatttggtcattaaatcctaattatacagactgtaaaatcactagctagagttgctcaggcacatgttatgataacaattcaggggacatttttagatgagtgttattttgcttatttgtttttattcttaacattctgttatttagacacaattttcttgtttattgatgggtgaaatgggttatatttctttgatgaaattatattctttatctatttacaatagacactgattcatagagttttagacttggaaggaaactttgatatctttacttaacttttcattttccgaaatggaaaaatgagattgaggtgatttgttcactatcacctactgaattagtgacttggtcactatttagtctattgttctccttagtccaatattagccactataatgaacagctgtatgaacacacgcaagaacattttaaaccccacactgtatggactactagctttacattttaggtgaaatgatactttaaaatgtctagcaatttaagaagctagcgaaaatgattgatttactctcaaaataaaatatatttttagtattatagttgtttgagacttgccaataaattgtgaaggaattatgagcatttttatttaaatttattctgatttcacaatacttttcagaattctaaggctcaatatttaacctcgttgtgatatatagctaaatgctaactgcataattctcctttatcaatatcatcccaaacagcatagaattggaagttagaatgaatctcaaagatagtcaaatctttattttttaataaatgatatgaataatatcaataacagattgtgctcagtgataactggctaatactagactttagtctaagagctttgcactgattaatttatttaattctctcatccatagtatggaaggcatgatttcaagtttttgttttgtagctgagaaactgagttagaggggttctataacttgctagtgagggacagaagcaggactcaagcccaaagatcctggttccagaacttgtattcttgttttataaaattttaattgacaaatgccaattgtatttattgtgtaccacattatattttgaaatatgtgtatattgtgaaatggctaagtcaagataattaccatgtatattaccttacatgcttatctttttttgtgataaaagcagaaaatctactgtcttagcaattttcaagaataaattgttataaactatagtcaccatgttgtacaatagatctcttgaacttattcttcctgtctatctgaaattttgtatcctttgaataacagctacccaaccccctcccacccccaccagcacctggtaactaccattctactctctacttctgtaaattcggttacattctttcttagatgacacatataagtaacattatgtggtatttgtcttcctgtgcctggcttattttacttaacttgatgtccttcaggtctcctttcatgttgtcacaaatggcaggatttccttcttttttgtaaagctgagtagtatcctattatgtatacataccatgttttctttatgcatttatctgttgaccaaatttgtattctgagccattgtgctctgttgtttctttgcaacattaatattaggttgaatcatatagattggtagatcagaaacagtcaaaaatcagccattttatatggctcaacctaatagcaactgttaccatttattgattatatatgacgtgtcagacacagttcttggccccttttataatctcatttaatccttatatttaattgaatccttgtaacaacagtagaatataggaattattgatttttacagaattaagaagcttagattaggaactatttgctttttacagaattgagaaactgagattctgagtggttcggtaactttctgagtagttaggttacatagctgactagtagagaagcccaggttgagcccacacctgtctgaaactgaacaccatgctctcaatcactctgctttccaggtgaggttctgaaacagatagtgttagaacctgcaattctctactgttgtctaaggtccttatacattttgccatggtggtgctgaatatactgtttgtgtttccctctgtttgctgtttgcatgttagtgtgctttttgtatctgttaagaagtatttgatcagaagtaaattcaagcatatatgcattattcttatatatgaggtggacttgtataactaatacctactctgttagtttgctagggctgccataacaaagtaccacagactgggtggtttaaaggaaagaaatttcttcatagttctagaaactagaagtccaagatgaaggtgtcagcagggttggtttcttctgagggcctctctccttgacttatagagggctttcttcttccaatgtctttgtatggccttccttctgtgtgtatgtcttaatttcttcttataagggcaccagtcatattggattagggcccatcccaatgacctcatttaaccttaattacccctttaaagattgtgtccaaatatagttacattgtgagttaaattcaacttggtacaaataccaactttgtcagtcttcctctggaagctaagcatgcattttgagaaattaatttgaagttaatgtatttttttttctccttaattgtagaagcccagctgagcactagcattccagaatgacatggcaaaagggtccttcccaggcctttttaggaaggtattgtaatgttcctccttagaggtttgtcgagctttattcttagccctaccctacaactattttaaacatgctcttacacaaccctttattccctccattacctcaaagaagaaaatcagataaattagcacctctgaggagtagcatcaatattttattttgattttttagatcttggcatcaagagtatgaattcagggaactgactcccagaaaaggaagtagggaatattgaggaactactttaccttgcacaccactgaggccaataatagtagcagtcgtcgtagccctagtcctagtcatagttgtatatactttcttctgggcaatgctcagcctggagggagaggagcctgtagaactgtggactgttctagtccatttaccctgtttgatggatgaatttcatatagttaaatgctttctttatggactcagtgcaaagctgaatgtggaatgtaggtcctctaactcctggtcagtgtttcttcatgtctatcatgctaagcattgtgtttatcataaaactgattttaaaattgcctaagtaattctggagagaaaaataattataatttcttactgaaaaggtcatgggctttggagccatatggatatgaatttcaattgtggttaagcatttctctccctttgtgattttgatatactattctctcagcctaggtgtaaaccctactcataaaatagggcttaagccctactcttagtttagatggaaggacaacatgagaaaatgcaggtgaagtgcttagcacttggtacataggcattcagcaaattgataactattactataaatattaaataatggtaattagtattaatggcatcaatattatgaatagaaccaaatggtaatattgtattgtgtatatatatatacacacacacatatatatataacatatatatgttaaaaagaattcagagacataaagatggaagggatttgctgagcatacagatgctgagcatatgagatgacacctaggacagagatttaccctttgatctattatttcagtgctcacaagggtgcttaataaatggctgtttgatgatgaggttgtatgtttgctcgtcagtaggaacatgttaccttcagtcctttggttgacctttggctgcctccctgatcctctggagagaggaaggctatttactgctatttgctattggcaaaaagtttgtggcaatttggctatgattcttgggtggaattttagtttgaggtggaacatatttcattcaacaaaacattacttaatactttttattaatcttcactgaatcttggaatttcaacagataaataagataaattacctatctcagattactataaattttaaagaaaattaaaataaataataataatagctagagctagctttcattgcaatcttttcatgggcctgacattgtgccaagttcctgttatgttctttgctgcagtctccactattctacaaggtaggttctattcatgagaggaagctaaagaacagaatttgtaagcaatttgcgcattgattataagcacctaacatgaagtctattccataataggagctgtaaaaatgtcagtcgtcttctttcctccctctgctcttatccttcacagcctcataaaataattcaccttactgttttataccccaggaaaacatgatggaaatattctacttatctcagaatattgtgctgagcattatgacttaatacataagaaagtagtttgaagaattaagtttcacagatgtggaagactgttgttatgtcgtgtttttgtctcctatcatttcacaaagcttttaaggctccagtcatggtgccatgacattgttcccctggacatcattaaggaaagtttgaagaaaggaatgagacgtttgtcttcatgccaaaaaaaatggcagtcaacccttagcatgcaatatgctttacctttgcagtgtgactgttgaagtgggatcgtgaaagtctgttacatgttgtacttaatagcaaaacaagtatatacagttgactctttaacagcaaagatttgaactgcgcaggtccagttacatgcagattgttttcaaccaaatgtggatttgcaggatatgaaacccgcatatactaaggaccgacttttcctggaggccaattccatggggcccactggggcacttgaatattcacagattttgttatatgtggggatcctggaaccaatcccccacatatgccaagggatgactgaaagagcaaattacacaggtagtgagtgagtctatgtgattcctagaattacatcctaaagcaagtttgtgatataataaaacccgagcaatgcgataaaaagttagtgtctagtgaaaagtagtttactttcagttctgacaatgagactaaaggaaaagtaaataaaggaaaagaaggactttgctcaatcagtagaaattgtgttcatctttagaaattagaaagttgaatttgacaatggctctcatctctaaatggaaactatcaaaggttttcatggatatgggaacccatgaaaggattgttcaaggtctccagacacatatcaagactttcagaggtctgatatattttaagggaagaagagatgagtgatataaccaaagtataataattttatatagctgagtgttttttttctaatggaggcattttaacaatagggtataataaagaaaagattatatggaatgcctttctgactatatctcttttctttatgatcaaattttcaaatacctgatttcaaattgcaaataatctcattaatgtgatcatagaaagctaaggtccggtgggaggatctggagtggcagtgatccaaacaagtttcttttatccccatgctatacttttgattctctttgtaagcttccttttcttccaatatgtcttcctttacgtgcttttcctttagcatcttatactgaataaaatccctgctactctaccttatatggaagcatagacttcaaggagggtgaagatctcataagatgagaaagttgtagaacaagaaaataaccacctattgagaatacttaggagataaggtgatgagattacttttatttctcactgattttccttggccacatttcattttttttttttttaagatgaaacaaaacaggatctcattatgttgcccaggctggagtgtagtggctattcacaggcatgatcatagtgcactacagccttaaactccttggctcaagtgattattctctggggttgcagatgggcttggactgtgtagaacccatcactgaactaacatttactattttgattttgtacatttttaaaaaacataagagtgaaagaatgagtcaaacgtaaatcttggaagagtttagtttatgggctgagaatggatctacagggtttctttaactttgatctacttgaagaaaattggtcttagacttgtactgggtttaaatgagtgtgtcatgcttgaagaaaatacattttgttcagtgcacaaattttaggtatatgaaagttaattcgttaaagtcctttatgaccgtcattctgattcttgataaaatcaagtgtctgctatcaccttttcctgagcacatagtgtctatcagctcaaatatcaactatggtaatatttgtgaaaagtcgacaatatcagtgagagtggcatgatgtcatgaaaagaacatggattttgtggaaaattgatttaagttgaaatctcaacttcacctcttaacaaatatacctgtaaatgatttattaaaattttgaaagccttagttttctcagttttcagttgagatttatattattaattgagctacatgaaaatttcaatatagaaacattttgacttacaaaaatgacaatttaggttaacctgtgtttagtttaacctaatatatcgcttataagatttttttttgtcaggggacaggggcagggaaagagaggaaaagattaaccaaggtgaggaagaaatgagtgtaagactctcaaaaagtgttaattcccttcatcctaacggcaagttatagtagacaaatttatgacaatgctaagacttatctatttcagaaaacatctttggaattaagaatgttttgaagttgaaatttatttataaacatttgttaatgattataaaaatttccaacagttaagagaaaataccttctagtttagagcaaagcatgcattttgaagtgatatgaaaaaatattttgccaatgacagtatatattattttcttagttagaatttcaaaaatatttaagctcacagttaattgttttccaattggctgtggtttccacattttagctcccaaattcttggcctttataaaaccttcgtcaagcagctcataaattgatatacacatgaaaaagacccattttataggagagtaacagtgaattatttccataaaaacaaaaaagttttaaaaacttttttgatatcaagtacaggatatttaattaaacatatacctcagttcataacacactatcctcatgggtctgtgccagacttccttttactttcttcttcattcattcattaatttatcaatttaatcattctccattatccaatcccactctttcagcggtccccagtccccaagccacagacagagaccagttcgtggcctgttaggaaccgggccacacagcaggaggtgagcagctggcaggcaagcaaaacttcatctgtatttacggcggctccccattgcttgtattaccacctgagctccacctgctgtcagatcagctgcagcattagattctcttaagagcatgaaccttattgtgaactgcgcaggagggatctaggttgcaagctccttatgaacatctaatgcctgatgatctgtcactgtctcctgtcaccccccagataggaccatttagtttcaggcaaacaggctcagggcaatcactgattctccattgtggtgagttgtataattatttcattatatattacaatgtaataatactagaaatgaagtgcacaataaatgtaatgcagttgaatcatcccaaaaccaccactgccccctccaccaatctggaaaaattgtcttccccaaaaccagtccctggtgccaaaaaggttgaggaccactgcattctcccccttacaatagcagtctttctaatgtgcttgatgtttatccttttttcggtgttttatgtatatgtatcttctaattcacaaaaatggcattggatcataggacttatttagtttcctaatttttctcatctgttattatatttttgaagtctatttatgtggccgtgtgcttcttttgtttcttgctaccaactgctacatggtattccattgtttgcatctaccactttttatatatccattcttccaggcatgtaaactcagattacctctaatatcctgctgcttcaaatagcatcatcatgaatataaaggatactgttgtaatataattattatatggtattttgttggatctgcctactaggttttcttttaaaaaggagcacaaataagttgttcattttgtttaaaaaatagcatttttttagttacttgttataggagttggatttagtcagattaggataaatgtgaaaataatatcaccatgtggaatgagtttacaaatattaatatatttgattttaataactagttttcagcaagaaaactaaagtatattgtgtgatgtagggaatgaatgtagtgagtattttaagtatgatttaacttctatatatctttcttatgaactgcgcataatagtaaccatttaaccaaaaaaagctacatatatatagttacagtaaaaacaacaagcctgacaaatgtaacatcaagcttgggagtactaggcaatggaataaaaaatataaaagagaacattaaaaggataggtgcaaatagtggaatggattttcttaaaagacaggtaaataaaaaagtagaaaacaactcaccctaacttcctgaactgcaaagtacagtatagtagatagcttgtaccaaccctaatgagcaatcgtaggttaggaaggttgtgagatggaatatgagtggagatgttttgttttgtacatggcaggatattaggattttctttattaaaattgtagtatgtgttaaaatactttttccaaaattgtttgctaaatgtcttaacagcacacaagaaaagcaaaccataagaaatatagtatggaaatatgatatcaccagcgaaccagaggttggataatacttaatgtttggggccagttagtagtgttaaagggtcaggaatttttgtccattgtgccctcccagtgcctcaatatttcttccctatattacttggaacccctcttatttcttagattgctatagtataatatcaattattataattttatctcttccctgttcctattctattgtattctgtcctgtcctgtcctatcccgttccatctcatcctaacctattctgttgaagcctgcgctttacgttaatatatcctcagttatcaaaagtctagaagaaaagggatcagcagcttaatacccttctgaaagattccatcctaagccattaaatattttcaaggtaatttttagaagtttatcatgcattttccagtatgaacataatgcataccattagggaataatgaaaaatgcacaaaagtagaaatggaaagtttttaaatattatcaatatttgaagacaatattattcttcaaattgtatttttaagacttgccctaccttattttcttaagaaaaataatttttcttataactgttttatatttactaattgttttcctatttattatagaaaataggggaaaattaaaaaatgttatatatatcatcactcacacataaccaccattaacattttggtgcatgtcctcagtacaagttttttatttttttaagtagcagtgtgatcattcagaatcaacagttttgtttcctactgtaaaatgtagcataaatatcacattagatttatctctgttatcacaaactccttaagcatatgttgtttatttttaatatttcactgaataaataaaacacaaaacttaaacactcccatatttctgcaaatgcagttggcttctgttatttactgacttataaactgcaatgaaaaacatcattgtgtagaataccccctctgttttcatatgtcctttggacatgttattagattttcaaagtatattaacccatttaatttcttttattgtgactttgtacggcttatttatccattgaattcttggtacttaattattaaaatatattaaatgtcaaaagaaatacctgattctgtatattaaacactgatgatacaatagaaaaaaatagaaacttccctctacatcttagaagtaaccacctgaatcgctttcatttatgtttatgtctatatatcaatgactgtacatgtagatacacatatatacatgtgcatattattcagtaatctggatggatattactatttcatttctattatgtgaggctaattaattttatctttaatgactacatagtgcaccataatgccataatgtacaccataatttattttgcatttctcaattgttggacaactttaattccttttttttttttttttttttggtattatagatcatacggcagtgaatatccttgtagaaatttacttgtacaattagaaaagtgtttctgtatgtcattttactttttaaagaaattccaagatgtgatgtattggtcttactcaatattagtttttagagaaaaaaaagattaaatttgaattgcatttcctttgtctttgtaaaaatgtggcactgatgctgtaaacctttttttgtaacatttggaaactatgcagtgattgtcaattggagaaaagaggactacaaatacatcatcttatgtttgatttaatttaataggttggcgcaaaagtaattgtggtttttgccatggaaagtaaaaaccgcaattaattttgcaccaaactaaacgttattttcccaacaactgcactagtgtggtccactgcatgttggccaattgaactctgtgaagagtttgtcagaagaatctaatgctttaacatgtatatatcaggaaatttaggaaaatagtctgtaccaaattatccattcatttagtccctcttaactgagtacctactgtgttaggcattttggctctttctttgcatacagagttctttctctttgaattgatagcttattttggaggcagtgttttgttttttttccccaaggaaagactggaagagagtcgacttcattcaaaagttgaaagtcatagttaaaagacatgccgagttagctaagattgctagtattttgaggacagagatagaatttaaaaacaattttatagattcaattagtaaaagttaataagaaataggattgagttcaggaggagtaaaatagacaatatgtttaagtaggctatgcttaggagacatgagaaaaagatctttatattgaatatcctatattcactatatgagttttaatatatatcattatggatagtctgattaaaattccaataaatgaagaggtatcattgtcatgtgcgttttctctcatttttttttttgtttattcaggccaccagtatatctttttggcttctaattttcagaggaatgttgaaaaattaaaaatggtttaaagataaagaggaatgaggcaacattttggaatgattgtttttgatgaggagtagatgagaggtaactaaacgctcagtaattgtgatcggatgtgctgaacccatgatgtaggagacacaaggcctgtttcagttatctagtcaaccatgctctctgcaaaacactttcaacttctccatgccttctcctgtgcacagataatttctgtagagggaggaaaatgtaagagtgacataaaatcaaatgctctgtaagttttgaaaccttgttgagacttagaaagatgtctagaataagggatgggtataaatattgataggaatttaatagatgaaccaaaaaatatttccacttcaataatgtttttcagccaaagaggtcaaacctttttcacttgatacatttctataaggaaaagtgaaggcagtgtttactgttgttcaaattcttcaattctaggttctggagacaagtggccttggtagaggtcacaggtattaattgtgattaaaatttcataatcatttacacctggtgaactgttcactagacaatattgtctttagaaacccctggctgtgttcatatgcaactctgaatgccatttatgttgaagtttaactttgccagacaggcacagagtctagaagtgaatgttttctgccctctgtgcttttggcactggaaagacaaggtagacaaaattgggacaaaaatatgttataatactgctttcttctctctctgtaatagctatgtgtccttctgacttttaatagcttttctagggaaaaaccacattcccactgaaaatggaagaatgtcatttttagaaagcgtagataaaaaaatgatgacataaaacaaatagaaaagatttgagttaagcataaggaaatctgaatataaagtcattatgaactgtatatttttggtagcccctttagttttatgaaaaaaaaattacaccttttttttctttagaattgatagcttcttttggagacagtattaaggaaaaaaaagcagattatagatgagaagataggtcaacttgagtcaaaaattacatcatagttaaaagtctccagggaagctagttaacagaaatgagctgggatcatttggaatgaattatggtttattatggcattaaggtacatacatgagcttttggttataccccaagaacactgaattggtagtttattttcagaattttttttaaaagaaatgattgcttcaattattgttcatcattttctggttactcatgacatgttcttcatcattgttttcatatgaaaccttatcaaaataaccttatcaaaacagttaggtaataaaggccaggtgcagtagctcatgcctgtaaacccagaacttagggaggccaaggtgggaagatcacttgaggccagaagttcaaggccagcctcaccaactggtgaaaccctgtttctgctaaaaacacaagaaattagcagggtgtggtgctatgcacctgtaatccaagttactcagtaggctgaggcagaagaatagcttgaacccaggaggcggaggttgcagtgagctgagattgcaccattgcactccagtctgggtgacagagagagactgtctcaaaaacccaaacaaacaaacaaacaaacaaacaaaaacaatcaaaaaagttaggtaatcagctttttaatcagtccttcactgaaatgtcattttttattcttaagtgcagtcttgttcccatggaatgcctactatattcaaaatttttattcccattataatttattaatgatatgaacctagtgatattaattaggactacagttttgacttataggcataggaaaaataaattttttccaattttctgccatagacctttttgattactatatagaccataaaaatatgcttaccatagctttgaaaaattgtacagcttactttatgtggtttctctttttgttcatgtatctgtctcgtgactattttttgttgactttcgttgctcagaacatattttccccaaagagtacttattagaaacaattttatttattaataaccatgcatttttgaggtcctcaaaggtaagaggcagtttgggcttttccacttgcctgtgcagccccttgctagctttatatgggagacaaggagataaatacgtaaaccattataatagaaagaattaagtgctctaggagagatatggtgaaaggcaaaaaggaaacacggagaaagatgctccagatttgtctaaatatatgtaaaagggaaatttggagagttataagtgagggtggagatagggatatgggccctagcaagcccttacagagaaagtgacactcggacactttcttcactttctttgtgactgaaagattaataaagagtccatctggtagttatcctgggggttggaacaggtacaatgccaatacaaatagaagggatagcagcagtctgagctgtggatctgtagtgtcaactgagataggtagtaacaacttgggttagctaatcttcataatgcatctgggagctaaactgaggcatataatataaaagtatatgtagccaagtagcctaatggtatcatcagttaggcctgtttactgacttggaatataagttgggaccaaaaaaaaggaggttggactagatcatctacgcagtctcatagaaaagctatagtggctttgaaacttttctttaattgggtgctgttccagaggcaatcccagcctctgaagtggtggaatagagagagagtggagggtggaggcagagctgctgagcctgagcaagaggatggaaagtgtatgtcctgagttctgattccagatcttaactggatttcctgggtaatcacttttggtattctctttttctaaaataagggcattgaaggatcatctcttagcctcattcattcattcattcattcatccaccatatatttatagaacacatagttgcctagaactttctttgaattctttagatcatatgagtgaaataaagctcagtttatacaactacaatgagaatgtcactttccaaagctgtggctggaaaggcagcctggagatttgtaggaagccatgccataagttcatttaaattctgaaactagtttaaatgtgtggatgacaagggacactaggatgatgataataacttctgttgacttcttactatatgtcaagcactgcattaaatactatatatgctcacttaatatatacaataaccctttggggtaggtatcttattattattattattattattattttcattttgcagatgaggaaaatgagactgagataaagtcacatagttacctaagaccacacagctagttaaggggcttcatattcaggtttatgtgacttcaaattgtcctctaaatcaatgagtgctgatcctggctcagaactccacccgagacctaaggaataacaacttcagaagtttggtagtagaaagtggtttattttaaaatagcccatcaggtaataactatgtacagtccaatatgagaagcctttgtcaagatttacataaaatgagaggaaaatttgttgattgggtaacagtataagcaactgaaagagtaagaaagtgtaaaaatacggaaagagcattaggcaaggtgtccgaatttgcaactctgttctggggagtgatgcattgcaagggaagtgacacagaccatgaagaggagacttgggttcccattcttgcagctttatgaactagcagtgtaaacagggcaaaaagaaggttgaactggatggtttgtaaggcgccatgaaagaactacagattttttattctaaagcactaaagaattaggctttgtatgggcatcatttggtttgattaaaattttccttgggatagaagagtcaataaaattgatcacaatgagcacaaatttacatatttttagacaaacaccaatgccaaatcagaattttaaaatattttatcactttaagttttcgttatttttaattttgttttcctaattgttgactcaccaagaagcacccagaaaaatgaccaattattcaaactaacctctctggctttttcaactccctttgaacaatagtttagtgtacatatttacatgtagaatatcatcttatgttcccttaatttgttgagaaaatttccagttgagaacaaaatgttcatttgaaagttaatttgccaaaacaggtagtttgtaagtcctctctagagtcagctatttcataggatttggtacattttaatagctttgccaaaaatttggatgaagatgtgaaaaacataaatgtaaagctttcaggccttgtgtggtggctcactcctgtaatactagcactttgggaggctgaggctggaggatcacttgaggccaggagtttaagatcagcctaggcaaaatagacaaaaataaaagtaattagacaggtgtggtagcatgcacctgtagtcccagctactctagaggctgaggtgggagaatcagctaagcccaggagctccaggctgcagtgagctgtgattacaccattggactccagcctgagtgacagaatgagactgtctctaaaaataaacaaataaatgaaaatcaaaatttctagctgaggcaaagatgagagggaaaaatataagaatacagaattcacaaccaatataatagaataggttaattcttgcatttatgtaccttctctcacccgctcccatttttttcttttgagtataggataaagggatcattgtttaataggaaattcatgtgaagaaaacctatatgttggaaactcaagatgagcctttatgtgacataatttccataaaagataacacaatcttaaaattagcagatagcatccgtagtaacagagacgatagtcttcagcactgctctgggcaatgaccttttgtcaagaatgtactgaatattggtgcacaaagatgatggagtcttaaaattatatcaacaattgtagaagcaactaattgtatttagcatggagaaagcaagattgatttaggaaattataccacttttatcttcagtttttgaatgtctgtcttaggaaaattattatgcagagtagctctgtgggtggaagttacagagacacagatttcatcctagtgtaagaaaacaaaatagaacagtggaacagcctgttatgtggaagaattcaaacagagtgtaggttacctttggttggggactgtcagagaaggggtttagacagtgggtgggaggtacagtatgagctaggccctttcagatttccagttttagaattatatgttttagtatttagcaaaataaatttactgataagtaaaatatttagtcacaacagaatccctcctatatgtaacacacataattaacttgaaatgtagtccttgtcactaacaaaattttactgatgcgatgattaactatacaaagtaatgtaattgccaaaattacttccttaacatctgttgtccacacttcattgagaataatcatcgccaaatactaatctcttcatgccacttcctggcttaaaacacaatcattctgtgctatggactgaatatttgtgtccccccaaaattcatatgttgaaatcctcacccttaaggcaatagtgttgggaagtggagcctttgggtgacttggtgattaggtgatgaaggtaaagccctcatgactggcattagtgcctttatgaaagaggcttcagagcactagttagtgaccatgtgaggatgctagcagaaggcactgtctatgaggaagtgggccctaaccagacactgaatctgccttgaccttgaacttgtagactccggaatggagagaaataaatgtttgttgtttataagccacacagtttatggtattttcttaaagcatccagagcagactgagagagatgctctgcactaataaaataaaataaaaagataaagacaaattttttttttttttttttttttttttttgtgacgagtttggctctgtcgcccaggctggagtgcaatggtgcgatctggcctcactgcaagctccacctcccgggttcacaccattctcctgcctcagcctccctagtagctgggactacaggcgcccgccactaggcccagctaatttttttgtatttttttagtagagatggggtttcactgtgttagccagcatggtctcgatctcctgatctcgtgatccgcctgccttggcctcccaaagtgctgggattacaggtgtgagccaccgtgcccggccgataaagacattcttaatgtaacctacaaagtccagcgagctccccccaattagcttctccagctttatgttccattacccttcatttccaaatgaaacatattggcctactatttatttattacatatacaccatgttttcatttgctacacatcatttctcatgctgcttttttccctgcatggatgtccctcttatttctagctgacttctagttttattcttcagatctcagtttcctttatacttttcattaatcaaggaaggcttgctgatcttcccatttagatctgatttcctgttacatgtattcatactctgtttctcatttatcactgttacaaattgtatttgcttatcaagttatttgattaatgtatttcctctactaaaacataagcagcctaagggaaagggaattttatgtttttagttcactattgaactcctagtgtcccaaaatatgtgccgattacaataaatatgtgttcgattaataatataagtggaacagatagcacttactttaaaagtacagaccaatgtttagtgaaaggatgtgatccagtgaccctatggcaataagttaactctatatactgcctgcattttttagactgtgtttacttttcacaaaagccctaacagctaggattattatgttatatttgttttataggtaaggaaattgtatccctctcaattaactatttcaaaattaatatttattaagtaggatatttaagataagaaactgtttgagattttaagaaaataaccatgtgcttggtatacctagatattatgttcttcaataacttactttaaatggcatttaaaatatttttctataggattgtcttggttcaggctggtataactaaatatcatagactaggcagcttaaacaacaaacatttttctgttgcttgggaagtgcaagactacagtgtcaatagatttagggtttgatgagggccctcttccttgttgacagatggctgcctttttgctgtatcctaacctggtgagagaaggagaggaggtattctggtgtcctcctcttcttataaaggcattaatccttttgctgtgcagaagttctttagtttaatcagatcccatcagagtgaacaggcaacctacagaatgggagaaaatttttgcagtctatccatctgacaaagggctaatatccagaatctacaaagaacttaaacaaatttacaagaaaaaaaaaaccccatcataaagtgagcaaaggatatgaacagacacttcttaaaagaagacatttatgcagccaacagacacatgaaaaaatgctcatcattgctggtcatcacagaaatgcaaatcaaaaccacaatgagataccatctcacaccagttagaatgtcaatcattaaaaagtcaggaaacaacagatgctggagaagatgtggagaaatagaatgcttttagactgttggtgagagtgtaaattagttcaaccattgtggaagacagtgtggcaattcctcaaggatctagaatagaaataccatttgacccagcaatcacattactaggcatatacccaaagggttataaatcattctataaagacacatgcacatgtatgtttattgcagcagtgttaacaatagcaaagacttggaatcaacccaaatgcccatcaatgatagactgggtaaagaaaatatggcacaaatacagcatggaatactatgcagccataaaaaagggtgagttcatgtcctttgcagggacatggatgacgctggaaaccatcattcacagcaaactaacacaacagcagaaaaccaaacactgcatgttatcactcatagatgggagttgaacaatgagaacacatggacataggagggcacacaaactggggcttgttgggtggtggggggctaggggagggatagcattaggagaaatacctaatgtagttgatgggttcatgggtgcagcaaaccaccatggtacgtgtatacctatgtaaaaaacctacacgttctgcacatgtagcccagaacttaaagtataacaaaaatgttttttaaaaataaaggcactaatcctatcatggggactccattctcatgacttcatctacatctaattttgtatcaaaggccttaactccaaataccatcacattggtgactagggcttcaacaaatgaattttggagagaaacggcatttagttcataacaaaaactaatctttgttttgtttatacttcctcattttaaatctatttgtagttttaaaaattacatatggaatcctcagttgattatgtatcttagataccttgacaggtgggacttgtaacttgaaaataacacttccatctagtgacaactaacctgattaaattaaaaaactctggagtagctgggaagggtaaaacaaatcattcacatagaatggactggacacataacttagagcagtcattttttaaaaataaacacctgaagtaactgatgcttgtgaagcttatggattaataatgatcaaacaaaacaatctgtttagctaatagaatattgctcatgtagtaactagataaaatgttttcttataatcttgccacttaaaaatgggtccgtctccattttcctcactccactgcttctgaatgagaaccttttgtactctgaaaacctagtaaaaagttttcttcttagtttaaaaaactaactatattcaggaacaaacatgtatgagaaagtgggttcttggtaaaatttccagttgggttttgcagaatcgtaaagaagttgatgttaaaataagctctatttatcccaaggggacacttaaatccactttgaattaaattactgtgggatttaatataaacacaataataaaacacttccagacatgcaatacatagttagacaatgaagatatataaaaattttctttaaagcattgaatctcaaaggaaatatggatgatttatttgtatctcttaattcctgaatttatgttatagattttaggtgatatattttaaattaactattcagctacattaaaactacaaatacaattgtcatatacaatcctttgagctaaaatgttcttatcatatgcaaatgccagatcaaaagagataattattctatttctctggaagcctatataaacaagaaaaacctatcactctcaaatgataattatttcactgattgagatagaaaatcatgtttaatcttttttagatagtccagaaggtattatatctatttgtccacttactggtatatccattaaactgtatccctaaggtgttccaacttaagatgtagaaataacctaactggacatattaattgctttttatatcagtcaatgaaaattactgctttcctgaaaacactatttattatcctgtctccctttcaggaactatatttcatatgctgacaataaacacaaagttgacattttgccaacagttaagttggaaatatcaagcacgtgaacaaattcaagataagaaaagcatctgtcttacacatattcttagtcagtgtcattaaaatagagttgttttgtggcctacttcaggaaaaatatacagatatgaccccatctcttgttatatttgtatacactattcatataaaaagtgtggattgtaccagacaacaacagatgacaagttatgattcaaacttgttgccaaaaaatattgcatcaataccaaagggaactgattctttgaaaattatgttgtgtcatgtgattgtaattagcttgtatgaagcacagctgatctaggatgtagaattcagtggtaatccagagaatagtgttcctattattattaataggaattattgctatatgacaggcattcaattaaacgatttacatacataattatttttgtttttattaaatggacagaatctgattactaatattcctcagttcctatcccaatttgttaatttaaacatgatcctcctttatttattttatacaaattacttatgatataatgaatatccatacatacacctagaattagaacattgtgagtaatttacatctatgtatttggttatcttatcatatatctatctttttcttctctcttcctgcaaaagattaccactattgtgaattttgagtttctcctttctttaacattgaaaaaaatagttttattttgcctgtatatttaatatattacttgttttgattcatttctaactttttatgtcttgagaaatccatacctacgctaatgtccaaaagattaatatattatgttctattaaaagttttgaattttgattttgatatttaagttcttaactattcaggaactaatgttttggggtggtttgaaacaaggatgttacgtgattttgtttgcatatgataaccaatgtttttcttcatcgaatagactcttcttttcccattaatctgacatgccatctatatatgtataattgatacttatatagttgtttatgggtctttgttttgctccgttggtcagtttatctatctatacacaagaaacacattctgaattactgtaactttatagtaagttctattatgtgaaggccaaattatttctccttttcttttagtgttttactttgtttctgctgttttgcatttctgcatacatttgaaagtcggcttgtcaagttttatgaagaaaacctattggagtttgactggagttacatcgagtttgtaaatcaattttgagagattgacatctttacaatattaaatctccctacatgaaacatggtgtattaattatctacttagcccttctcttacgttcctttagttccttgtttttacatgtgtcttgtggtttgtttttttgttaagttttttactagacaatttacattttttattacttttataaaataaaatctttaaaatatgtttttaaaaatatctgtcgccattttatagtaatgcagttagctagctttctttcatgcttcttaccctcccttgcttcctttcttccttttttttttcttctttcttcccaaaagtagcagaataaaacaaaagtttactaaggattgcatttattgaatagaaaacattttagagtcctgttacaagtagcttgtggctgaatttcctcacatagtggtattatgttctctcttggcagatgggtaacgcaaacattagaaaattcaaataatttttccataacttgaaagaggtaatagtgggattttactggtcaattttactttaagacctgtgacttataagatgttctgtaatgagattttgttcccctcattccactttcttctgctgcataatgttaatattggatttaaatattttcttctcttatttatttatttatttattttttgagatggagtcttgctcttttgcccaggtcggagtgcagtggcgcgatctcggctcactgcaagctctgccttccgggttcatgccattgtcttgcctcagcctcccgagtagctgggactacgtgtgcccatcaccacacccggtcaatttttttgtatttttagtagagacggagtttcactgtcttagccaggatggtctcgatctcctgacctcatgatccgccagccttagcctcccaaagtgctgggattacaggcgtaacccaccgcacctggccttatttatttattttttaattaatttatttttttgtttcatattcttttttttaattatactttaagttttagggtacatgtacacaacgtgcaggtttgttacatatgtgtacatgtgccatgttggtgtgctgcacccattaactcgtcatttaacattaggtatatctcctaatgctatccctcccggctccccccaccccacaacaggccccggattgtgatgttccccttcctgtgtccatgtgttctcattgttcaattcccacctatgagtgagaacatgcggtgtttggttttttgtccttgcaacagtttgctgagaatgatgatttccaatttcacccatgtccctacaaaggacatgaactcatcatcttttatggctgcatagtattccgtggtgtatatgtgccacattttcttaatccagtctatcattgttggacatttgggttggttccaagtctttgctattgtggatagtggcacaataaacatacgtgtgcatgtgtctttacagcagcatgattcataatcctctgggtatatacccagtaatgggattgctgggtcaaatggtatttctagttctagatccctgaggaatcaccacactgacttccacaatggttgaactagtttacagtcccaccaacagtgtaaaagtgttcctgtttctccacatcctctccagcacctgttgtttcctgactttttaatgatcaccattctaactggtgtgagatggtatctcattgtggttttgatttgcatttctctgatggccagtgatgatgaacattttttcatgtgtcttttggctgcataaatgtcttcttttgagaagtgtctgttcatatccttcgcccactttttgatggggttgtttttttcttgtaaatttgtttgagttcatcgtagattctggatattagccctttgtcagataggtagaatgcaaaaattttctcccattccgtaggttgcctgttcactctgatggtagtttcttttgctgtgcagaagctctttagtttaattagatcccatttgtcaattgtggcttttgttgccattgcttttggtgttttagacatgaagtccttgctcatgtgtatgtcctgaatggtattgcctaggttttcttctagggtttttttgattttaggtctgacatttaagtctttaatccatcttgaattaatttttgtataaggtgtaaggaagggatccagtttcagctttctacatatggctagctagttttcccaacaccatttattaaataggcaatcctttccccatttcttgtttttgtcaggtttgtcaaagatcagatggttgtagatgtgtggtattatttctgagggctctgttctgttccattggtctatatctctgttttggtagcagtaccgtgctgttttggttactgtagccttgtagtatagtttgaagtcaagtagtgtgatgcctccagctttgttcttttggcttaggattgacttggaattgtgggctcttttttggttccatatgaactttaaagtagtttttttccaattctgtgaagaaagtcattggtaacttgatggggatggcagtgaatctgtaaattaccttgggcagtatggccattttcacgatattgattcttcctacccatgagcatggaatgttcttccatttgtttgtatcctcttttatttcattgagcagtggtttgtagttctccttgaagaggtccttcacatcccttgtaagttggattcctaggtattttattctctttgaagcaattgtgaatgggagttcactcatgatttggctctctgtttgtcgttattggtgtataagaatgcttgtcatttttacacattgattttgtatcctgagttttttttaaagttttattttaggatcagtggtacatgtgcaggtttactatagggataaattgtgtttcatggggatttagtgtacagattatttttttcacccaagtaataagcatagtaccacatagtttgttgaatgtcacgctcctcccaccctctaccctcaagtagacccctgtgtctgttgttccattctttacgttcctgtttactcagtgtttagctctcaatttttaagtgagaacatgttctcggtatttggttttctgttttaggataatcatctccaggccattcatatttcttgcaaaggacatgatcttgtttctttttatggctgtgcagtattccatggtatatgtatacaccatattttctttttccagtctgtcattaatgagcatttaggttgattccatgtctttgctcttgtgaatagtgctgtgatgaatgtatgtgtgcatgtgtctttatggtagaatgatttatatccctttgggtatatattcaatcatgggattgctggatcaaatgaaagtttggttttaatttcgttgagaaattgcaaaactattttccacaggggctgatctaattcacattcccatgaacagcatgtaagtgttcccttttctctgcaaccttcccggaatctgttattttttaactttttaattatagccattctgactggtgtgagatggtatttcattgtggttttgatttgcatttctctaataattagtgatgttgaatattgttttcatatgcttgttggccagctgtatgtcttctttggaaaagtgtcttttgatgttcttaccccactttttaatgagattgtttgttttttgcttgttaatttgtttaagtttctcacagaatctgtgtactaggtctttgtcatatgcatggttttcaaatattttcatccattctgtaggttgtctgttgtagtttcttttgttgtacagaagctacttagtttaattagatcttatttgtccatttttggttttgttttaattgcttttgttgtcttcatcatgaaatctttgccaaggtctatgtcctgaatggtatttttaccaggttatcttccaggctttttgtagttttaggttttacattaagtctttcattcatcttgaattaatttttatattgctttatatttaagtctttcattcatcttgagttgatttttatattgctttaaggaaggggtccagattaaatcttttgcaaatggctagccagttttcctagcaccatttatattgttattgtagtcttgtagtataattcgaagtcaggtaatgtgaggcctccagctttgttctttttgcttggtatagctttggctatttgggttcttttttggttccatatgaatttaaaatagttttttttctaattctgtgatgactggcattggtagtttgataggaatggtattgaatctgtaaattgctttggccagtatggccattttaactataatgattcttcccatttatgaacatggaatttttttttcatttgtttgtgttatttctgatttctttcagcagtgttttgtaattctcttacagaggtgttttatttacctggttatttgtatttctaggtattttattattgttgtggatattgtgaatgggattatgatctggatttggctctcagcttgaacactgttggtgggctgatgttcctttagtctttgaagttactgttctttggatggagttttttacaattttattttctttgatgcctttggaagtttggttgtggtttgaggtaggttcagtagactgactttatttctggaaggttttagggggccaaggatcagcttagcactcctggactgcctgttaactctggatggctgtactaggccctcagctgcagtctctggccctttgaggttaggaatctgattcactcggggggctgaggtgtcccagtctactggccacaactctacaaagctggtgctggcagggtttactcctgttggcttgggtggcacactggtgggagtgagcctgaagtggtcctgtgtatgctcatgcctatggcagtggcagtgtggctggtgcagggcggtggcagaggcagagttgccagcgtccatgtacacatttgtgctgttggtggaagggtaacagggcactcctgcatcagcaagggtttggacagttagctctgtttgcatcatctgtggtgacacagtgggatgcattcacacacacgtactggctgggtaagggaggtgaggtctgcccacatggggagagggagactgtagtgggtcaaggctgcaggttggctagtgtgcatcgtcaggggctggtctactggagctcttcaacaaacagacacagtcttccagtgaaggagctatgatgataacccctgggaagcaacttggttggccatcagaggctgtgcttcaagcaggtacatatagccaggctgtacccaggagaggccagcagacagaggatgtgcaatttggactggtcccatcccatttgcaacaccaccatgttctgtccaggtccaacagtctctcaaaggctgacgtcacttagaaggccatggagagtctttggggatgggcaccctagccatactccactgcagctgttcctgtcccaaaccctgtgggctctgcacaggctggaatcctgtttcttccatctctctgccaactctctgccagctcaagtgtccgtgggagtcatgggctgtcttgttgccaggatttttggggattcctggtgaggacagagcactcctcacctgtttagctcattccgcaggagttgctggggtccaggagcgagccccagtgctcagcagccccctacagggctcccagcttcctcctcaagttcagcccactgtctgtgtcctaactgcatccactctcaatgctttcctgctgaagatctgctcagagtttgctagtcttccccatgtccctgtctctcagtgtgagatgttcctcctggctgtatctagtcggccatcttgggtcttgtcctactttcttttcagactaaatctttagtcttttcaaaatctgttaatagaaatatttgtgcatttatatttgtcaaaatatatgtattctaaatgtacttattatttatttctattcatccattcatttattcacacaagacttctttttgaagcttgcttagatttaccttcttaaacaattttaatttttaattattatagtaattgtatatatgtataaaatacacatgatattttgatacaaacatgcaatatgtcataagagtagctgggatatctatcacctcaaccatttatcatttctttatgttggaaaaattgtaattccactcttttagttattttggaatatacagtaaattattgttaactatagttgccttattgtgctatcaaacaatagatattattccttttaatgggtactgtgttcatgtacctgttaaccattgcctcttcatctccccacttcccactactcttctcagcctattctctgtctccatgagttcaatttcttttttttagctcccatatgtgtattcactcaagatttattgattaccaaatttgatggatagagttgcctacagattgtgggagtaagaataatgtaactaggaattttcttgaagtgcctgctttttgtttcatatatatatatatatatatatatatgacttcatcttcttgataacagtggggagttttcagtgaccacttcataatattttccatgatactgcaagctgtgcaatttaaagttattggtggacatacaagctttgtgaataaaataaccacaaagattgtaaatatttgaacaaacttgagagttgtaaccaaataaaatgcttatcagagcatggtacctgtgtttaaaaattcagctcaattcaacaaagatttactgaaaactaccactgtgttagggctgaggatacatagctgtaaaaaatggatcctgcttttgaaaaacttactacctgggtgcaggaaaagagtagaaaggaggagtaagccagatcctagagttgagaggaagttataaggagaaatgaggtacctttggggcttctgcttctccatggaatgtccttgtgataatatataagaatcaaggtaatgcatagaaagtcagaaaagtttgaggtattatgacacaaacacattaattcatataccaactaaagaggaaatggtgctggctaggactataggggtaactcatgagtaagtaataaactaaagtagtcatgcttgatggaagatgaaacgcaagacctgtgtttaactaacatactttactggcaactaagcataatgtatatggcctataggagctattggagtaggcttttctcatgtctctcaatttaatatttatccttccgtatccttcagtacattttttgccttagttttaaccctgagatgaaaagagtcatagattccagggtacagaattccttttcaactagtttgacttttgacaaggtaaacagcttctaagatctttatacaagtcatctgtaaattgagtataatagttcttactttacaaggtttttgaaaatattttcagtgattcattaaaaacgcttagcctggcgactgttctgtattggatgataaagagatggtaaacctgttagttgtaccttactatgtcagctttctgtagatgagatctttgttgttcctgctttgctttttatttatgcccagactatttacttttgtatttttaatataaaaatgctatttttaaagctacatttggccagtaagtttggaaatatgcaattacactttcttattataatttaatggttgtcattgtttcataacttgtaaacagtacagttggctaaatagtcttaggtagtggtgttcaacccaggtggcatattagaatcatctggaaagctttcaaaaatgccaatgttcagacactacccaaagtcattgaattcaggatttcttgtggacctaattattattattttgtaacagctcttcatctccaacatggcaataataacatctactcagcttgtcagagtagatctgatgattacattaaaaatatattcaaaagtgattgataaacagataattaaaataaaaatgtagggtaatattaaaacattttagaaatatttaccctggtcttgaggggtttaacatttacttagagaaaaaggttaaaacataaaaaattcaaggtaacatgtcacacactaaatggaagtaacagaataattatgctaggaatcccatcctaatcacactgtgtaggcaatccttaatgtatatgaggctgtgaccttgtctagtacttctcaaatatttatacctgggctttctttaatgataaaagaacaagaacaataacctttttggggctggagagggttactaggagggaagtcttatctagggtggttgtctaaaaccacttacctcaaatgtttgttcattcatcaagtcattcaacaaaatgtttattacctaatatgtgccttctggacattttctttttaaaggcaatttagcagcatgataaagtgggggttaatagtataaatgctggagccagaatatctgggtttgaattctggctccacaactttctgattatcttatgttgggtaaattcttaacttcactgtgactcaatattctttattttttaagaaggaagacaatatcgttaattacttcctagggttgcagaaagaggtttaatgtattaataagtgtaaattgatccaaactatgtgtggctaatagtaagagataggtgtgcttttgctaacatctctgcatttttattccgttatgttcttcatttgttttagtatgaacataatgttttcagtgtgaacatatgaagataatgctttaagttagctatcaccaaatgaaaatggttctcaaaagaatggatatatcctcctcctaagacagagtcaaatatatgaatctcagtttttcaaggcactatcttatttaagattggtcattttcaacaacatggattatctagaggatgttatgctaagtgaaataagccaggcacagaaagacaaatactgtatgatctcacttacattttgaatctaaaagagttgaaatcatagaagtagagagtagaatgctgctggttaccagagcatggggatgggagtggacagagtgtacaaagtttcggttagaagaaataggcctagtaataggcctggaaataggcctgtttttgcacaacagggtgactatagttaataatagtgtgtattgtatttttcaaaatagctaagagtgtattttaattttaattttttattttttgagacagagtctcgccctttcacccaggctgtactccagtggcatgaacatgactcactgcagcctcaagctcctgggttcaagcaattctcctgtgccagtcttcagagtaactggaactgcgggtgcattacaccatgcctgactaaacgtggattttaaatattctcaccacatggcatgcatctgtagtcctagctactcagaaggctgaggcaggaggatagcttgaacctaggaggaaggggctgcagtgagccctgatggtaccactgcactcagcctgggagaaaaagtgagaccctgcctcaaaaaaattaaaaaataaatataaataaatatatttaccacaaagaaatgataagtgttttgggggatggatatgtaaaatagcttgatttggtcatttcatgatgcatacatgtattaaaacatcatattgtacccatacatatatacaattattatttgtcaattaaaaataaaataaaaattttaaaaaaacattagaaaggaggttagagacataatcagggaagtacagaaagcaatgaatgcttgtataccagtgggttctctcctagtttccgatcagggaagaagtctagaagagtcgtgcttactatgtgaccagaaagatgagtagagttagtgataagcagagcttgcagaaaagctgtggtgtgtaaatgggtgggttgtgtggagactgagagtgttccagagagagagaacacatgagaaaaatgtcatttaaaactgtgaccttatcagtgaataaagggtccaacaccacataaatgtggaggtgcagtatatacagaaactcttaaggctcttaacagccagaacaatggggtaggggcagaacaagaaatggagtttctttggaaacagtgttttcaggtgattgtaacattagcattaatgagaggagtactaagttttgtggcagtgcagaacagaaagaagtcgttcaaagggggttttagtgagaggaaaagggaagactattcaaggcttttgaaggagctggtatttggcatgattcttaaaagagcaatagggtgagacctctagcttctagagccaggacagggctttactactgtccttaactgtgtgctgaccttgccttatttgttcagctaggattgtgtctaagcagagcctcagcatctgttcttaacctcaactgcagccttatccttttacccatgtgccgaacactcttggcttacctccgaggatcacagaaggtaagaaaaaacagtcctactttcaaattccagcataaaaatcaagtgtaacagtcgcatgttagtttgtttacttttcatagtctgacttttgactggagtgatttcttgtaagatgatggtaaaagacatgtcacctgccaagatgatctgtgagttattctgcaataccagataagggcagaggataatagtaatattattaacagggatttccagcactatgcttagtgtttcacatacatgctggacaattcttacagggattctacaatcaggtattgttagtttcatttcacacacaagaaacctcaggcatagaggctttgagtaacttcgagactagggaatgacagagctaaggtcaatcctaatttgagttctttccattatgtcttgtctcattgagattctgtattttcacttagctaaatccaggtgagcaaactagagtcctttagattctgagcaatacatgaaatgattgctggtgttggcaacaacttatctctgcttaacacatatactcattttgaagtgtgtaataggcttgagaaacatgtctttttttattatactttaagttctagggtacatgtgcacaacatgcaggcttgttacatatgtatacatgtgccatgttggtgtgctgtacccattaactcgtcatttaacattaggtatatctcctaatgctatccctcccccctccccccaccccacaacaggccctggtgtgtgatgttccccatcctgtgtccaagtgttctcattgttcatttcccacctatgagtgaggacatgtggtgtttggttttctgtccttgtgatagtttgctaagaatgatggtttccagcttcatccatgtccctacaaaggacatgaactcatcctttttatggctgcatagtattccacatatatgtgccacattttcttaatccagtctatcattgttggacatttgggttggttccaagtctttactattgtgaatagtgccacaataaacatacgtgtgcagagaaatatgtcttgattaaatagtgatgtcagggggaggggggagggatggcattaggagatatacctaatgctaaatgacgagttaacgggtgcagcacaccagcatggcacatgtatacatatgtaactaacctgcacattgtgcacatgtaccctaaaacttaaagtataataataataataataaatagtgatgtcatgtattatatgcagtgttgtaaaatgaagtatgtaagaaaacaaaaacagtcattctgctaatcaacaaaaattcttttttgtctttgactaattttgtgtatatgtgtgactgtgtgtgtgcgtgttgattcttcttccctaagattcactaagcaaagcaccgctggatagatattgatattttaaaaggagttgttaacttgagatcactttgatgttctatgaatttaatgtgtgcagatttactctaggaaaacttctcaaccctttctacataattatatttagaaactctttccttttaatgcagtaatctgtgaaaataactctctctaggttgcctaccatttaaactgctaggttttgatccctgtggttggctattggtttggcttggagaaagagaagataagtggcagggaataaaaagttcccacctaagtctctcagtatttaatcattcttaaagatttgccccgagtgtgaaacagtgattcagaggtgcttgacattttattttgttataagatcaaacaggcatttcaaactatagatgagattgcttcattttaaaataatcttattttttgactgtaaaaggaaatcatatatattttaaaacttaaacattccagaaatatgcaaaatgatcagagaaagtttaccctaatcttattctgccagaacaaccactgatgacaatttgtggtaagtgcctgcagatacgttaacatctaatgccattagtgttgatcaatataagatcacagtgcagtttttttgtaactttttttttaacctaacaatgtgtcttgaacatctttctatatcaataatatggacttctcacatatattttttaatggtttaggtgtcccattaactagatagatcataattcatctcaccaatttttgattaataggcttccgccatattttaaaaattttgacataatgaacaatgctatactgaaaaacttttatcacatttgttgcattatttttaccatattaaatgatttttgtttaggttccaagcaggagaaccaggagattgttggataaaagcagaacattccatattacctgtggtgttactatctgtattttctcaggtgagaaagccacaagatattaaataatttgttagaattacacatttaaatgtaaacattccagacatacacagaatgatcagagaaagttttccctaatcttattcttccagaacaaccactgatgacaatttggggtaattgcctgcagatatattaacatataatgtcattaatggtgaacaatgtaagattgtcgtgtggtttgtgttttaaaccacacgtaaaattacacatggaaaatgtgtgattttattgttctgtacattatctgctgtcagcaacttaggattttcttattaaatagcttagtagttcttttccatgtttttgaaaagggttgtctacagggaattacagaaaatggatgtgtcttgtgatttttacattatgatatccaaaagttggcccccaagctgataatgactatttcctgaaagtaagtaatttcattccagtaagaaatactggaagaaacagactaaaagttttcaagctctgaaagtgatgatgtgatatgagtttaaatgcatgaacattttattttttatttttttgaaacagggcctggcactgttgcccaggctggagtacagcggtacaatcttggctaactgcaacctctacttcccaggcttaagccatcctcccacctcagcctcccaagtagctgggactacaggcatgtgccaccatgcctggctagtttttgtatttttttgtagagacgggctttcaccatgttgcccaggctgatctcgaacttctgagctcaagcaatttgcttgcctcagcctcccaaagctctgtgattataggcgggtgccactgtacctggccaaatgaatgaaaattacaatgtgaaatactcattagtagattaggattccatcccgaattatatgtgatcaatatttctttgatattaatatttggtagaaaaaccaatgtcaaaatttctgaagctttatcttgctcttttccaaattaagaaataaagcaatgatctttgtgctattataagcctttttaaaatacattttgatcctgagcttttagatgatacttttcaaatttttggaacagaaagtaagaaacatagtgatgaaggacatggattccgaggagtccatgcgtaggttctatcctcagttgcccttctgttttaatgtgtgatgttacctctctgatcctcaatttgctgttgttgttgttgttgtttttaactgtaaaatggattgacagcaggacttacctcatagatttaagactaaaatgagaaaatgaatagaaatttttaggatagaattagtaattgtaatttacagttgcaagggttaattattccagtggcatagcacctggtattttcacctggccattatttgatgacatagctgttttgatagcagggccattttgactaatgaatgttttgatacagctattgccaagaaattattttacttttaacttggtaaaaaattgccaagcattgttgaaatgggtaacttcattgttttatctctgaatgtcttccaattggtagtcccacctctgcaggtgttagatggggagaggctcagggataggattagcagttcagtgaggatgagataaggaccaagggtgtagtaagggttagagatagattagggagagggagagtgaaaggtcagaaatggaggaggatcaggaaaccagcatattcgtgactcaatttgttctaaactataatcatgtccaagtattctggttcaactggagagcaaccaagcaactgagctagcatgagcttgtgttccagagggtttgcattctgccagtcactagtcgtctgactttggctacattacccttctttaacttcagttttcttgtctgtaaaatagggatgactctatctaccacattgctttgttttgagaatcaaatgagaaaatctatgtaaagtgcttggttgagctgcttccttgctgcctaaaattagaagccctgaattcttttgacctaagaggtcctttaaaaaggtgaatatatcccttaattatgtattttctatagctgttacctacaaattttttttcagagaaattcagaaagaatagtaattcttctatagatgactttgcattttttagccatagagtatgtagttaatatataagcttttaatttaatatgaaaggattattttactatacatttgggtattgatgaagctatatgacacagagagttttgtgtaaatagtattttatacctgtgccatagttgtgtcacacttagaccccctttgttttactactttggaaacttgtccttgcttgttatttaactcatgttagcttcctgtccattttttttcctcttaaaaatttttaaagactatttttctgtagggcagatttatgttcacagcaaaattgagaggaagatatagagagtttttgtatatcatttgtcctcatgcatgtatagcctcccccattatcaacatcccctgccagagtggtacaattttttacaattgataaatttacattaattgacatatcattataacctaaagtccatgctttacatcagggttcacacttgatgctatacattctatgggtttgcacaaatgtgtaatgacctgtacccaccattactgtaccatgcagaatagttcattgccctaaaaatcctctgtgctctgcctatttatctttcctttcccactaacgccagaccaccactggttagtgtttacagtctccataattctgccttttctagaatgcaatatagttggaatcatgctatatgtagtcttttcagattggcttctttcacttagtaatatgaatttaagtttcctttgtgtcttttcatggcttgagagttcatctttttatagtggtaaataatattcccttatctggatgtaccacagttttttttttatctattcacctattgaaagacatgttggttgcttccagatttcgacaataatgaataaagctgctgtaaacattaatgtgcctgtttttgtgtgggcatacatttttagttcctttgggtaaatatccaagagtatgagtgcgagatcatgtggtaagagtatgtgtagtttttaagaaaccaccaaactcacttccaatatggctgtaccattttttgcatcccccacctgcaatgaatgacagtttctgttgctgtgcaatctcaccaatatttggtgttgtcagtattctggattttggtcattctaataggtacgtagtggtaacttgtcattttaatttgcatttctctgatgttatataatgtggatcatcttttcgtgcttgtttgccatctgtatatcttctttggtgaggtatctattgagatgtttggcacatttttttaattgggttgtttgttttcttgttattgaattttaagtgttctttgtatattttgataataatcctttatcgatatgtcttttgcaaatgctttttcccagtctgtggcttatcttctcatggtgttcaaaacgtcttttgcagagctgaaattttaattttaatgaaggccagcttattaattctttctttcatggatcatgtctctgacattgtatctaaaaagccaacaccaaacccaagctcatatagactttttcccgtgtatcctttgaggagttttatggttttgcattttacatttgggtctctgattcattttcagttaatttttgtgaagggtgtaaagtctatgactagatttatttatttaaatgtgaatgcttccttgtttcaggtccatttgtgacaaacgcattttcttctttgtattgcttttgctcttttgccaaagatcaattgactgtattaatgtgggcgtatttctgggctctctattctgttccattaatctatttgtcttttcttttgctaataccatacattcttgattactgtaacttcatagtaagtcctgactcttcccctacttctaatttgattacttgaaggaccttataaatcttttaaataactttcaggcattttagcattctaatcctctctcactttcattatttttgtgtgtgtgtgtgtgtgagtaccttagaactctaagccctctacattttacattatgggttgtgggaaattatagagttttctagattccaggctatgtcttcttttgaaccattgcactacacatattgtgaactataatggtttactaagcaatttcagatcacttatctcattaagccttttgtttctgtcaccatcattttacagagaagtaaattaaggcccctgaaaggcaaataatatggccaagatcacaaattttccagcgagttacctgttgtattttcaatacattaaaatgtggtgttaattcacaccttattttgcctacaagcaaagcttgagcaagggggaaggtgtgatgggcccgtgcacatctcaatttctccttccttacccaacctcctcaaaataatttttattaccctatctttgccaaaatgagttcatcttcacatctctagtaatttcctaacactgctattatttatgtgagctctaagtcagtcgagccctttgtttattgtgattattgttttcctgaattttgtcccatgaagtgattcccaacactttttctgttgggttaagaatattatgatttaaatctgtggattgtgaaaaatttctactagttgaaagtctttcagtggcctataatttaccttatggggtagggaagtatgcaagatatgtattaatagcagatttggaactatggaagaggtgaaagatgtggaatacctaaaatatcagggaggtgctcaagtaaataaatactcatatcattagatgcatatttatgtgtgtgtgtgtgtgtgtgtgtgtgtatgtgtgttagggggaggatgtgtgtgtgtatgtgtgtgtgtgtgtgtgtgtgtgtgtttctcttatccctgacttactagggttgtttcattacagcctttgaaaatttggtaaactgtctatagttcagttttttgtgtctttaaaacttcacctttcaatgtaatatttcattgtccacatagctgtcaaagtttggccctgtatttacttagggagaggaagaactgagtccttgacatagagcatatatgcaaatcccactaacttacccctggtgtaattctgtaggcgtgcatgtggctgcccatctggtgaatgccctcaacttctcagtgaattacagtgaagactttgttgaactgaatgcagcaagataccgagatgaggtgggtggtctctgtcttcccatttttctttcacttgtcatgagatgactaatgagggtctgtgatttttccctgaaaatttgtaccttactgctccttttgagtgcttttaaaatgcagttgtcaagttgagctttattccttttcagtagaaaatataagtaattactatttcatagtgtctcctgctgaaagtgagagttggtagaatgtctactttttatattgcaatgttcagatggttgccactcaggtctgcctctgactcccagcagcttttgtctaattcctatcattcagctgagagtgttgacagtgccgttacagggtaaaaatactttataattcacatactgggttttggggaaaagggaagaaaagtaggttgattttttgtgaatcctggacaaatcaatttatttgacttaaaaaatgttagtgagttttcatgattcattcatttaaaaacattcctcgaattaagtgatgttgaattcaattctgtagcaggcaatatctgacgtagagtgcttttctccatgtgaagccatccatgaaatgaaattatatttgcaaggtgcagcccagagcctgatgaacagcacatgctcagccagttaggtctctgttggttgatgctttcatacagtcctcaggctgcctttgcttcacaatgccaagactacatcaaaaacaaactgttctgtcccatttaaatcagcatcccccccccttattttcctgttctgcagactaagtttggtagtgacttattaacttttttccccaccttccccactcctttttcccctccacatatcaccagagttttctaggtttaatactgttgtgttcatgtgtttgacctccatctcaaaacaaaacagaggaaaaagtaacaacaaattcagaaacaaatcacaaaaccaaaatagccagcaacttttgatatagcccttgtctctattggtattttaaaaaataccaacatgatctaattagtcttggatgggaggcaggcattgataatttgtaaaaatttaccaggcttgtagagtgcatccagcactgagaaccactgaaaaattcccgctccttagcaggccagtgacagcgcttcacatgtaatttcagacccagcctccacttctgcccatctcacttccacctgcttccctttctcctgctgccctctgctcaaatcactagctacttgtttcctgcccctgttccaacatttcctttgtttctcttttccttcttttcttctcttttcagaattcatgtctttaataactttaatggttttctcattttaatggaataaacttttgcttaagttccaatatttttagtgatttcaaaattttcagttattaaatttattttctttgaaaagttatacatgctcaatataaaatattttaaaactctcaagtaaatgaagttaaaagtgaaagcttctcctccaaaacaagccacagtttattatgtttttttctgatattttgagtcgcattttatggtatatattccttggcgatttacttgtttgcataaatatacttttatagcttattgtatcaacatatcttaatctatctcattctctccatatgactatgccataatttatttttagtctttttcttattcagacatttagattgattctagggttttgttctgaaccacactccagtgaatgtatttctttgtcctcttctacacagatctgtagttgtagaattttggtttaaaaggttgtacatttttagttttgatggacagtgccaaattcctttttaaaaagtcttctcctgttttcacacttctaactaatattagaatgcctatttctacaactcatctctgtttttttttcccaatctaagggatgaaaatggcaactcaacgttttaagttagtatttcccctgcctttatttcttcttgtattccttctttcatgtctctctttatgcttttttctctctttttaataaatatgtatttagcatctaataggtacaaggccatgcattagatgtagatgaaaataagtgtatatatacttatgtatttaaatattatgtaaataaatatatggcatatctattatatatagattatattttatatattgatatatttatatattgattatatatatatatatatatatatagtcaacacatatgttattttgtgaagcacttttgaaaaagatggttttgtgccaatataccctattgttcttcttttatgcttttactctgcatgcaaggactcaccctccaccttgtgactgctgcacttccttgatagcccggctaaatctgcctcatcttgccactgtgaaaacatctctcactctcatgtttcattttctttctctagcaatattaattgttccatcttctgggttttcttaggtatttattcacatttctattcttaccactttgttcagcccatatgatatttttatgggttgtttatatattcagttttcttagatcaccctatagccatgtttctaatagttggaatagaagtcaattgaattaagccaggtgaggagctattcctaagcaagtggtccttattcaaagacccccagatgacactatatcaatcgtttccttcttagtacatagtctggcctgaccccagattcaatggaggcacacagaaagaaattcaaaagcttgtgaaatattaagcaccacggggataaaaaataaatccacaaatctagtggcgattggttttccagaaggtagaagggtgctgactataaccattagagcataagagatgtagtttaaaggaaatcatacaatattttagcaatattaatgtttcatatttctaagtagcagaaactggtttttatttgagtatcctcaccacttttcactatatttgaaacacagaaagctctcaattagtcttcttcgtactgagcttacaatgcgcaaatcccctacatattttattggtttttaattctgtcttcacatcttgtgatgcagtttcacggttttggtagacagagtatataataatagtttaacatcatggctaagatattgagtttcaaaatggtcaaagatgggcttaaaaccagtgccaccagcttgtaggtaaccattaagaataatttctgggccttttgagtcatccagtattttgcctcagatggatagatttctctgaattgggtttttacttgttgtaatctcctctagcattgtgaaaatgttatgaaacttaatcgagtctttctcacttccgttggatgaacagtattttacatgacaagtatgtggtttgtagatcctgcatactctttatagaattatatatcatcagtgctttagtttttaatcatttatttttttttctttttctcaggatcctagaaaacttctcttcacaactggtaagttgttattcttagccttttctttaggtttaggaacatctttaaaagtaggcattatcggactgggcgcagtggctcatgcctgtattcccagcactttgggaggctgaggcgggcggatcacctgaggtcaggaactcgaaaccagcctgatcaacatgatgaaaccccatctctactaaaaacacaaaaaattagccgggcatggtgggtggcaagtgcctgtaatcccagctacttaggaggctgaggcaggagaatcacttgaacccaggaggcagaaattgcactgagctgagatcgcgccactgcactccagcctgggcgtgacagagtaagactccgtctaaaaaataaaaataaaaataaataaaataaaactaagcattatcaaattacacaacaattagatatatgttacaaatataacatatggacaatttgcatgtaagaataaatatttggagttaaaggataaggttgcaatgagaacagagacaatgcaaacattggggtgtgaataaatggagagtaaaaataagcaaatacatttcactgtcgtatattcttccaatcaaaacaatgcaaccgcattcttattgagggcctgctttgtgcctgctgctgtggcaagtgctgtaggagataatgcatgtttaacaggctcctgccctcaatgtattggaaaggaacaccaagcactgtgggtatccatggagttcttataattcagtaatttagtgcaactttttttaatcttaaaatttacaacaaagaggagaaacagtcattaaaataagttatttctttgaaatgtgtctcctatttcatttgtaatttatttttccttttcaagcttattgtccatgaaatctcagtctagactattaatttgttaaagcacgtttgaacatctcaaaatttcccctgatgttaaacaatttttgctaaaagtcttctttttcccaaccttagatttataaagatgaaagaataaagatgcatttggggaatttttagcacatatttcagggacaaggatgattgcatagttgagatgctctatcataaattgttgggtgtaatacccaattaagtattggaattgcacatgggactgaggcacattaccctggcaaatgcattatttttcttttgaatcaattttatgatgaaacgtcacaataattctagtgctttccccatccatgtcacagctatatatttagatttataagatacattttacttttgtctatagatttataatacttgccacttgcaaagtatttcacagttttctctttaggaacacaatttagttttgctttcaactttgctcattgaaaacatgttttcatttaggcctgaagaattgggtgagaacaaaaagtacagaaaaagaaaactttacgtatcaaccaatgtattttttggtttacagtgaattcatttaagagagagaaacaaaagctttgtttaatattattttctaaaacataaagtttaattgaagccttggaacctttaaaatgctttgaaaagtttagtttacaaagacacaaagagatttgttatgtgactaagctatcacattaaggcactaatattattatactattagtagtattattattagtattgttactattagcactattatgattatactaatattactaatattatattaataatataatatataattatatattatatattattatatataaaataatatatattatattattatatatattttatattatatattatatatataatatataatatattatatattatatatataatatataatatattatataatatatataatatataagatattatataatatatataatatataatatattatacactatatattattatattattatattatattatattatatatagtattatatatagtatatatgatataataatataataatatatagtatattatatattatttatagtatatatagtatataatatatagtatatattatatagagtattatatatagtatataatatatactatatattatatatagtattatatatagtatataatatatagtatatattatattatatatagtatattattatatatagtgtgtaatatatagtatatatagtatataatatatatgctgtatattatatagtatatatagtatataatatatatgctgtatattatataatatacatagtatatattatattataattatatattatatattatttatattataattatatattatatattatatatattatataatatatagtatatatagtatataatgatatatactatatataagcaagtttaacatctcaaaatattttatatgtagtatatatattattatatattatatataataataatatattactatgttatactaatatactaataatactaatattattatactaataactaatacttcttataagcaggtaatctcactacctagcatgcaaccctatcatcctatgtcctttcccagaggtccccatgagtggtgttggacttagtagagaagacacttaatacaaatttcctgggtctaccttagtgtgtgtctgggaaagacttggcaaagtgttttactaaccttcccaggtactttgggagctgctgtcctgtcactactgaacatctcatcatactcttgagcataccgtctcgctactgcctgccttttgtattaggtatttattgtaagtaaccgagagataatttaaagtatgtgagaggatgtgcacatgttatgtataaatacttgagcattctcaaacttggtatctgtgaggggtcctggaaccaatcgcatggatattgaaggatgactgtaaaaatactgtgttgtagaatagtttatttccttacatgtactgtcttttccacttgtaggtgagcttctcttgggttgggaagggctgcttctagagtatgcagggtcctaggtaaacatttttttatggcctctggcaataaaaacaatttgactcacccaattcagcaaattagcaccattttggtggcccattctcacataatttcaagaaaagaagtactatgctggccagcaggaggcatccacttcccaggtcatcagtctggaactgggctcagacacagggctccctaagcgtgagtctggagctcctaaggcatctgtttgtccccactgaagactagcaggtgacagtgcaaagtagagtctaaggatggtaatggcatgaaagacacctttttctatcaatgaactgaatccaactttatatcactaatgttgactaaaactattccacagccatctctgaatgttctcaggcacagcatctaggaaacattgcctcagcctcccaagtaactgggattacaggtgcccgtcaccatgcccggctaagttttttgtattttttttttagtagagatggagtttcactatgttggccaggctggtcttgaactcttgacctcatgatctgcttgcctcagcctcccaaagtgctcagattacaggcgtgagccactgcgcccagctgataaagagtatttttattagttaatagatttcatggatttttgtttgtttaatattacatagagtcttctatctctgtgtgttggaatttttttcaatggaatctagtattgacaaattaagattgtcttgtaaaaaataaagtctttggttatacaagtgacataaaatatagtggctaaacttactacataagaaatgttataaacattccaattaaggatttctaaggtaagattaatagattgaattatttaaatgttcatttaaaaatgcttactatatatctccaaatttggtagtagcttttatggtgagaataaaatggataatatctaactttaattttaaaaaccctcagaaacaaatataattatgtttccaattatgttagtaaaataggataatgaatagataatggtatatttctgaccacatctgggtatggatgaaaacaatctctcaggttcatctagaaattacaatgtcatgcaattattcattttaaaagctactaattaataaatttaatatgcataaatataaagccataagaataaacatgtaaacatgtattttgctaaggaaacaagtataggtttggcttcctaacttgaaggactaaaaaaattcacaggagaatcaaggtacttcacttggacaagcaactttgcccggtgagattagactagcccagtgatttccagccggtgttttcagactcttggaatgtgttgtaataaggctaatatattgggatttagctgagctgtcaaccaaggctagcttagggtgccctttgatgtgccctgaaagcactcagtgcttagctctctttacagcacttaatgccgtgtgttgcaatttcctgcttaacttgtctgtctccaccagtggactgggaatttttgtagagcagaatttattttatctctagcatttaacatctaacagtacactgtatatgcctacaaactgttcactgaatgaataaaagtcatttgtttaactcttttatttgatgcatagatcttcttgtaatatcccagataacagttacccctgactttttgatcactctgattatagtatgcttttctgcccttgctaattgtaagttcttcttcattgatctgaaatctattactttattaattgtacactttggtcttttttacttttgagaaataagaaggaaaaacaaattctttagataaaagagataactttataaatctgaaggaacatggaaaatcttcagatttattctccttagtttgcagatgagattcagtgagattggagttttgtgtaagggacagtaacaagagtataatcccagaccatatacatcattggctgggtcgtctggcccttctattttatcctcaaatgactgaagtaaactattttacttcctctaagtctttccaatatgttttcatgttctgacctaaaagcaatactctgatctaataagtttaagaaaatatttaagtttaatcaggtttcttgaatttaatacttctcagagacttttatacattaatgtaccctgtgactttttaaggaatggttatagtatttttagtaatagaaactaatatttcaaggaattaattttcaaataatacactttggaaattgtggctctattctaaacatactccatttttccaggtgttctttcgatgaagtaatttgcagacatcccatgactaattttggcatgttcaaaactatataggaaagtgtatgcagacatagaagaacactaataaaggcccaataaaatattggaaaggcccctctaactataatttcacactatgtagccatctgggattctatcatttagttattcatgtggacaaataaaggttttcttttttaacacttgaaaacagtgagactgacctcttcttttttctctcaaatttatgaaattataattgaagtacactaattatacacatgtatacaatttgattggttttgatacatacatatatacacatacatacacaatagtggaaccatcatcaaaagttagatgataaatatttttattatcacagaatatttttgtgctcttttataacgcatcttgccctctacccctcctagcaactgatctgctttctatcactgaagaatagtgtgaattttctggaatgttatatacaaggaatcatagaatttgtactttttcaggactggagtggtttagcttcttttattcagtctaacaattttgtgattcatgtatattgttgcttatctatcaacactttattttttttttattgctgattaattttccaggtacagataagtaccacaattgtttatccattaatctgttgatgaatatcagagtcgtttatagactttgactgttaaaaataagtagctatgaacattcttaaacaagtctttgcatggatatatgtttgtttcttttgggtaaacacttggaagtgcaatggctgggttactttgcaggcatgctatttttccaaaatagtgtatttttcatgctgctagttctttagagtgaactagactagttatcttacccatctcttacaactgggaagtaagcactcactgtaggaaatggaaaaatcatgaaaaaggaagtacttttcctctaggaaggaagcgtaaagaagaaatgatttggattaggtacattagggaagggcaccttttgttaggcttctaaaactgtctactgggaaagtgaggaggtgcgagtactcaagtgctgagaacccatagactaattctcttatttttcatgtggtgctttataagtgaaatttgtttctactgtactgagatttcgaatgctgttattttccagtgattctaactctggaatcctaatgatacacacctgtgttgctcttacattgtacacaaggtgtctgcttctgctggtggctcatagtctatgacagaccttctatttcatagtagttttcttgacaaggaaagaagcagaggaatgtcacttttccagatggaattgtcccaatagcttttctttgtagtctgatttaagattatctcagatgggatattcaggacttactgttgcttgtgagagtaaacaaatgtaacttattgacaggatatttaattttgtaataatacaatactaaaggagaccattgacactttagctgtttaggatattgtttttcagttagctattcattttggacatgctatatgtgctaatgttggatttgtagcaatctatcctgccattataattttgacaatatatttgcacattttattattttaaaaaaacaaatgttatgccatatctgaagcacttgatttcaacatatttttcatactaaggagaaatatgtctgcaagtatttttaaaacatcaacattgtagtttattctagaaacctccaatttttgttctgtgttttgtgatttttgaaaacactttaggctttattttttgtttaaaattattctagttagtgaagcctaaaagcagttaattgaaattgaaactgaaggcactgcttagtttcataagaggaaggagagcatgagggagatttagtactatggtgtttaaaaccaaaacagaaagagtgctgaaagttaaccctgtcctgttgcattaattactgatgtttagtgtatacttttagaagtaagtacctatttgccattctgagtagaatatttgggaattaaaaaaaatggaatattctgtaaaatagataaaagatcctgattggtctaaacgactttgaaactgtactgattttaataagttctggtgttctgtaccactgtagaatgactatagtaagcaataatgtattatatgctttcaaatagctagaagaaggatattgaatgttcccaacacaaagtaataataaatgtttgagatgatggatggatatgctaattactctgatctgatcacttttactttatatgtatggaaacatcactatgtactccatagctatgtataattattatctgtcaatcaaaaattaatttaaaaaattaaaaagtaaagggcttgtttgagggagaacatacatgtagatgtgggatttgaattaggcttcccacagaacagcacagtatttcggattctaatataatcattttttgtatttttttctcactatgatttaagtaaaaacctacttgtatacatttttatagttcctggcctgacaggggtctgcatggtggtggtgctattcctcatgatcacagcctctacatatgcaataaggtaagtgtcagaatcaattattttgatgtgtatctgtcaggttatttagaaaaagtcttgagtaatcaaaatgtttaaccattgtagtgtcctggttaatggactattctgggtaagtaagagtgaagtatagctgtttctatacatgacttcttgtttctgaaagttctcttgtattagcaaattttctggattggtaagaaattgtgtatggagactgcatttgatgatcaaaagaattagagttcttcagaatttgagtatcttttgaaggatagtgtatctctatgggacacgggattgaaatcaatgtgtacatatggggaccttagaaattcctaggaatatgtgacttaaaattattttattttattatttcattatttttaagatttaacattgtgattttattttattttatttatttttttattattatactttaagttctagggtacatgtgcataatgtgcaggtttgttacatatgtatacatgtgccatgttggtgtgccgcacccattaactcatcatttacattaggtatatctcctaatgctgtccctccccctctcccaaccccacaacaggccccggtgtgtgatgttccccttcctgtgtccaagtgttctcattgttcagttctcacctatgagtgagaacatgtggtgtatagttttttgtccttgcgatagtttgctgagaatgttggtttccagcttcatccatgtccctaaaaaggacatgaactcatccttttttatggctgcatagtaatccatggtgtatatgtgccacatattcttaatccagtctatcattgatggacatttgggttggttccaagtctttgctattgtgaatagtgccgcaataaacatacgtgtgcctgtgtctttatagcagcatgatttataatcctttgggtatatacccagtaatgggatggctgggtcaaatggtatttctagttctagatccctgaggaatcgccacactgtcttccacaatgattgaattagtttacagtcccaccaacagtgtaaaagtgttcctgtttctccacatcctctccagcacctgttgtttcctgactttttaatgatcaccattctaactggtgtgaaatggtatctcattgtggttttgatttgcatttctctgatggccagtgatgatgagcattttttcatgtgtcttttggctgcataaatgtcttcttttgagaggtgtctgttcatatcctttgcctactttttgatggggttgtttgtttttttcttgtaagtttgagttttttgtagattctggatattagccctttgtcagataggtagactgcaaaaattttctcccattctgtaggttgcctgttcactctgatggtagtttcttttgctgtgcagaagctctttagtttaattagatcccattttcaattttggcttttgttgccattgcttttggtgttttagacatgaagtccttgctcatgtgtatgtcctgaatggtattgcctaggttttcttctagggttttgatggttttaggtctaacatttaagtctttaatccatcttgaattaatttttgtataaggtgtaaggaagggatccagtttcagctttctacatacaactagccagttttcccagcaccatttattaaatagggaattctttccccatttcttgtttttgtcaggtttgtcaaagatcagatgattgtagatgtgtggtattatttctgagggctctgttctgttccattggtctatatctctgttttggtagcagtaccatgctgctttggttactgcagccttgtagtattgtttgaagtcaggtagcgtgatgcctccagctttgttcttttggcttaggattgtcttggcaatgcaggctcttttttggttccatatgaactttaaagtagttttttccaattctgtgaagaaagtcattggtagcttgatgaggatgcaactgaatctataaattaccttgggcagtatggccattttcacgatattgattcttcctatccctgagcatggaatgttcttccatttgtttgtgtcctcttttatttcgttgagcagtggtatgtagttctccttgaagaagtccttcacatcccttgtaagttggattcctaggtattttattctctttgaagcaattgtgaatgggagttcactcatgatttggctctctgtttgtctgttattggtgtataagaatgcttgtgatttttgcacattgattttgtatcctgagactttgctgaagttgcttatcaccttaaggagattttgggctgagatgatagggttttctaaatgtacaatcctttcatctgcaaacagggacgatttgacttccttttttcctaattgaatatcctttatttctttctcctgcctgattgccctggccagaacttccaacactatgttgaataggaggggtgagagaggacatccctgtcttgtgccagttttcaaagggaatgcttccagtttttgcccattcagcatgatattggctgtgggtttgtcataaatagctcttattattttgacatatgtcccatcaatccctaatttattgagagtttttagcatgaagggttgttgaattttgtcaaaggccttttctgcatctatggagataatcatgtggtttttgtctttggttctgtttatatgctggattacatgcattgattgcatgtgttgaaccagctttgcatcccagggatgaagcccacttcatcatgttggataagctttttgatgtgctgctggattcggtttgccagtattttattgaggatttttccatcgatgttcatcaaggatattggtctaaaattctctttttttgttgtgtctctgccaggctttggtattaggatgatgctggccttataaaatgagttagggaggattccctctttttctattgattggaatagtttcagaaggaatggtatgagctcctccttgtacctctggtagaattcggctgtgaatccatctggtccttttttggttggtaggctattaattattgcctcaatttcagagcctgttattggtctattcagggattcatcttcttcctggtttagtcttgggagggtgtatgtttccagaagtttatccatttcttctagattttctagtttatttgcgtagaggtgtttatagtattctctgatggtagtttatatttctgtgcgatcggtgttgatatcccctgtatcattttttattgcatctatttgattcttctctcttttcttctttattagtcttgctagcggtctatcaattttgttgatcttttcaaaaaaccagcttctgcattcattgattttttgaagggttttttgtgtctctgtctccttcagttcttctctgatcttagttatttcttgccttctgctagcttttgaatgtgtttgctcttgcttctctagttcttttaattgtgatattagggtgtcaattttagatctttcctgctttctcttgtggacatttagtgctataaattttcctctacacactgctttaaatgtgtcccagagattctggtatgttgtgtcttttttctcattgttttcaaagaatatctttatttctgccttcattttgttatgtacccagtagtcattcaggagcaggttgttcagtttccatgcagttgagcggttttgagtgagttcttaatcctgagttctagtttgattgcactgtagtgtgagagataggtataatttctgttcttttacatttgctgaggagtgctttgcttccaactatgtggtcaattttggaataagtgcgatgtggttctgagaagaatgtgtattctgctgattggagtggagagttctgtaggtgtctattaggtccgcttggtgcagagctgagttcaattcctggatatccttgttaactttctgtctcgttgatctgtctaatgttgacagtggggtgttatagtctcccattattattgtgtggttgtctaagtctctttgtaggtctctaaggacttgctttatgaatctgggtgctcctgtattgggtgcatatatatttaggatagttagctcttcttgttgaattgatccctttaccattatgtaatggccttctttgtctgttttgatctttgttggtttaaagtctgttttatcagagactaggattgcaacccctgcctttttttgttttccatttgcttggtagatcttcctccatccctttattttgagcctatgtgtgtctgcatgtgagatgggtttcctgaatacagcacactgatgggtcttgactctatccagtttgccagtctgtgcattttaattggaacatttagtctatttacatttaaggttaatattgttatgtgtgaatttgatcctgtcattatgatgttagctggttattttgctcattagttgatgcagtttcttctagcatcgatggtctttacaatttggtgtgtttctgctgtggctggtaccggttgttcctttccatgtttagtgcttccttcaggagctcttttaggggaggcctggtggtgccaaaatctctcagcatttgcttgtctgtaaaggattttgtttctccttcacttatgaagcttagtttggttggatatgaaattctgggttgaaaattcttttctttaagaatgttgaatgttggccctcactctcttctggcttgtagagtttctgctgagagatcagctgttagtctgatgggcttccgtttgtgggcaaccccacctttctctctggctgcccttaacattttttcctttatttcaactttggtgaatctgacaattatgtgtctttgagttggtcttctcgaggagtatctttgtggcgttctctgtatttcctgaatttgaatattggcctgccttactaggttggggaagttctcctggataatatcttgcatggtgttttccaacttggttccattctcgccgtcactttcaggtacgccaatcagacgtagttttggtcttctcacatagtcccataattcttggaggctttgttcatttctttttactcttttctctctaaactcttctcacttcatttcattcatttgatcttcaatcactgataccctttcttccagttgattgaatcggctactgaagcttgtcattcgtcacgtagttctcgtgccatggttttcagctccatcaggtcatttaaggacttctctacactggttattctagttagccattcgtctaattttttttcaaggtttttagcttctttgcaatgggttcgaacttcctcctttagctcagagaagtttgatcatctgaagccttcttctctcaactcgtcaaaatcattctttgtgcagctttgttccattgctagtgaggagctgcgttcctttggagggggagaggcgctctgatttttagaattttcagcttttctgctctgtttttttccccatctttgtggttttatctgtctttggtctttgatgatggtgacatgcgaatgaggttttggtgtggatgtcttttctgtttgttagttttccttctaacagtcaggaccctcagctgcaggtctgttggagtttgctggaggtccactccagatgctgtttgcctgggtatcagcagtgcaggctgcagaacagtgaatattgctgaatagcaaatgttgctgcctgatcattcctctggaagctttgtctcagaggggtactcggccctgtggggtgtcagtctgcccctactggggagtgcctcctagttaggctactcgggggtcagggacctacttgaggaggcagtctgtccgttctcagatctcaaattccatgctgggagaaccactactctcttcaaagctgtcagacagggatatttaagtctgcagaggtttctgctgccttttgttcggctatgccctgccccccgaggtggagtctacagaggcaggcagtcctcattgagctgtggtgggctccacccagtttgagcatccaggccactttgtttacctactcaagcttcagcaatggtgggcgcccctccccaagccttgctgctgccttgcatttcgatctcagactgctgtgctagcaacgagtgaggttctgagggtgtgggaccctctgagacatgcgtgggatataatctcctggtgtgccgtttgctaagaccattggaaaagcacagtattagggtaggagtgacccaattttccaggtgccatctgtcacagcttcccttggctagccaagggaattccttgaccccttgcgcttcccaggtgaggcgatgcctcaccctgcttcagctcatgctcggtgggctgtacccactgtcctgtacccactgtctgacaagccctagtgagatgaacccagtacctcagttggaaatgcagaaatcacccttctctgcgttgctcacactgagagctgtagactggagctgttcctatttggccattttggaacctttgttaaaattattttaaagctattttcctgatatgagtttgtcttgctgtaaattaacatgatgttctatacaaaactttggagaaattgtttgtttgcatctgctaaaataacaaattatctgcattcatattgattcttatagttaagagattttgagcaaaatcagatacacattatcaggagcactttcacatgtcctttctaatggacacattcagtttttcagaatatttatagtgttgatgcttctgaacaaactttttagttaaagaaagcaaaaaaaggaatataagatatatttcctctaatcttcaagaatctccaattgttctacttgttcagatgtgaaatttaacagaaacacagatatatatatatgtatatatgctttgaaagtaattgccaaataatatacttaaatgaaactgtctttatagtttttaacctttgtgcacacacatacatacaccctaaaatttcacaagtctactcactacccaaagattaatactgtacatatgtagtgtatttttatagattaaatccttcttgctcttcttcactaattcccctcctcctacccccaaatcattttttctctcttatatacatatgtattttaccaaaataggaccatattagagtattacttttaatttactttttgcctaaatttatattatgaacatttttacgttaataaatattctgttattattctctttactgatggcacagcacatcgcaatataggtttttatacattattttcccagacccatattactaaatgttttgggtagattttgttttgtttttttttttttttggtatttcaattttgaaacaaacacccccatccatatgtctttgcatgctttttcaatgatgtcctaaggaaaaattcttagatgtagaatagctgagtcaaattgtaagaacacttttaaagcttttcataagaatgaaaaattggtgtacagaaaggcaactcactaacatcagtacatgagggtgccaattttgtggggagcaattttattttatttagatagaggaatcattaaaaaacctcactttttcaattttaggaattcttgaaggaaaattagagcatctgacatacttattttaaaatccttgaggtatagttttgtcaaatggaataaaaagatcagcttcaatcctgagcttttatatttgctctcataaacaatttaagcccttcctaatcttcagtgttttttatgctttgtttaaaatttgtttaaacaagattataacacctagtttgcttttctgttttattgttagaatcatgaaattcttaaatgaatcatggagacagatatctcttttattttaccttttctttttaccagtaagaaactaaagcactagacaaatcaagtgaatgaataagtccccagtgtttgatttctgatagtgaaatgtagcctcctaattcaaggagagttcaatatgggtcaatctgttaaaataattaatgtatcccgttattagatgacaggaataaattttctcatctcaattgattttaaaatggcacttactaatatgaactcaaattttgacttaaaataatcagagtaaataagctaaaaattaaaattatttacattgtagaattaaaaaatataaaagccagtattggggttatactcaagagtgaaacactagatgtattcctaagaaaatcaggaaaaaagcaaaagtatttttaattctatcaatatttacatatagtaaaaaatgaaacatttggaattattagaaaaagtgcaacaataaaataccattatttccagaaaaagtagatatatctactttttctggaaataatggtaattattaggtttctaagagaatccaagagaattacggaaaaatttggtgttaacaccaagtaaaagagttgaaaaggtaattggatataaatcaaatataaaaataatccttttattaactataattagtttgaaaaattgaataaaataaaaatataccacttacgattgcagcaaaacatataatatctggagacaaaagatatatgttcactaagagaaatatgtagagatttgaataaagactgtgtactataaagatatagttcttccttaattattatatatatatttttttgagacagggtctttctctctcatccaggctggaatacagtgataagattacagctcaatgcagccgcaaccttgacctcccaggctcaagtgatcctcccacttcagcctccctagtagctaggatcacgaacacacaccaccatgcctaattttattttttttaattgtatttattttttcgtaaggtcaaggtttcaatatgttttccaggctggtctcagactcctgggctcaagtactccttccacctctgcctttcaaagtgttggattacaggcattagccaccatgcctgacccctcaatatatatatatatttttaaggagtgttgcaatttcaacaacgttctcagacaggttattttgtttgttttttttaatttagcaaagtgattccaaagtttgtctggggtacatccaagtacatatttcaaaagaggagtaaaaggagggatgtgccttactaaacattaaaataattaaacttcagtaacttaaaagagaatgggacttacttgcaaaaatgactaacacattgaaccaagggacaaagtcagtaaaaagccctgtaaatgaccttgcaatatataagaacctgcagataataaaggtggcattacaagcttatgaggaaagtaaagtttaagcaaatgtaggtctatctaaattacacatatgaattaaaaatactctatagaaatgggtaatgattataaacagaaaggtcacagaagaattaaaagtaacagacatatgaaataataccccatcctacttataaaaaataatgaaaatttacaaaatttagtctgagtttttgggaaacaggcactcctagcctacagttgggtttgtaattaataaatacatttttagagggcaattggcagcgtgtattaaaagcattaaaaaggtgtatcccttaattttgcagttcaaattctaatggttttgatttaaagaaggatcagagggccaagcatggtggctcacacctgtaatcccagcactttgggagactgacgcaggtggatcacgaggtcaggagttcgagaccagcctggccaacatggtgaaaccccatctctaccaagaatgcaaatattagctggtcatggtggcgagtgcctgtaatcccagctgctcaggaggctgaggcaggagaatcacttgaaactggaaggtggaggttgcagtgagctgagattgcaccactgcactccagcctaggcgacagagcaagactgcatctcaaaaaaaaaaaaaaaaaaaaaatcagaactttgtatatgttacaagggatggtaatgatactgtttatgataccaaatactatgagtggagtaaatgtaaagcaattgcttgctgcttaagtaagggtttctctaagagtctatgggaagcatcagattcatctaggaagcttttgtaaatatctgccctctaattccaatattctaatatataaaatccacccaggatatatgaaataaaataactgtttctcttttacttctctcaaacattctgtagattatgcttatcattctctgtcttttcagtgtctttgtcctcccccagagcaataacattgaggtatcattcttgttacactgtccaggaaaaaatataacactttggtcgtcatctatttcatttatctctttttgagtttcccttgaactactctcaaaatatgtattgaaagaggagctttggttgttttggaaattatttgaaaactgagaatattgataaaataatagccaaagtacatattagcagactactatctgcttcttagccttatatcataataacttgaaaataaacaacttatttttattatttccatgtgtctttatttgaaatacaaagaacttacaaaatgataaaatcttactcataatttttgtcatttctctctatatactgtgttaatactttggtattagtagattaatatgatgtactcatgttttagcttttttaaattgtgagatgtttgaaatgatacatggtatttttgatatttttagtaagatggaatgtaaagtagcattaaaatgagtgtatttgtttttgcagagtttctaactatgatatcttctggtatactcataacctcttctttgtcttctacatgctgctgacgttgcatgtttcagggtaagtttacaaatgtatgtatttaaaaccatttgtgccccaaaatggggtaatgaaagaaaactctataggaaatttcataggaggtggtaaaagtgtcaagagtgaaagaaatagtttctctactattgaggataacgtcaagaatggaagaaatagttttatttttagcatagcatattgtaatgaaaccagtataaagtatactaaatttaaaagctagaattacctctccaacaacctttcagtttctaaatcttcctatggatatatcctaatatcttctaaatgaaaaaatttaagaatgaagaacatcaggaatatattttagtatttgtatttcctgaaactgtcctgctaaagcaagatttataataatggaatttccagtttttcattttaaaagttctacaggaagtaatacttgcagagagagccaaagatttaaaataaccaaagaaaaggatctgtcaaaatcaccaaggaaaaaaaacataaagtgaaaaaataatgtatcctaagcttattacaaagagtatacctaaagtattccaaaaatatgtgtacccaagcagtatactcaaaaacatggtgcttaaaacaatacatgaagatagatgaagaaaataatgtatttttgtacatgcatatgtctgtatggccaccggcagtgaacttgatggctttggcgtgacattcacacctgcatgacataataagtctggcagcagttttacttggtttggcaagatacagggcaggacacacagaatgtcaacaggataatgtcaggtgcttattaagtagaaatccctatatttgctcagaagcatttacccccactccttcatgtagcaactctaagataagaaacccatgtgggtaagcatggtctaccttgcattgggtaaggctcattcgtactccacaggaacctgtatcttgggaacagcataggtcccctcaagggatgcccttgggatcaagaacacactgtacacaaggaggctgaggtctgtgaggtccaaaatgatttcatagttcaatcacagtcctttctgtccagatgcatttcaccgataataaacaatgttgctggtaacacagctgacaatccctatttttcttaacctgaaatatttccagggaaacagtttgaagaaaggttcagacctttgtttagttctttcttcagaatgttttataatgtaatttatcagtacagtgggtcatttacattgatcatatatttatttcagggtacatattcaaactgttgctttggcttttttccacctgattttagagactgctgattaagacagcagtatcaaatatcccatatgtcctggttagctttgttcagtaccaaggttccagaacacatagttgtagagcactggaaacatggccacacattataactaattctctggagcctcagggcaccgagaaagcccttggtagataaaagactgctttacattctgctctttaaatgggattggttacctgtccagggctatgctcctgaagaggactatgaataaccagatacaactaatgataataacagtaatctaaaatagttacataatgcttactctatgctaagtataaattcaaaatgcttcacatactttatgttattaaatgctcagaatgttatgagaataaataatattgttaaacctctttcagaagtgggaacactgatgtttagaaagattaagcagcttgttgaagtttacttaactgatggatcctagattcaaacctaggcattctgattcagaaactcctaagtttttactacaaggctttatttttttggagaggtctgtacttctgagaatttgatgttagtatttgtttaaatgcctttatctttactgctttgagattgtgatctgtctattcatctatgtccctatatcagatagatatagaaaataaaaatgcaatcatttattagtataattatatattattttgcctttatgttttactaaattaaaactctgaaaaaaaactatttctttgtaaatcaaaatagtgtcaattttttgttaaaggatcagcatttcaaacagacttctttttaaagaggaggattacattgagagttctttacttttttggaagtaaaaggaatgcatatttaaattttgatttttacttttatagaacaagtgtcatagaaagtgactttaatttatacagagaaatagtaggcatctataggatgaattatatataatcaatcaattattaaactaaattaatatgtatttattcattataggtagaaatgaagaaagcaattattctaattttgaaatatgtcatgcaacccatacataatacaataagcattctacagtgcacattttttccaggaaatttaatagatatgcttctggtatgagaaatgttactactgataacattttaccattttctcaaaattaaaaaaaaactatactgatgaaggattggcttataattaagtctatttatttgtgcaaatgttggaaacagacatattttaacttctgaaatacctagataactttgttcttcaacttttggttatacaaataaagtacaattgttcaaagtaaatttcttggatttatattgaaatttctgttcaacagtatgctttaggtctgaacagaaaatcactatttgcttagcattagcttctctgtccatcaatgtggtaagtaccataaggtaaagaagagcaatatattgcatgatgtctagtcatccagcattgatcattgatttggaattttgaaaaatcaattggaaaagctagacatattataaaactgcatatttttaaaatgtaaacattcatgtgttatttacatgaatgctagcaattcagagaattatcagtgtgggctagaaattctagaaaatattaggcttcaaagatgaggtgatgagacattgttgactggtttttctacctaagcagacttttacagtaagagcatttgcttcatatgattttctaaggtcatttttttcatagaatcttaaattttaaaggaagctgaaaagatatcttgatcaagcctcttttaagctcctctgcaatttatctactaagtcaatgcctaattttgaagatgtccattctgtcttaggggaagttctaattctcacaatgttctttcgtttttggttggaattattttactgtaatttctgtctagctatttaaaagtctgtgattctggaggccatggaagttaagtcgcccacttttctaaattctattcatctgtttctcacgttgtgatatttcagatctcaattttctgaactgtctcttcgaatatattaacaattaatattaattgaatgcttctcttttactaacatttgctctcattaaatcctcctaacaaccctgtaaatttattattattattattattattattattattattattattctcaatgttcagctgagagaataggagcagtgagagataagttgctgagggccatggctagtaagtagatttccagtttgaacccaggtatcaggtaccaaaattaacattcttaaccactaagttatgctggcccccatttggcaacacttctctgtatcccttttaaaacttacaccaaactaaatgttcttggagtatgtgatctgattttggcagagtgaaagtctcactttcttcactacaaacattgcaatcggtattatttaggacccaaattttttgttctatgattatctgtgcccttggcttaacctggttttcattcttgttgtatattttagcgattttcttcattttttataaataaatctgttgcatgccaccctaaaaagatgacatttcatgtacactaaactagatgtttctttttagtgttaaaatacatctttaaaatacattaattttcttctccaagatgttagtatattatagaagttaaaagatacatcacttaatacccgtatgaacttggcagataatttgtccttgctttttgttagcaattaaatgggattaataaaatcacttatatcatagtgttgtcttgggtttaaagtaatgcagcaaagtaggcagaatatagacatacttaataaatgttagtaagaacaaattatactagtaccaatacttatagctttgtaagaatgacactccacatttaactttgaaaaatcaggttttttgataaagacacaacacttttgaaaaacccagattttcttatcaacaaagtaatttgatgaacatagtgaaaactacttagcagctcaaaggaatattccttgatatggcaacaattataatattctaagatctctaacattctattgatttttagcaataaaggtttatctttgcaaaacaagccttcctcctgaggaattttttgttttgatttttaatatacctttttgggaggttgctattggtgtgcttaggaatttaaaggtattcaattcctaagatacctggtgaaaacaaaacaaaacaaaaccatttcctctttccaaacatgtatagaactggatatctctttcctcattttcttttgaaaaactcagaaggagatgcatactgctattctcacttactgataaaaagagtattggagggaaaataaattacgaatgtcacagtctctgcttaagagcccaacccagctcctttcgaagaaatgtggagggaatgcattgtaaatgagatttggcaccttagcttctgcagtcttaccatagtcaacactcccactggctttagcttggagagtgctgtgtgggtggtgattgtattttatgtctttatttaactgagtgagagagactataatgtgataattctggaaatgatagaggggaaggtcctcctcaaatgtttggatgacaatgacagcacattaaaagtgtaaatatttttttgtgctagctctgctgcacttctcagatctttttattatatgaatgatacctgaattattcttttaagcagaactctttgccatttggcactacttgttagcaagagttaatcatagagcatgatttatattctacttgaatcattttttttctaggaaatctaaaaggagtatttttatgtgcatgtttttaaaaacatttattctttatgccaggggagcacagtgggcaggctttgtcaacagtgacattaatgaacccccggcagtgtcataggcggatagtttaacagggagcatcacaggagtttagactcaagatgttaaccagggttagacagatattgtgggggtcggcttattgtgctgactggaaaataacctccctctattatggcctcgggcctcaggaggaggacattaaggatatactgttagaggatagagatatttgtgcaatatagtgaagtgttaaggactgctgatacccaagtatcttcccttttagaagccactttcgtggaagtcttccttcacccacactgatgtggcagagggaaaagcttggtcatcttgctactggtgggaggcacttgctcctcttagaaagtcaaattgcattttgaatggaaggcccacaagttgtattttaaacaatcctattctagtactgagggagaaaatttttactttcctctatgttcttttcagtttcccatttcttgcctgtacatttgcagtgactttgtaatttattgtccaaaccagatacttttgagaatgaatggggatgctattgataattcagcagtggctatagaaaaaccaggtcatacaggtattctacctactcctaggcagtggggaaagttttaagagaggctaatgcactgttttaatgtagactttgagctagagccacaaaaggagtccttaccttgaataggggctctgtgtgtgtatttgagaaacagaaccttcaaataatacacactgtaggtttgcctagctttgtctcactttagagattgtaattagatgtccactaccatggtcattagaaggctgaggatttggttgttcatgacagtgggtaaaatcttttataaactctctgtcactgatatagatgacctgttctaatacttcctagatgcctagtttctaatgagtctggcatactcgttatcagtttggtgcccattacttctatcacaaaattctacttctctttccataggataggggtttttaacatggctccataatccctaggactaattgaatggattcagggattcattaattcctgaaatacatacacacacgtatctgcatatttatgtataagtttaattttgagacacatatgtatatttttgtataaaacaagtttctcaactttcattagataccgtaaagtttgtgtggtcaaaaacgtttcaaaaaatatggaactgaagtttttaaagctagattttaaccaaagagctgtaatatctaatatcacattgacacattttatatagcctacttcagttttatttagagttagaatcactgcattgtgggaaaaataaaagccactggggcattttttttcttccatgaaggctactggaaaaagaacttgacaaatataatgaacaacttaacaactgcattatcattttagaggataataattatactgttcataataattctctagttttagataatgttgactatgtgacagggactattcttagcactttacacacacacacacattaattttttgtttgtttttaatatgcacagtactataagttcttctatcatttctattttacagatggggaattgaagcatgaaagattaaattaagtaactgtctaaagtcacacagctaataactgaaaaaactaagattgagcccatgaagtttgacccctgaatttaacttctacccttttcttgaattattgaattatttatttgtcatttagaaagtactcttgcttatgaatgaaaaatatttatgtattgtaaaaatctaggatatatttttctattcgtccatgtaagttggtgagtatatatacatatatgtttgcctgttttgaatcagaagttcaattttgattcagggtacatagagttcaaggttttgaaggtgaaatctaactagctcccagaaaatggagtaagaagaaaatggcttctttatggtgctgcctgataaatgtttcctaaaatgtttgaccttgttaagatacataataatatgataactctataatataatgtaatcattttataataaatctaataataaaataaaaaaaatgtgatactttacttgccagaattcttccatgtaacctgaaaataacaatgaagaagactaggatttagactggagcagataaaaatgctgtggaagagatattcttatcagtattttattgccagtgtgtctttataaaaggattaagtcaaaacatagcaaagaaagcaatggggaaaatatattattcatcatatagaaaaatcaattaagtccacagatttccaaaacccataccttttagaattttgctatgaattttctctaaatattagattacccatccagttattattcaaatgtgtgggatgaatttgataatggaattccaaagtaaatacataaacgaacccaagtaagcatgcaatttgtgaattaccatagttttgctatcccacacattttggtattttgactttaaaaatagtgaaacaaatgccctgggttataatagtgaagaaagaggattgattcctagaagatcactaatcttagacaaatcagttttttatagagcttcctgatttgtgcaataaagaaaaataattgtatctcccagacctattagaagagaaatattagctatcatacataaaattgacactatacacacacatatacatatatacacatatatttttattgttgtctatgtaatgttctccatttaaaaaacttttctatttttaatttttatgaatacatagtaggcatatatgtttatgggatacatgagatattttgatacaggcatacaatgtgtaatgatcacatttgcataaatgagatattcataatctcaaatatttatcttttctttgtgttacatacaaattgtactgttttcattattttttaatgtacattattgttgactctagtcatctaattatatttttataaccaatactcatccccacttctccccctctcattcgcagcctctggtaatcgtcattctactctctatcttcacgagttcagttttcatttttagctcccacaaataagtgagaacgtgtgaaatttgtctttctgtgccttgcttatttcacttaacacaatgacctcagttccacccacgtcgttgaaaatgagaggatctcctttttgtggctgaatagtacaccgttgttatatgtagcacattttctttatccattcatctgttgatggacacttaggttgcttcaaaatcttggctattgtgaatagtgctacaataaacatgcaagtgcaggtatctcttcaatatactgatttcttttcttttgggtatatacctaccaataggattgctgggtcatatggtagttctgtttttagtcttttgaggaacctccaaacttttctcccataagggttatgctaacttacattcccaccaacagtgtatatgagggttcccttttctccacattctcaccagtattggttgttgcctgtgttttcaatataagccattttaactgtggtgagataatatcgcattgtagttttactttgcatttatctgatgatgtgatgttgagcaccttttcatatacctgtttgctatttgtatgtcttttgagatatgtcaatttagatattgtgcccatttttaaatctgattattagatttttttcttacataactatttgagttatttatatattttggttactaatctcttgtcagatggatagtttgcaaatattttcccccattctttgggttagatctttactttgttgatgtatgctttgctgtgcagaagctctttaatttgatgtaattccatttgtctatttttgctttgattgtctttgcttgtgggatattactcaagaaatctttgcccagtccaatgtcctggagagtttccccagtgttttcttttagaggtttcatagtttcaggtcttagattaagtcttcaatcaattttgatttttttaatttaggaagagatagagatctagttttattcttctggcatgttgtatttccattatcatgcatttcaaaaagttttaaaatttcctcaataatttcatcattgactcactggttatcaggagtatattgtaaaatttctgtgtatttgtatagtttccaaaattcctcttattgatttctagttctgttccattgtggtcaggaaaggtgcttgatattatttcaagtttttgaatgttttgagacttttttgttacctaacatatgatccttgagaatgacccatgtgctgaggagaagaatctgtgttctgcagccattggataaaatgttctgtaaatatttattaggtccatttggtctatagtgcagattaagtctgatgtttatttcttgattttctgtctgaaagatcggtccaatgctaaaagtggaatgttgaaatctccaactattgttgtatttaagtctttctctctctttagccctaataatatttgctttacgtttttgtgtgctgcagttttgggtgtatatatatttacaattgttatctcatcttgctgaattgacccctttatcacattatgatttttttggtctcttcttatggtttttgtcttgaaatctattttgtctgatattaagtatagcttctcctcttcctttttggtttccattggcatggaatatgtttttccatctgtttattttcagtctgtgtgtatcttcataggtgaagtgtgtttcttgtaaccagcagatcattgggtctttttgtttctccattcaaccactgtaagtcttttgattggacagtttatttcattgacattctatgttattgctgataagtatggcctttcttgtaccattttcttatttgctttctgattgttttgtggtcttctctttcttctttccttccatcctgtcttccttttggtgaaggtgattttctctggggttatgttttaatttcttctttttctattttttatgtatctgttgtatgttttctgatttgtggttacaatgaggcttgcaaccaatataacccacctcaggcccacagtgaggtactgcgtagctactgcctatgttcattcaaggcccaaggactcctcagtcagcttgtagtgaatgcttccaggcttgggacttttacttcaggataatgcattcccctctggcccagggagtgtcaagaaatgtcatctgagagccagtgcctggaatcagggaaccttgcttggtgctctaccccactgtggctgaattggtatgtaacctgcaagacaaagtcccattcactcttccctttccttttcttacgcagaaggagtccctctccataacaaccacagttgggaatttgctgggtcacacctaaagccagtacatctctcagtctcacccaaggcccatggcgagtactgcgtgggtaccactgctggttattcaagggccaatggctctttagtcagaagatgattaatcttgccaggactgggtccttctcttcaaggcagcaagtttcttgcttgcccagggtgtgtctagaaatgtcatttgacagttagtgcctggaatcagggcctcaggcctctgcccagggccctatcctactgtggctgagctggcatcccagaggcaggacaaagtcctctttattcatccctctcctctcttcaagcagaaggaagaggtctctcccagaactgtgagctgtgttgcctgagcttggtagagaggtggtgcaagcactctcttggctgctctggctagtgtctcactggggcgtgtgccacccacatcactggctgtgagccctgcacagcaccaggacttgcagggaatttcagtcctttaaacctagactgcctttcaagtttatttacaatcccagagcactttagcccaaaatggcaaggcttgctgagacttaggttttgactgctagaatgggcaattcctttttggctagtactgggtctaaatgctccctctgtgggctctggctgagttcctcctggtgttgcttttcattgtgacagggcaacactgagttctcttctccctaacctccttatgtatctgcgagttccaacccaaaaaagaaaaataaaatagaacattgtgccatattctaggtaaactatagtggttctggggataggagtgtttatttcccatctttatgcagggaatccctttcacatatcactcactcagtatttactggatgaagctgaattgcattaattagtttaagctaggaatgtgttgtccttctaggctcttccaattttcctcaagtatcaaggcattacagatgacaataaaggataatctctaaatttgtttaactataacttggactgtcattttgtaactatcatttatatttagtcttatctaggtaattagttattatggcaactagtatattgattcccacgccaaaggaattagcttttaaatcttaactattttgattatattgtagactggcacatttttgttcggggtctttatgcatttctgtggctaaaaaatctgaaagaaaagaaaacccatgcctcttattttattttattttattttattttttgagacatggtctttctgtgttgctcaggctggtctcaaaagtctggcctcaagtaatcctcccagctcagcccctaagtgctgggtttacaggcatgatccagcatgctcagacccagctctcctgatttgttttatttcactttttagttcttcaatttttcacttaaatatatggggtgaaaaatattattgaataattagatctctcttagatggaatccaaattcttctcctccataatatttacatattttcaatatgttaataaatacaatgtcctatataactatgatctttaagatataaagtttttttaactttatatcttttgtttgccaacttccaattttgtttgccaacttccaactttttattcattggatttttaaattttatgtaaaaagtagtatttctctatagtaattatggactaagatcttatggtttattcacatttgttgatattttatgctgtaagccagttggcagtagggattgaggtcatgtgatatttaccccattaacgatgccttacatttctatagcttgtatgtatatatgtctgcttatatacatatagtatatacagaacatttttatgtacatgaagtcatttatgctgtaagttgtatatattaatggattttcttaaacttccaaactgcgagtttattttttccccagttttggagatagaccaaatactttttcacataatttttatctcagtttttctgcagggaacttttttatattagccagtgttcacagctggtattacaagatgagaaagttgggggaaaggaggaggaaaaagcactgtatttatttaagaaacattttcagtatagtactttctgaaacatgaaataaatattttatcctccactgtcattttagtgaagcatgaaagctgaggaaatactaagaagtaatggatgcttacctttttttttctttgcaaggggtcaaagctcttccctttttatacccgtgaagtacagaggaacaggtactatttctctttttcagttaaggaaacttagggaaatgacctattttacttcaggtactcaaggaagttgtaaatgttgatcctaagcccttaagaccctaggctatacattagtcagctgcacagagattgtggcagaatcagctacctaatttgcagggcccactgcaaaatgaaatgtgggattctttgatcaaaaaattattaagcgtttggagataatgacaacagagcagtaaaccaatagcagggtctttctaaagagcaaggtccggtgcacctgcacagattacaaacacatgatgttattcctatcttgtaagcttggaccaccccaccagtaagagctagacacaattcctgctgtggttaagctgcagatgacagtactcttagctatcaaaggcaagagccaggaaagaatgcagaggcaagaactctgttaggccagaaaaacaaagtaggggtgggagtaaaagctttggtagggtgggtacccagatacttaggatttcctgaggcacactggatctgtagtttaggaaagcactctacttctaaatgcacctagcaagtagactttactctcttgataactgtctgttacttaatgttactgtctgttacttaataactgtcatgttactacatgccatttgctaaaatatagacctcctttttgaaggttgaaaatgaggtcgaatatctgttaaaaccagatgactccccagtcaagtgtttcaacaacaatcacaacaaaagttgtttatatacttctggtcactaagttaatcaatgaatatttattgagcacttattataagtcataagcactattttaggcagtagaaaaatagcagtggagcaggataaacccttgactttaagaagtgcacattctggtggattctacagaagttagagaactgcaataaattttaaaatacacaatttggttttattgtttgaattaaactctttttctttgtacttgaagcaaaataaaaataactgtcagaatcaagatatatttttaccataaagaaaaaaaatcatattataaaatattaggaaaaaaagtaggttcctaagggataagaatttttttctcctccttcaagatagattaaaataccacaaatataaaggtcacataagtgacactcatttgtgggatatttttaacatgaaattaaagtagggatgattctggcattgtccttttgtcaggtgtggtattttgtaatatttatcttttgccataaaatcatgttttgattaccataaaatcctgttattacttagtaggattcatttaatgtattatattattttataagactttgtcacagccgggtattaaaaagaaagaaacaaacagaaagcaaaacaaacaacaaaaacaccaagatagtataattataatgcctcttgagggaaacaagggaaaaaaaagaaacctacaactttgaaacatggttgaaagtttgatagcacatgttaagatccttttgaatgcagaaacaattttgaaactccataaaatcctttatttctcatgataggagaacactagacattccacagatacttcaaaatttctccttggaacatcatataatgaaacttaaaacattaataataaacacttatatttccacatagtctgtgcacctcctttcctcatccctcaccatgtcattataacttggcaagactctctgtttaccattcactaatgtctttttcccttcttgttttttgctttaaaattatttagcatttgtttatgaaagctacaacaatacatacaagaatgctgtctttttgattcctacatgatttgctatattaaaacaaattatgtgtttattgtttgcttttaaaatcaattcactagaaatgcattagagatctattatgtgcaagaaaagtattagagggatgcagaggtttggcagtgagtatgaatgtataagggataaatgcataagacatgatcccttctacttattcaggaataaaccaagtacctttgtgcatatggcttcctcatattggaatgccattctcctattctctaacccctggaatctctacatccttcagctgccttcttctctgtgaagcctttctggaattttataatcaaagttcattacccatctctactctcaagaggttatcatatgtttatatggcattaataattttgccctttttaattatcatttttggttctatgtttgatttgacccattatatctgtgctgtggctattcaatttaaattaaagtgaaatagtattaagaattcagttcttcacctgtactagccaaatttaattgctcaatagccacttttctctaatagttactatgttggtcatcagagacttagaccatttccactatcacagaaagctctattggacagtgctgctctagactgtgcatgcctttgaaggcagtgaccataatattgaaactaataagattccaaaattaataaaataatatgtctaaatgaggtatatcacagtggcggtgtggggcaagaagcaggggcagtattgtttggcaaatagacacagagctttgtgttatcttaagtgggttctgttacatttgagaagatttcattctactttaaagaaaggcatgcatctaaaataaataaaggtaccaggaatttaaaacaccataaaaatcatatagaacatgtgcctcaaattttaataaatgtggccacagtgaagtaaatggattagggagataatatcagattttgtctatcaatccaaatatccttaatatctagtctacattccttttcaatattctttagaaaaagattgttataatggccttcaaatataagaattctaagaaattctgcactaataccaaagaaatgagcacttttactctttactcatacaatgaaaaagtaagttattgcattcaattgagcttgaaaaataacacataaaagtattggtttgataaaacatgctccctccgtttctaagtctatagccatataaagccatcaaattttgctcaatgtatacattggtcttcaatttaaagattgtccataaagtagtgtggatattttgcaaggggaataggcctggtacagaggaaggagcacagactttggaatcagactaactgggctttcagtcccagctctgcagactgacattattgtgttgggagatacttaagtactcccaatctaaggccactaatctttaccatgcaagtttttttttttttttcttttttaaccagtaggtggcctttcaatactgagttaaaaacctgccttccagtgaactttcagtaccttcaccacctaattacagccaaatgacctgggatgtcatacttgagtttttttttttttgatgaatgattttatcattgtctgtctttagatcttatccatatttctttggtggcaagagttacaactaagacaaagtaatctgagctctctattctgtttgttttttgtgtttttaggcatataccatattgtttttattactatagtcttgaaataaagcttgaaatctgaaagtaaaaaaagaagacaaagtaaggacagttttaatggggttttaggacagagatggcctatgctatttagcttgagtgtagctgaacataatacaaagctctcaaaattaaaaggaattttagaataatacgtgccactttatgtgccaagaacagcacaaatgtttgattgggctggcctgaagaactttactgtatagtaacaacattcactactctaaggacctagagcatggtagagttatgtccacttgaatgttatgacaggagaagggattaacgacatttatttgcctggtattaagaccctaaattataagcagccccattccaacacacacacacacacacacacacacacacacacaatctgacttttgtttattttgaaccccttttacaatgcctacctatttaaccatctgatttgctttgcgtgacataggggcatagagtgagctaggtaggtttctgaaccctatgctttgactatacttagttaatctcttacctgaatgaaagccttaggtttctcatctgtgtaatataaataaaaacacttaccttgtatgattattttgttttgaagtttaaatgagaaatagatgttctaaaaattactgatatgatactttcttagcaagcattaatcttcccccttccttacatttctcagagttatgttgtgaggattcagtgaactaatgtgatatatcatgagaggtgaagagcatagaatttgaatcagatctgaattcaaatcttggccctgctacttatcaactgtgtgacactggggtattatttcatcttttaaaatatttttgtttttaaattttaaaatgggaataatgatcctagttcatgcagtttttgtgaggataatgtaaaatgcatatacatttccctgggctagacctggtgttttccatacattactaagctattattaaaacactaccccagttactatctgtagtctgatttatgttcagcttctttgaagatatcttccaaactagatcatgagtttctggagtgttaggaggcggatttgactctgttgaagtctgaagaaccattggagtagtgctaagtgcattatgctcatgtctgttcaacttttggccagtagaataaatgcttggggttttctacctacttagctatcagtcactatccttccgatggccaataggagcaaaaggtttgggtaaattattaatgtaaagaaagctgaatcaaattcctaggttgtctaagtataatatcccagcaattgtattgggtgactagaaacttataaatgattagtgacaaaaatttggctcaattttgtataatatttatcaatttatctcatacataggctatatctactgtattactttaaaaaaaatgtatgtttgtgtgtggtctactatgatgtcatgtaatgcatgcccctgacatgtactgaatgctccctaatgacttcatgatgactagttttaaggaagaaaataaaatttaaaaaaggaagtgagcataagcaaagagggaagaaaggaaagtgatcaggatgaggagatggtgaatacaaccagagactggcctggtcattgctttcctaaccttcatatatggatctcttagtatcattatacagttttgtttaaaaatattatttttgtaaaagcatcatagctgttatttatttatttttgagacggagtttcgctcttattgtccaggctggagtgcaatggtgtgatctcagggtcaccgcaacctccgcctcccgggttcaagcaattctcctgcctcagcctcccaagtagctgggattacaggcatgcaccaccacacctggctaattttgtatgttttttagtagagacggggcttctccctgttggtcaggctggtctcgaactcctgacctcaggcaattaaactactaaaattaagtatttgagagcatgaaagataatttaaaaagcatgtactgtaaaccaaccaaaaacagataatcttggaaataaatttttccttagtattctttaaaataataaaatatactgcaaaattttcaagcatttccaaatcttactttgtcatgcaatacttgcttatgcagcagtgaccttgttgatgctatgtacaatctgtcattttatggattatccctactaggtagatgttaaccacttcttgacaagaaaggcaggacacagaaagttgaatggtttgtcttggtttctcacaaaataagaaataatcagaatgagatttttatggtgtgggctctcctgcctgatttattattttgaactttttatgtggttctgtctatggagaaattgaaaagtaaacagatttagggactgattgctgtatatacattgttttcagaccataggagagacaaacttccagttccagttatttctgtttaacatttctctgcaaatcagcaaggcttgttttatccaggcttggccaagttaaatatattccctgtatttttcccttatgtttggatatctagcaaaatattcctcattatactgtttattgaagtgaaaacttgtatgtgattgtatgaatgcctaatagtcttgaagtaaaggccatcaaattcaataatgcctggagagattgcatgtattcttctctaccacatatttatagcatttgtttggagtgccaaaatttttgttttagttctatagataagaatttctcaaaattttttaagatttttcaatttctcctaaacataatacataaggaacactttttggataaatgctgtgtaaagttagcaaacaaaaacaaaaacaaaaacattattttcttttaccgtgtcccctgatctcaaatcttttcatttctctgtttgtttgttttaaatgtaattttagagggctgctgaagtatcaaactaatttagatacccaccctcccggctgcatcagtcttaaccgaaccagctctcagaatatttccttaccagagtatttctcagaacattttcatgaacctttccctgaaggattttcaaaaccggcagagtttacccagcacaaatttgtgaagatttgtatggaagagcccagattccaagctaattttccacaggtcagattaattttgtgtttgatctccacaaagtttgtttccatttgactgatcaacatcacatataaatgtgtttttcaagctatatattcatgcataataggatatttcaggatgtttcaacagtaagttagtacctattattccattacaggtacctgagagttcaatgcaaaaggtctatgatattagaggatatataacatttctacttaactgaccatatgacctttgcatacaacagcattggtgcttgcagccaagagatgacaaatattttttcccatcatttgagaaaagctgattgaataataaaaatagtagttaaaaaaacctaccaccaataccacaaattattattttattgtattatattattatgtataatattgtaaatagtaaatagcaaaatcaatttattgaatgcttaatattatctgccaggcattgtgctaaaatgtcctgtatgcctaatacagaacacttattagacatacagaatgtttcttgcaatattcgcaatgactatttgaagtaattaatatcaccctcgattttctgataaagaaattgtacttaccttgatcaaaatctccaaaccagtaagtggcagaggaagcatgtaaacccaggtctttgactaatatgcttgctcctggtaaacgtccataagtattcagcgattagttcaataagggcccttatcttcctctgtgcctgtgagaactgcccccgtgcaaattacaccttttattcctcacctataaaaagtggaagtaggaaatagtgatgtcaaatgtctctattggaagagaagaaagagaagtcaaaagctagaatgaatttgtagatgactttggaatagtgtattagtcgtgtttattattattaataataatcctctagatccctattagcctctataattttcagaacttttctgagtttcacataatattcacaaatattagggcaggtatggcgactcccattttgctcatgtgggacctgacactcaaagagtaagtgattgtctcaaaggtgcaaggctgctacattgcagaccttgtcttgtagtgctactcataacacagtgtggggctaaatgttattatatgcagaagaggcatggtctgtctgcatgaaagaaggaagatttgaaacaactaaagtgaggctttaaaaagtgaccattaagacaagttttagttggaggcctcaaagggatgtgaaagataaagtgtgtaattttaggagaacagtaagccacataggcttctgcacttcccaaagtttgcatgtgtcctgggatcagggctaaccatgcaacacatattcaaaactgtcatggtttccaaattataaatattattttatgttcttattatattatataaaagtaagtggtaaacaacatgcctagcatattgcatctttaaacatatgtgctatacatatttaacatatatatatatacatattatatgtatgtatattatgcatatacattatgtacattaaaaatctagggttttcttatttaataaacattagactgttaccttatttctaaaattatccccagatttatcggagattgttaactcccctttattcttttattaaatatattgtgtatatacattacatatctgtaggcatagaaaggtgtatgaaagaatatatacttgtttgctcatggatagttacacccagggcatgagattgagggtagggtcttgatattactttctgttttattttatacttttgtttgtttgaatgatagtgagcatctattattttttactcatttgttatgttttcttatttaaaatacaaattaaaatactattactgtaatgtatgcaataagcaattgggcagggtgtagatttctacaatatgagtatttcttgaagtatattttcaaaaatttgtcttagacttggctttggatttctggacctttgtgcctgtactgtgccgaaagactttacaggtatatccggagcaataagccagtcaccatcatttcggtcatgagtcatccctcagatgtcatggaaatccgaatggtcaaagaaaattttaaagcaagacctggtcaggtgagtcagtggtcagcaactttttaaatagcctttatccttatgtaatttttggaatttagcaaacatagcatcattgaaatagttgaaattcttaattggtcatttaaaacttatctgtttgttgctttttagtatattactctacattgtcccagtgtatctgcattagaaaatcatccatttaccctcacaatggtaagaaacatatctcttgctttttcacatttgtagggtgctatgcatatttttctttttttgtgtcctgtctcattctaaaaggtattcaaggctatcatagtactcttgatgtttaagtaagctatctttttacaaggaaaatagttatctgctcaagaactgtgtaactacactttattattttttgacaccttgcaattcaggaagtaatgaattaaaacgtattaaagcttgttgattcaaaatataggccaagcacagtgactcaggcctgtaatcccagcacttttggaggtcaaggtaggaagaccacttgagccccggatttcaagatcagcctgagaaacataaggagacactgtttctacagtaaataaaaaaaaaaagccagatgtggtggtacacatctgtagtcccagctactaggaaggctgaggcaggaggattgcttgagccccagtgtttgaagtttcattgagccttgatcccaccactgctctccagcctgagcaagagagtgagaccttgtctcaaaaaacaaatatatatatatatatatatatatatatatatatatatatttaatttcttgaatatttacttttctccttttatggagtattttaatgtatatggaaatcttatatatgcacaattttctttggagatggaatttaggggaaatacggatactctgggttgaggtggaaacattaaacaaaacaggcagtgtttagaaaaggtaaaatccagtgtaatgggagagagaatggaaataaaattagaaaaatcaaatggagtaaataatggcatgggagggcatctagctaaataatggacaccatcaaatatgattagctagtcagcatatcatttaatattattataattataaaaatagcatgagttcattataaacatttagacaattcacagatataaaataaaatacaaacttaaaaaaatttttccccactttccaatccttttctctactgtttgacatatgtctttccagatattttcccatatgcttctgcatacatgagtttctaacatttatttgctggatcatattgttttgtaactggctcctttcactcaactacatgtgatggacatctttccatattactgtatgtgcctcattcatgttaatgaccatataatatttcacagtaggaaagtactgtaatttatttaatattctcattgaagttggatatttggactttattcattttctaagaaagataattgagaacagagaccacatgtttaaatgtatacttaagaaagatagcaaaactattttatatatatggtatgtatacatgcagacagatgggaacatgttgtaaagcatgttgtaaaacatgttcccatctgtctgcatctatacatcccatatacatgaaattggtaacatgaaaatagaagggaataattgaaaagggagaaaatacacaagtaagtttgtctttacttaaataacttaagaagttttgcctaatcctgagttcataagaaatttacttcagattgccctggccagaacttccaacactatggtgaataggagcggtgagagagggcatcactgtcttgtgccagttttcaaagggaatgcttccagtttttgcccattcagtatgatattggctgtgggtttgttataaatagctcttattattttgagatacgttccatcaatatctagtttattgagaatttttagcatgaagggctgctgaattttgttgaaggccttttctgcatctattgagataatcaagtggtttttgtctttggttctgtttatgtgatggattacatttgttgatttgcatatgttgaaccagccttgcatcccagggattaagccaacttgatctcggtggataagttttttgatgtgctgttggattcggtttgccagtattttattgaggatatttgcatcaatgttcatcagggatattggtctacaattctctttatttgttgtgtctctaccgggctttggtatcaggatggtgctggcctcataaaatgagttagggaggattccctctttttctattgattggaatagtttcagaaggaatggtaccagctcctctttgtacctctggtagaatttggctgtgaatctgtctgatcctagacttttttttggttgggaagctgttaattactgcctcaatttcagagcctgttattggtcttttcagggattcaacttcttcctggtttagtctcgggagggtgtatgtgtcgaggaatttatctatttcttctagattttctagtttatttgtgtagaggtgtttatagcattctttgatggtagtttgtatttctgtgggatcagtggtcatatcccttttattatttttattacatctatttgattcttctctcttttcttcattattcttgctagcagtctatcaattttgttgatcttttcaaaaaaccagcttctgcattcattgattttttgaagtgttttttgtgtctctctctgcttcagttcagctctgatcttagttatttcttgccttctgctagcttttgtattcgtttgctcttgcttctctagttcatttaattgtgatattagggtgccaattttagacctttcctcctttctcttgtgggcatttagtgctataaagttctctctacacactgctttaaatgtgtcccagagattctggtatattgtgtctttgttctcattggtttcaaagaacatctttatttctgccttcatttcattatttacccagtagtcattcaggagcagtttgttcagtttccatgtagttgagcagttttgagtgagtttcttaatcctgagttctaacttgattgcactgtggtctgagagacagtttgttgtgatttctcttcttatacatttcctgaggagtgctttacttccagctatgtggtcaattttggaataagtgtaatgtggtgctgagaagaatgtatatgctgttgaattggggtggagagttcgtagatatctattaggtccgcttggggcagagctgagttcaagtcaaggatatccttgttaaccttctgtctcattgatctgtctaatattgaaagtggggtgttaaagtctcccactattattgagtgggagtctaagtctctttgtaggtttctaaggacttgctttatgaatctgggtgctcctgtattggatgcatgtatatttaggatagttagctcttcttgctgaattgatccctttaccattatgtaatggccttctttgtctcttttgatctttgttggtttaaagtctgttttatcagagactaggattgcaatccctgcttttttttgttttccatttgcttggtagatcttcctccctccctttattttgagcctatgtgcatctctgcacgtgagatgggtttcctgaatacagcacacagataggtcttgactctttatccaatttgccagtctgtgtctcttaattggggcacttaaagggtattcagttaggaaaagaggaagtcaaattttccctgtttgcagataacatgattgtatatttagaaaaccccatcgtctcagcccaaaatctccttaagctgataagcaacttcagcgaagtctcaggatacaaaatcaatgtgcaaaaatcataaacattcctatacaccaataacagacaaacagagagccaaatcatgagtgaactcccattcacaattgcttcaaagagaataaaatacctaggaatccaacttacaagggatctgaaggacctcttcaaggagaactacaaaccactgctcaacaaaataaaagaggacacaaacaaatggaagaacatttcatgctcatggacaggaagaatcaatatcatgaaaatagccacacttcccatggtaatttatagattcaatgccatccccatcaagctacctatgactttcttcacagaattggaaaaaactactttaaagttcctatggaaccataaaagagcctgtattgccaagacaatcctaagccaaaagaacaaagctggaggcctcatgctacctgacttcaaactatgctacaaggctacagtaaccaaaacagcatggtactgctaccaaaacagagatatagaccaatggaacagaacagagccctcagaaataacaccgcacatctacaaccatgtgatctttgggaaacttgacaaaaacaagcaatggggaaaggattccctatttaataaatggagctgggaaaattggctagttgtatgtagaaagctgaaactggatcccttccttacaccttatacaaaaattaattcaagatgtattgaagacttaaatgttagacctaaaaccataaaatccctagaagaaaacctaggcaataccattcaggacataggcatgggcaaggacttcatgactaaaacagcaaaagccaaagcaaaaaaagccaaaataggcaaatgggatctaattaaactaaagagcttctgcacagcaaaagaaactaccatcagagtgaacaggcaacctacagaatgggagaaaatttttgcaatctaccaatctggcaaagagctaatatccagaatctacaaagaacttagacacatttacaagaaaaaagcaaacaaccccatcataaagtgggcaaagaatatgaacagacacttctcaaaagaagacatttatgcagccaacagacacatgaaaaaatgctcattattactggccatcacagaaatgcaaatcaaaaccacaatgagataccatctcacaccagttagaatgatgatcattaaaaagtcaggaaacaacagatgctggagaggatgtggagaaataggaatgcttttacagtgctgctggaagtgtaaactagttcaaccattgtgggagacagtgtggcgattcctcagagatctagaactagaaacaccatttgaccctgtgatcccattactgggtatatacccaaaggattacaaatcatgctactataaagacacatgcacacgtatgtttattgcggcactattcacaatagcaaagacttggaaccaacccaaatgtccatcaatgatagagtggattaagaatatgtggcacatatacaccatggaatgctatgcagccataaaaacagatgagttcatgtcctttgtagggccatggatgaagctggaaaccatcattctgagcaaactatcacaaggacagagaagcaaacaccacatgttctcactcataggtgggaattgaagaatgagaacacttgtacacagggcggggaacatcacaaaccagggcctgtcatggggtggggggctaggggagggatagcgttaggagaaatacctaatgtaaatgacgagtttatgggtgcagcaaaccaacgtggcacatgtatacatatgtaacaaacctgcacgttgtgcacgtgtaccctagaacttaaaatataataataataaaaaaattacttcagaaattaaccttcccttgtgttggcaactttattttgaaaatcatttcttcaccataacattaaataggaaatatggaataagaaaagaaatcagttgctgagtgtcaagtacagagcagcaagagttttttttttgttgttttttaaactatttttcaacataaacaaaagtagagagaatagtataatgaatccttgtattcataaaaaatatagaggttagtttactttttagtatatactcaatcactgaaaacttttttactttcttaaaacagtgtatcaaagaatttttcacctatgttcacactgaagagaggcttctagatcaatttctttcagcaggcctaggcccttttcacaaggcaaagggaaaacacaaaagaagtagtgtgtagagctggaagggctttaagtaagtcccttctatggcctggcctgcttcttaagatgtgattatggtaacagatgtgatagccctgtggccagcttgaggcaaagatgggaagaaaaggaagaggagagaagtgaatgtaggtacagacagaagaaaaggaactggaggtagaagacgactgagaaaggaaaattgaattatatgtgaaataaaatagtagtaactattcagacaaagggcaaggattttagaactcaattccagatccctcacttgttacttctgtgtctgtgaatgtatctctcaaccttgctaaggctcagtttcatcatctgcaaaacagtgctagtgatacttacctggaagggcatctttgatattgtcaatattagtttataaaataatgtgtataaaacccttggcacatcattagtggtcaatacttggtaatacagatattattattactttcataatcttaaaatacctggttttaacttggattattgctttcatttctgaaattatgctttttttgagaagcaagtacaagacatgagcatgtggcttttcaacttgaaaatgagaaacgggaatatgaaagtagtctcaggtactgaaaatctgtcgtgtgggtgaaagatttgattttttttttcctttgggatcccaataggcagaaagttttaggaaaatacatttttatttaacataataaagacatttctaacaatgagaccagtctagaaattacaaagagctatctcacagaagtgtttgcaaggattattgcactagatcaggatttttcaatcatggcagtattgacatattggatcagacaattcttcgataggatgtgttgttctgtgtattataggatgttttgcagcatctttagccctgacccactagaagccaatagtatcccccactgtgacttccaaaagtgtctccaaatgtagccagatgccttttgaggggcaaaatcacctacagttgacaaccaccgcattagatcgatagttgtccaacatagcttccagtgctaaaggtcttcagcactttagaggccactgtgagaaaggagaatttaagcacaatagagaatttgagggatgggagtgcttatcttttgttctggggacaccgatcatgtcagtgagaacagctcacttccaaatggtctctgttatgaggattctgctaaagtactcatataaacatcatcatctaaaaacatattttgcttactcaacttgaatcctttttggaattccatgaaaattattttggttaccatgagctcctgaatactttcatgtcatgtagacctttgaaagagaatttgattacttttaaaattcagaattcttttttttcatattcactgtcatcaatgcccaaataacagtttggatatgaatcaaaaggaaaagtgggatagcagtataaaactctaacacgttcatcaataattaaaatgacatgaggatagcctcatgtacttgatatttttgtcatataaatgaaaggtttgttctttccccctgtggaatctcgaagtgtggaaataagaacagtacattgttcttggagaacaaatactggtttagtgaccactttgggaaataatgtgtttgggttggtgaaaaaagacaagagagcttttcctcacctcacggaagctccattagttatatgaggctctggagcctccctatgggttgcctcctacagcaaaggacatctcaccccgggccttcactcttgaggtggcccagggagccctcagtatgaaggctctgagtccattgcaggcttgtttcagaagattcaggttcagaagtgcaagagatgaagataaagaggttgggtgtgtacagtctatatccatcatagtttttcttttcttactttttcatttaagaaaaaaaattgtcttatttcttctggttctgtaagaatattttaccaaaatgacagagaggagaaaaaaggataattgtagtaaagcaggttattggagaccacttcttccattcttttaaagaaagattgttctctggaaattatcccaggtcgggagagggggcacaggaggaaggaaggaaggaaagaaggaaggaaggaaggaaggaaggagaaggggaaggggaaggggaaggggaagggaaaaggaaaaaggaaggagagaatgaaataaaatacatttttcaatggcctagtttggaaaatgctgattaatatgtattttaaagtgcatagtgcctactaatgtattaatggttttgaggagttctttaatatataatctcattaattttttttctttctttctttttttttttttttttgagacaaggtctgcctctgtcacccaggctgggcagcagtggtgtgatcatggctcactccaacttggacacctgggtttagcctcctgagtagttgggactacaggcacatggcaccatgcctggctaaactttttaaaaaattgtgtagagatagggcctcgctatgttgcccaggctaatctcaacctcctagcctcaaacaatactcctgcctcagcctcccaaagtgctgggattacaggcatgagccaccccatgccgccaatcccattaaattttgttcactcatttagttaatgctttctcattttcccacttttgggtctcaccctgggaaacaacctcattttcttccatgtattcacaccttaaactccacccattctctttgtctgggaactcttactcatccttcacatctcatcttcatatcacttctgctgaggagccttcactgacccttccctattagattaagtttcctgacctttccttttatgagcatcccatgtacactcttcaacaccagtcattaaattatttgtttaattaatatctgttctcctcatagaccataagctccatgagccctttgaaagatgaattcatagcacagtatgtggtgcataatcaatgcatatctgttgaaagagtaaaaaccacctaatatatagagttcaggacctagcttgagaaatgctttgtagacagagcctccttcccccatctctttatagcacagtcttccttagagggtgcaactacagaaaaggaaatgttggagggataaagaagaaaggagaaatatttatttccaaagtggctctcatttggagtagactgagtcagaatagagtatttaattaaagtctaatatttgagatcatggtgcttatttctctctaacaaaagaggaggggaaaatgtacctatggcaaaggtctttagaaagaaccaccaaagacaaatagacgcaatttgtggattatatctggtctatgatgaagtcatttttcacctcacctcccttattctcagcacaaataataacagaaaattacttgctcctaattctgtgcttatctgacaaatgccgtcaatatttcttggattcatctagcaccttgtaggctgaagtagaacttgactctacaaggttaggttttgcattcacattcattcatattttaaacatcagtttctgtatgttttacttatgctttattaaatctcaattataaatactaactgttttcttaaaaccactctatctcatagatattttaaattgttacaatagttggctttaaataaaattttaaggcaaagaaattatttttatcagaccatctgtttatcatgtaggcttaggaagtggtttatagcttccccagatttggggggttacaagctcgctcatttgtactatcccccaagggagtttttgttttcataagtggaaaataggcaaacttgctgctacctagaaatgaatttgagtagggcaaatatttctaagctaaattttacattatgctattatgctaatttacagtctcttcctgccatttccttctctgtccaattacttctatttggcacttagaaatgtaaaatgcatgctttcaaacattttcactgcatagttgtcttaagagttcccttgaagtaaaacaaagcaatttcccatatggtgattcccactaaacagtgagtatcacatctttgtcaaagataatagtacctactaattaagtgcctaagaggttctttcatagcttttgcaaatattatattatttaattcttattatattcctatgagacacgtattgttaactcggtgacacagaaaagaatgtggctcagagagactaaatagcatgcccaaagtcacacatttagttgaggtagaggtgagatacaaacacagacctgtctggctgaaggcatgttattaactgttctgcactgtctctctcctgccacactatccttccatgctgagggctttcatattgctaacactgctcttacttttggacatctatgttgctggagtcagaaaacaaaaataagtaaaattaccatttcgaactgaggtttattgaaagcacaaatatgtgttttctatagtaatgtgaaagctttcgattgtccatactactaagctcttctaatattgtgaagtggtgaaatttgaataaatccccctgtttttaaaaagtctaatacttattttcatatactgtgccagttagaaacaatcaaatcaataatatatacagctattacaaattcagtagtttgagttttagctcactttttaagatggagattaagcttttcatactgaaagtataacttcaaagtacaaaagacagggcacagaaatactattttggtcaaggtaaagctaagctttaagcacgaatttattaggagggcaaaggttggagttttgattatttaaaatgcttcactatttttcatacatgtcattgacttccctacacaagaaggatatcctgatttgatgggttttccaaggaaattgtgattgtttcttgctgtggtacacctatattttctcatggtaaaatctcacacacatgtttgctgacaagattgatggaaattataggaccttatgtagtatcagatcatggattttggaataccacagcttgggatggagacctgtatgctctacttcctagtattatgactgtggacatgaaaattaacataatcttttgtttacttctttataaaagtgcagttaatgatagcaacttctccatggagttactctgaatattaatccaaaacatataattaagtggtatgtgtggtgcttggaatatagtaaactctccataagtggatttagttatggttgtttcagatagtgactaagggaccaaagacatggattaaattaagattttttgcctcgttcttcagtatgtagtaactgactaagctttggccacagattggtgtagaaacagtcatttgaggggaactgatgacttatttgccttttatggtcttctagccttaaggatgaatgacgttttaggttaggtttccttgaaaacaggctggcaggcatattgcatgcagcagatttgttgggaaggatgcttaggacaacagtcaataacgattgactaaaaaggcaaggcagaacttgaactatgtgatacaggtccatagaggtctcagaagatctgacaggagctctgcagatgaaatgatagcttatagtgtcctgtcttgaagtcagggggccaaatctttgtaacccccaactgaccagtcattggatttgagatacctccatggtgaggcacttagacataggcaaggaagctttgttctgtggattcctggggcaggtctcagtggtgagccctcccaggcaaccttttcagaagctggaagaatggtgaatgagtgtgttgatcctggaagttgggcagaggttgggaagggaaagggtctgagcagtgcagcacagtgtccattaagtagcttttaaaaacatagatcgtttatgagataattctccatttttaaaactagaaattaaatttgaggtacatataaactctagtttatctatactaattgaactttaaaaatctgttgtccaaactacaaatttatttacatttgagaagtctaaagcatagactgttgaagtgaccaaagtaatcaaaataatacaatcaatagctggaacccatttgttgactcttctcctgctttacacctttattgatttaaaacctgtgtagaatgtaacgttttgttcttcaagtatgtaatggatgtctgcaagtattttccagctgtgctctgtgattaccaaatttaagactttctaccaaatcaaatcctttattaaggtgtgctctcacctaatttacctgtataaattagagatgattggaaaaagccctaacgtaagagagcaagaaacctagtgcttcctacaaaatgtagcatcttttcatatttagctgaggtagacattattttcatactaatttcatggattctcaattatggaaataatgcagaatctgccttttaaatagaagtaatgaatcgatgtttacatgaatacctctttattcttctgttattatttttattcaggaacaaactgtcacatgcgtccctgtgaagagaccaccaaacaggctttgtgtgagcaataaagctttttaatcacctgggtacaggcaggctgagtctgaaaagagagtcagtgaagggagacagggatggggccattttataggatttgtgtaggtaatggaaaattacagtcaaaggtggttgttctctggcgggcagggatgggggtcacaaggtgctcagtgggggagcttctgagccaggagaaggaatttcacaaggtaatatcatcagttaaagcaggaaccggccattttcacttagtctgtgactcttcagttacttcaggccatctggatgtatacatgcagtcttgggctgagaggcctgacattcctgtcttcttatattaataagaaaaataaaacaaaatagtggtaaagtgttggggtggcgaaaatttttgggggtggtatggagagataatcggcgatgtttctcagggctgcttcaagcaggattaggggtggcatgggaatctagagtgggagagattaagctgaaagaagattttgtggtaaggggtgatattgtgggattgttagaagaaacatttgtcgtataaaatgattggtgagggcctggatatggttttgtattaattgagaaactaaacagaagacacaaggtccaaataagagaaggagaaaaacaagtattaaaggactaagaattgggaggacccaggacatccaattagagagtgtccaagggggttcagcataattacttgcttggttggagagtttttggggctctatccttgagtttttttatgttgtcatacagcaggccagattgatttaggtaaaaacaacactcttcatttaaaaatagagtcctctttttttagcagtgagtaagtcgaggcctccacgattttggaggaaagagaaatgcaaagccagcaattgtttaagaaggattagaaatggctaggagagagtgagggagattgatggtgtggtggggatagttggggagaggtagagtgtggcataagaatgggaacaagaataacagtgcgtataaaagtaaagaataggacttcatcagggtgaaagttttggagggtaccctgtcagcaaagatcatctatcctctttaagagagaattaagggtggcagtttgaggtaaaaccaggagatatcagttatgatggtttgaaggaaaagtgtaaactggcagtgtaaacaagggcaggatatttatgagtagttgagaatgatgaataggagtttgactagacagaagatagtagggatgacaaatttttggggtgtggttcaagttgggctggtgtctagaatgagactggggcctaataaaaaggagcatccatacaggagctcaaataggctataccctgtagcatcctgaggacaggccagaattctgagaagggcaagtggtaaaagtattgtccattcctttttaagttggaggctgagcttgatgatttgtgtttttaaaagaccattagtccattttacctttcctgaagattgaggacagtaaggggtatgaaggttccactgaataccaagagcctgagaaactgcttgggtgatttgactaataaaggccggtccattattggactatgtagaggtgggaaggccaaaccaaggaattatgtctgacggaagggaagaaatgaccatggttaccttctcagaccctgtgggaaaggcctctatccatccaatgaaagtgtctacccagaccaagaggtattttagtttcctgactcgggtcatgtgagtaaagtcaatttgccagtcctggtcaggggcaaattctcgagcttgacttgtagggaagggagggggcctgaaaaatccctgaggagtagtggaatagcagatggaacactaagaattgatttccttgaggatagatttccatggtggaaagaaaatgagaggttttaagaggcaggctaccagcttgtaacctacatgaaagacgttatgaaatgacaacagaatagaatgagcctatgaggctggaaggagatccttggtccaagaacaatttgccttgtttgggaagagattgatagttggaagtttcagtgggggagtaggtgggagtgactgatgagaaggagaaaaacttccatgaggaacagaagttggaatgctagctgcttttttagctaccttaacagcataagcattaccctgagggatgggatctgatgccttttgatgacccttgcagtgaatgactccagcttcctttggaagtaaagtggccttgagaagtgtttttattaaagaggcattaatgatggaggaaccttgcatagtgaggaaacttatttctgcccatataacagcatggtggtgcaggatatggaaggcatatttagagtcagtataaatattgatgcatagtcactttgcaagagtgagggctccagttaaggtaatgagtttggcttgctgagaggtagtggaggggacagagcggtagcctcaaggatagatgtggaagatactatagcatagcctgcctttgctaatgagtggcaattaggcctggtggaactgccatcgataaaccaagtgtgatcagcgtgaggaagaggaaagaagaaaatatggggaaatggagtgaatgtcaggtggatcagagagatacagtcatgggggtcaggtgtggtatctgaaataatgcgggggccagcctaaaacagtaaggtcaagttgtttggacagaaaggctacagggtgcggtcccagctcttgtgtaagaattctgactgcacagccctgtactttggctgtgtgtaatgaaaaatggttgggatgagttagggagagctagtgtgggagcagctttagggatgttttttaaggaatggaaaggggagtggagaaaggatttaggatctatggggtcacctagatttgctttggtgagtttatataatggtttagtcaggatggtaaaagtaggtatccaaaggcagaagtagccaaccatgcctaggaaggaaaggagttgttgttttgtagaagtggttggggtttgggagattagccagacatgatcagctgggagagcatgtgtgttttcatgaagaattatgctgagataggtaatggatgaggaagaaatttaggcttgacggaagtaatgggggctgtccgtgaagccttgtggcagtacagcccaggtaatttgctgagcctgatgggtgtcagggtcagtccaagtgaaaacgaagagaggctgggatgaagggtgcaaaggaatagtaaagaaagcatgtttgagatccaaaacagaataatgggttgtagaggggttgtggagggaggtattgcagataggagagtatatgggtttggcaccatggggtggataggcaaaacaatttggttgataacgcacagatcctgaactaacttgtaagacttgtctggtttttggacaggtaaaatggggaattgtaaggagagtttataggctttaaaaggccatgctgtaacaggcgagtgattacaggccttaatccttttaaagcctgctgtgggatgggatattggtgttgagtgggttaaaggtgattaggttttaatgggatggtaaggggtgcatgatcagtccccaaggagggagtagagttatcctatacttgtggattaaggtggagagatacaaggggaggatgtaaaggaggctttgaactggagaaaagggtggcagtgaggtgtggctatagcctaggaatagtcagggaagcagataatttagtaaaaatgtctcatcctaataagggagctgggcaggtggggataacttaaaaggagtgcataaaagaatgttgtccaagttggcatcagagttggggagttttaagaggtttcgaagcctggctgtcaatacccacaacagttatggaggcaagggaaacatgcccttgaaaagaaggtaatgtggagtgggtagcctccgtattgattaagaaggggatggacttactttccactgtaagagttacccaaagtgtctgtgatggtccaggaggcttcagaggcgatcgggcagcattagtcttcagtcactaagccgagaagacctgggaaggagtcagtcagagggccttgggccagagttccaggggctctgggagtagctgctgggcaagttggacagtttgatttccaacggggtcccgcatagatgggacatggcttaggaggaatcctgggctgcaggcattccttggcccagtggccagatttctggcacttgaagcaagatcctgagggaggaggtccttaaggaatcccagaccgctgtggcttaggcgttttgaagttcttgtgtgctgcaaatgtggctggggtttctcttacagcacaggcaagtaattgcaactcctctgttattgaacatcttgaaggcgaggttgattaattcctgttgtggggtttcagggcccgattctaatttttgaagcttttttttaatgttaggagctgactgggtgataaaatgcatattgagaataagatgaccttctggcccctctgggtctagggcggtaaagggtctaagaattgtggccaaatgggccatgaactgggctgggtttttatatttgatgaaaaagagcctaaatgctaactgatttgggagaggttggataaagaaaaaggagcattaaccttgactatgcctttagctccagccacctttttaagaggaaattattgggcaggtgggggagggctagtcacagaacaaaactgtaagccagactgggtgtgaacaggggaggtgacagaagaattatagggtgggggagtggagtctgaggaagatttggagcctgattcagcctggcagggagtgacctgaggaggagcagtcttgggaggaggggagaagtcagatgggtcggtagaaaaggaagattgaaaagactcagcaacacttggggttgggactgaggggacaggtgggagggaaggaaggatttgggatgagtcgcattgggaacagagactagggagggaccaatgtgtaaaagaatgcctggatgtcaggcacctcagaccatttgcccattttacgacaaaaattatctagatcttgtacaatggagaaattgagagtgttttctggctatttggaactattgtcgagtttgtattggggtcaagtggcattgcagaagaaaataaggcatttaggttttaggtcaggtgtgagttgaagaggctttaagttcttggaacacaggccaagggagaagaaggaggaatgaagggtggaaggttgcccatagtgaagaaggcaagcccagagaaaagaaagggtagggacacggagagaaggggtggggggtacctgccctcccccctcaggaaagtggtacttgccactaaggtgaaggatcaaggcaggagtccctgcggtgatcagacacctctgaaacgtgggtgaataatcagacaggtgtccccacagtgattaaacaccaagggaaaactgtcttgccgagtccgtgactggtgccggagttttgggttcacggataaaatgcatctcttctgtctctaccagaaaaggaaaggaacagaaattaagagaagagagagacccaagggtggcaccaagattgaaaggagaaagaggttgaaggatagtgagagaggctggagaagagtaaaaagagcctgcttacccgatttaaaattggtgatgttccttgggctggttggtctgaggaccagaggttgtaggtggatctttctcatggagcaaagagcaggaggacaggggattgatctcccaagggaggtccccccgatccaaatcacagcaccaaatttcactcatgtcagcgtgaaaagaccaccaaacaggctttgcttaagctaagcaataaagctttttaatcacctgggtgcagatgggctgagtctgaaaagagagccaaggtagggagataggtttgggtccattttataggatttgtgtaggtaatggaaaattacagttaaagggggttgttctctggcaggcagggatgggggtcacaaagtgctcagtgggggagcttttgggccaggagaaggaatttcacaaggtaatgtcatcaaaggcaggaaccggccattttctcttcttttgtgactcttcagttacttcaggccatctggatgtatacgtgcaggcttgggctcggaggcctgacacaaacatgctttcctgacatctgtattctaacttgtgtgattcattgtttttaagcttgaataacctgatttcacatatttttccatgagtcagaggcatgtctagctgttagtttgttattgtctgtacttttacatagcatgcctgcactagccatcatttttctactttgtgtttttaatcttttaaccagtcactttgggaagagtttttccaggaatagtttttcccgttttcaaagaaaaccaggcaagaatggctatggatctcacaaagactggcaacattttgttgctattgtttatttaatttagtgggtttaaatgaaaccaggacatctgcagcagttttgatctctggtcttgctctcaactatttaaatcttaaaaattgttttgctctatgttttcataattttattgcttgtcaaaaatcagctgggatacatgataggttagcatggtgacaatgttatcttaaccatagatgaagcaaagtggtgaaaatttcctgagaagatgattaatgttcatgaaaaattaataggacatctgagtttcttgagatgtaaacatcatctaactgctctagtttggcttttttccaagggaaataaaaatattcccttagtgtctaataagagtctacatgataagtatgaactttagaaggttagtgtatttagggtaaatctattgaatattgagcttaatttattcaatccttatttttgggtgcctgtttttacctaagtaccaaaaggaaatgatcaatgaaagtttctttcctgactcacatcccttctagctactgctccctctctcagcaatccagttcctttcctctcattctcttaaatcaaccatcttttgattgttgatttaagcacactactaaaaatgtccaggttcagcagtgaccatgttattgttcagttctcactcttcaatgggtttgaccaataagcagctcttaatacagctgatcattcactttactgaaacacttttttccacttacctgtttttctccacattttctggctatttttactcagtctatttttgttgttccttatcatccccacaagctctaagtattacaacataccagtgttcatttcttcaacctctctttctctctagctgtacacatttctctggtagtctctctcatcttgttgatacatccatatgcttcatgtcccaagtttatattcctagcccagattttaactctgtaattcaggctcatatatccagaacatttaggcctttggcttttactttgattgataaaggagttgtgggagagtgtgaatggagaaatgacatgatatggcttacttttcaacaggatcactctggctgctgtgttaagagtagatgaggggaagcaagtgcagaaacagggggtccagttaggagctgttgcagtcatctagtcgaagtatgatgatgattttgaccagggtggtgatagtggaaatggtgagaagtggtcatattctgaatatattttaaagttagagttaacaaaatgtattccatggattgtatataatgtgaaaggaagtgaagtcaaggctgaccccagagtttttggtccgagcaactggaatttcattaactgagatagggaaggttggggttggagaggaggttctgatggaaatttgtgcaactccacttaggaagtgttattttgagatgacacttagagtgctttcattaaatatttattgagcaaatgactggcatctcagccctgccttccacgaccagttatttctatacatagaggctttgtgtttcacgtctccttgtctttgggtttgtggagtagtagttacatggctggtgatcagagcaaagtgaatctggggataaaattaccccatatacagacacaaacagatttttttttttttaatgatgagccccaactctaacttcctcctattacactgagacctgggtttttccagtgttgtgatcaaaagatgggcttacttctcaaggtaatctctgtttgaaggcaatgagactttggtttcatatgttttgtttagtcagttcctaaatggctacctcatccacttgtcacttttcaaaaatgtgttgacatctctttattattcttatcactccccatgttatttttgccattgtggcatctatttttatatctctaaattgttattttagtattctgtttgcctaagggacctgagataaatgcacacgttcaatccaagttaataaaaattccacttgcatattcttccagaatctttctttttaatattgaatatatttttcattcaaatatacaattaaacacttttttctttcatacaaatgcaaaagcattaaagttttaatttgtcaaaatgtttactgtcatgatgttgcattaattgtgggagattcggtgctccgcgtgatctcctctcagacatttagagcaatcttcacttgtgaaattgcatgagctcctagcataatagtctctggagtattttggacactaaataaatatttcttgagtgaataaataaattctcgaagagctgcccacctttgacgtttttattctcctatatttttataggaggttaattctcccatatttttcttcctatatttttctcctatatttttcttccagtatttactattccattgatattataatatttattcaactgataccttctatgtgtaaggtgctgtggaatatataatactgatttagaaatagttcttgatctcaagacatttacagtttattaatatagaaaaatcatgtaaaaataaagggctagactgtaataaggagcataagagtcgtactaataatttaagggttcaggggagtgagaattttcttggcaagaaaaattaggatatctttatgaaatgatggctttaagataagccttgaacagttactgggattcaacctaagaaatggaaaggaagtcactctaaatgagtaggctagcatgtgtgaagatgaagggacgagaaaatgtattggttgataagtattcgtttagctcaattagagtaaaaaaaggagaaacatggaatataaagccagaaagaatttgaaacagatgtgcttggccataggcaataggacagaaagaatatgggtggtttttcacagggtgacacaaaaggttaatccataggagattgctgtgatcagacattttctttgggaagcctgttggaaagaaatgaaaggtgattgaatgctggcaagagaaataagtggtatcagagagatttgagtctctgagaaggatgtaggttctatttccagatatatgggaattaggagaagatagttttggaagtattaataggataatagtaattttagatatagtaaatttagagtgaatttcaggtataaatgtctaacatgcagtagaaaatatgaaactaagaacttgggaagaaagggttaaaataaagacaacaaaaatgattaaagaacatcatattatgtgatcactttctcaggtttaacacatttagtttttgaaaagttgctattttggaatcatttttgatttttattaaaaggcgcttctttacaaacaaaaaatgcagcttgtaattttttatattgaataaattcatatttatttaaaaataatgtgcagttacatcatttttacatttaattcccaaacatatgacaagttacaaatatctttttatattttgtgggactgttataaaattattagtcatttgtgcacattaaaaacccaatgccatattgaagaaataattggaaggtaaaggttatattttctccaggatattaaaatacgtatttctccagatctgttgttacagtcagattgtcactttttatttttcttatccttagacttaggtgaatgtgtattctagaatttatattaaggtcgacatgatccaaactttatgtcaaaggaactagatagattcagcaacattttcatgtttacagttaaattaaaatttcaaaatacttaaaattattatcatagcaaaggcttgtgataaattttaaagcatagatgtgtatgaaatgattgtaagagttcttgttttctctgtcttcaattatacttcccaagttagtattcctaaaatttgattatataaatctcttcaatgagaaaaaaagcacaaatatctgtctttttattttttatgcgtgtatttatttatttattttgagacagaatctcactgtgtcgcccaggctggactgcagtggtgcgatctcagctcactgcaacctctgccgcctgaattcaagtgattctcctgcctcagcttcccaagtagctgggattacaggcacctgccatcatgcccagctaatttttgaattttttatttttattttttgagatggagtctcgctctgtcacccaggctggagtgcagtggcgtgatctcagctcactgcaacctccacctcctgggttcacaccattctcctgcctcagcctcccgagtatctgggaccacaggcacctaccaccatgcctggctaattttttgtatttttagtagagacagggtttcaccatcttggtcaggctggtcttgaactcatgaccttgtgatccacctgccccggcctcccaaagtgctaggattacaggcgtgagccactgcggccagccatgtttttattttaatattaatatgtgcttaactacacatattatactgtaactttttaactgaaaaattgccataagcatatcttttaattcatgttttaggagaacgatagagctgtagatatcaatacttgtattatttcttccctttgagatgttttctaaaacaaaaagacagtgagaaaacaatgaatcaccacaatgtgatctaggcaatattagtgaatctggatattttttatgcaaagatactaaaatgtgattctaagatcttcattcacgttttcaaaccacatatactgaattcattctttatgttattctgtgaagcctccttgcaaatatgaggttacatgcttaaagactgttaaagtctgtcttagtttggagaagtatcagtgacttataaagacttcatttccaagaggttgagagaaacaatattttgttttatccgttcaaaaccagattagcattcgaagatatattgataccttggactggtacttagaagggagaagtttacagtttcctatgagacccagtgagatattaaacattgtgtgtaattaccttttacagtatctgctttgaaataattgaatagagatatgaatatttggcaaaatatgtattttattttagaatgcattatgagattaactcaagccacatttgccctcaggcacacaaggacaaacattctttgccttccattctgatatcttcttggctataggtcatcttttcataacctgagatctagttcacagtgaaggacatccagtgacatgtggacaatcggattggtagctcagatctctgttgggtatcttgcgttctgagagctacaacttttattatacagagactctggtcagccttcagtagtatatagttaaatcgtgggtggtttttgcagataatattttatttggagatttactgatgacaaaactgtttgctttcagagttattaaaaatcacagtgtgggctgggtgtggtagctcatgcctgtaatctcagcagtttgggaggttgaggtggatggataatatgaggccaagagtttcagatcagcctgggcaacactgtgaaacccaaactctactaaaaacacaagaaaaatagctgggcatggtggcacatgcctgtaatcccagctgcttgggaagctgaagcaggagaatcgcttgaacctgggaggcagaggttgcattgagccgagatcgtgccactgcactccagcctgggtgacagagtaagactcaactatcaacaacaacaacaacaaaagttacaatgtaaataaaacaattaagtacagaatcacacttataaataaaataattttaataatacaaatatttaaacaatgttatttaaaaatatttcaattttaatattttatactactgttagcagtaaaaatcctataagaaacactgattgtaaagtagtagcttggacattccatggtacattaattccaaaccttggacatagattatgtgctttcagtttgttcataatttattatgaatcaatgacaaatacctacctttatatttagtgttttcactgatttttcaggctaccgttcctttttgcctaatgagttgttaacataagatatggtacttttatcttcatttatttctctccttatagcatccctacaagacctacattaactagtcagcacagtgagctctgaagtcttggacttgctttatgtaacccaatcgctaatcacagggcccttccactgccattttctttcacctgtgccataacttcagcccttatttccttttaattcatattgtggcataccaattctactaatgatcaacacatgccttttttcctcctatttcgtttgatttcttatgcaactctcacccattttatgtatctttactttaatagagacagtgacctgcaataattaagaattaagagacctggatccaaattttgtcttgtctttttattgggcaagtcaatattttaagccttaattactcaattttcttatctataaaagacaactctgtaaagttattgtagattttgaaaataaatcacttaacacttcccgtgacacatggtacttgataaaagctgggtagtcgcaggcagatggtcccttacccatagcccttagtttagatgcatttttagaattcagaatttatggactttaaaaggtatgcatatttcatatcgtacttaatatatccaacaggatgttagtcagcatctcaaacaagtggataattctgtaggacaatgcttatgtgtgaatttttacacagaaatattagcctcccattaattaaagtcaggtattgttaccaaatgagttatgaaaaaaccattattcaaattttggaatcgagggtaagtgagtaggaatccagaaaacaagaagaaatttttcatttttcttattgtaaactaaattttgttctttcattttgactacctggatgttttctaggtttcctaaatatgggaccataaagcactttttttacctacacttccacaactcatccctctccccagctaccctcaccactccagatgtcttctgagaattaagggagggaatgaaatagagttatttctgtaggagcataattgttgggcatggaaaattaatgtcacattaagaatttttttctccctggaatttgttagggtaagtatatattatctagggagaaaatgacacaaaaaagcattagtttttgtttcttcctttgtgatttaaaactggcttttcttatatatattttaacttagaagatgttttagcaagatttgtagttaaatgaaatacactagcaattttaacgtgtgtaatttattgttttacataagtatttttgggttttagagaaatgtagattgtcttactgacctgttgacattgatttttttttcttccactaataaggatctgtatagattttagtctgttccttcctgttatctattgatatgggggacttgctatcaggataaaagttgtaattgaattataatttcatattatgtaattattaatcacaattgattctagtatttttttttagtgtccaactgaaaccaaagcaacatttggggttcatcttaaaatagtaggagactggacaggtatgtagaacatacagttttaagatacattctttgaaaatagtggaatgtaataatttgaatgtgttttaatataactaccagcatgtatagagatgtgtatgtgtttcaagctgttctgggtttttttttgtttttttttttttttttttttgcttgtacagttttgacatctgtgttttctcttttaagatgcatttttgcaatcagaatacctttgatatcagtaattattaataatatattgttcagtgtgcttgcaaatcataagtttctacctacttgtcaggtgtgctggcaatagtgggaatgctgaaatgtgtttcttagaaaacatgagtcaaaataatcaacacctgatattgagatcacacaaatcttccagttcttgcatgacattttttgtggtgttccagtatatagggcaacttcacagtaactttggaatagatatttttcacagcaggcctgttggtgatactttacttgtcttcagtaaatactttttattacctgagagatgcattgtagtaagagctttgagtaaataaaagaaacattattctctcttatattaatatttccttgacccgccagagtaactgacaagtgagtactcagtaaatgttggcttgttagttggttggttatgttattgttacaggaaagaatgcagatataaacatgaatgcaaaagtaaatttaaatattcttatacttaggtgctaaacgaggagttggtaagtaaaatctgtagggaaccagaaaagtgtagattaaatgtggtctagggctgtaagagaagcttcacagaaaagacagaatttgaactgaagcttaggagtcaggcaaatgaagaaagatgtaggtaatttaagtgaaagtcacagtgttgtcaaaaatcaggaaaggcaatgattaactctctttggaaaggatgaatccaatcagtctttaatcaattaaacaaaagcaaagtcaatcaaacaaaatgaaacaaagacaaagtcaatcaaacaaaagcaaagattttgttctgggtagtagcacagaaaagccatttagggccagcttggtgaagattatgaatgcctcagcaaaatattagagtaaccaagggactttagggaatttttgaagcatttgaagcactatgatgaaaatggtattaattaagttgctagttggacagattaaaatcaagggaagacttgaaggtacttaaaggcagaggggaaggaggcagtggaggggtggggatggaaattggaagtaatggatttgtgaatacaagttaagaaggtagcattagaaggaagaacctaatatctctaaaaaccagggaaggataagatgttggataataagaaagatgtgttttgaaatgaggagaacaatagtttatataaggaggttatttcatagagttaaaaaaaataatattggtatgtataaaatgtaatgtctttagaaagggtagccagcttggaattggagacttaaaaaaaaggaaggaaatctgcaacataggatttaatgggcaaacatctaagtgaattaaaaagatctttgagcagtaataactcattcagagtcatgaaaaaccaggcttacatggataattttcagatggtagcattcaaaagagatcatggtcgtcctctgataggtatacactggtggagtatgaacatatgaataatcacaatatgcccaatataagttgatattatcacagtgttttttttttctactgttttggaaataaaaaataaggaaagttcttttctggtgagaatcccaatatagtaggaattaaattcagtcatgaatggtaaattgatagaattctatatctgaaagaaaacatgcaatgaaaacataatttaattcataagattaagcagaaactcctgatggtttattattagctattgttactgagttttttcacaaagttattttttattaccagtagctcattaaaataaatgatgtcttactattttaatcatctctattaggaacacttaatagtgttaattttattctccctttttaatgtattatgtcactgagagaaacaagatcattctattcagagttcagttctagtcagatgcttttcaattaatagaccttctttgttgttgacttgaaatatttgttgacttggaaaaaaatataagcagtcatgcagagaacacctaaatagtcatgtcattatctgacactttagttcaaagagatttagctgccttacaacaatgagattacaactattgaaggaaaagtaggagcattaccttcaaaatcaagaatcattggtttttattctaaaagaattgattaaaactcggtattaagagcagtaggtataggaaataccaaagagatacctaagaggttgaatatcaaaggtttatttttttaaaactgacttagagatatttaatatgactttttatttgctgaaatatgttctgcattggcagcatacagggactaaagagcaggtttaaaatagctccagaaatgatctctccaagactaatcaactatacctagctatagagtgctggaggagcaagggaagcagctatgcggcacaagacaaagaagcaccaagtctcatatttgttgtctagattttcattttcaccagacctctaattgcatctcctagatacgtggaagacctgttaaagtttagaagacccttaaaacattttagacatgattcagtgttttttcttgaaatgatgctagtacagtagatggagtggattacccaagtagatttctcttttaattgaatgaataccttattgctcttctagaagcagccattctttccagtttcaaacatatggtcagagattattgacttgattatcattttaagtgtacaaaaatgttttgttaatttcttcgttacatatgattagtattgattaatgtctgagataatgctatacccttgcttattttggtggtctaaatagccacttattccacaggtgtttgtgttgtgctacaacagaattaaatacataacatccacatgtaattaatgtaaactttctgccattgatcccttcagcagttaatgaattagcaataattgtgagtaaatattcaataaaggacttgtagcatgtatcacatgatgtttctatgaatcttgggtataaattcccatgttgtctactggaaaagttttctacagtgagaagatatggttatcttttaggattaaaaatgagaagacagggccatatattattgtggatttgcctcagtcacataatatattgacttctcacagtgcaagtaatcttaaatataggtttagttaaggactgggccacaaaagagttgataactctcttatttgtttctatatcactgtaggagccagtcgtgttataggctttattcagatttttcatgaaaagatttaaacagaacatgtgttacgtgtttaaagtattttttttttcatttttggaaactccttgtaagtcagattataaccacactaatttatattaatgttattactttattatgacaacatattttaggccaattacatcaaccaccttgcactagatatcactgtgaatggcttttggttgctgcaagaagccaataaataaataaacaaacaaacaaacaaacaaataaataaataaatcatatttggatatatggaatctcacagattttacataattcatattcatacaatgtaaactttaagcttataacaaatattcattatcaactgctatatacccaaaggagtgcctggaagtactctttttgttgttgctgttgccatgactagtgaattacaacgattagtcatttgtggaagataatatttaaactattaactttggctaataatcaaatgtatgttaaacagctactgtgttccagactgtttattagtcactggagatacagcattgagcaaaagtgacaaagtctccgctcttatagagattgtgttttggtccatggggagtttatcattttttttggagatgttttggtgtgactctatctcctgccacttagccatggtttatagattgtagtagcctcacctataccctatgtcctcccagcccctgtggatggtagtaattttcttccactctttgtattttttcaccatcctcaatttggcttctcacttcttccctcacctgagtcattagttccctctaatgaacttcttccacttaacttatgcagtcatgtttctgcctggatctgcactgttacacaaggttagaaaagctctctgaacagagccctgaataaagaggagaaatatataggggaattgcatttgcagcatacaaggactaaagaacaggtttaaaatagctccataaatgagttattttaaaaatatatatcttaaaaaagtttaagagataataaaagtaagagagtattttatatctataaaaatatatctttaaaaagtttaagaggcaataaagtaagagaggatgtggagttgttaagtatagaccagtctggcagtatgcttgggttacctcctagggcttgagagaagtgcttctcttcccacctccatagtcagtgaagtcatgtctgatagcttcccatcactcacagtgatagtagttattccacagaaattgaccaacatcattcccatggtgtgaatgtgtcccctgtaattcgtatattgaaatttaatcaccaatatgataatattaagaggtaggacttttaggtgatgattaaatcatgagaataaagccctcatggattagattagtgccttatgaaagggattgagggagttgattgactctcttctgctcttctaccatgtgtgttcctccccctttgctcttttgctcttctgttatgtaaggacacagcagtaaggcaccagcttagaagcggagagcagactttaccaggcatcaaagctgctggtgccttgatcttgtacttcccagcctttagaactgtgataaataaatttctgtggtttataaattaactaatttgtggtattttgttatagcagctctctaacaaagacaaccataaagtaggtcttatgtatttatctatcattagacctggctattaaacatttgccagaataccactggacaaattctaagaagtttgtatgtaaagtgaaataaagaaataagtcagcagctgaaaggaggaaataaggacgaagaagatataagttaaagatatatgattattttataataattataacaatatactaattatgttataatatatttatacacttatttgaatgatgagaatgaagtggagacaggaagttttatattgctggagagatttaggatatagttccaggagcaaatggaagatgtacaagtttctgggaagaaaacttgggaggctttctgggtcaaactgagtgttagagatatatagaacttgcctagagtgggggattattccacggagaaaaaatagcttgaatggctcagaagggtgaactagcttggaatgtcaggaaaatgtcatgctattgggaggcctggctggggtggcatccaaatattaggccaaggaagagcttgtagatcttgctatgaaacttggtcgtttcccaaaagatgctggtgaaatattgaggagttttaaacaggaactgaaatcaaatttgccctttatatgggtcaccctgccaatgttatatcaaatagaaaggaagaagactaggctggaggcaaacacatcacattaaagattttttagtgtcaagcaaatggaagactttatcttttgagttttgagaaaggagtgatctatgattgctgcaaaaagccaataaataaataaataaataagactgagcaatatcactgttagcctcataaaaatcatgtcattaggaagatgcaaaggaaaggtctggcgatggtacatattgctgcgaattactgagggcattggagaccagtaagtggagagagttagtgtacaaaaagaggcacatagcaaatgggcctattgctaaattcttcctgtttctacatttccccagaactatgagaatgattgatttttatactgatctggcttgtgattagcagcagaagatgaatggcaaatacagatgtaactacctgtgtatatatctagatggatctgtgtcaggatgaggattaacctattgtatcttaaagtatatatgctttgtataatgaaacactgtagttctggcctcttgtgagtctatgtggaaatcatttaggataatgatgaaacttaacatggcttatttactatcacaatataataaatcattcaatgaatgtgaactgggcataaattctacagcctcagaaatcaaggaaatttttttatcaggaaaatgagaggcacattatatgtgtactacaatttaagtgcccatccattctcaggaaagaagataaattgtttttcccttggtttctcattttatgaacgttaaatatatgctgtcatgttttttagtaggttacagctcacttaaaatactacagaaatataaaaattgcttagtaaataaagaattcaccagtcattaagttttattcgttccagccatttcacaaacccaaacataggagtaaataccaaatttttgttttctatccaattttcacaatgttctttttttttttttttttcttttcagtttttagagacaggtcttgctgtgtctcccaggctagagtgcagtgatatggtcatggctcactgcagccttgaccttccaggatctatggaaggatctatggatcctcacatgtcagcctcctgagtaactgggaccacaggctcagaccaccatgcctggctaatttttatattttttgtagaggcagggttttgccatgttgctcaggctaatcaaactcctgggctcgagcgatcagcccacctcggcctcccaaagtgctgtgactacaggagtgatctactgtgcctggccaaaatgttactttttagttttgaaaataaacaaatcatacaattactggacctggaagtagagttattgtggtgaagtggtttctttttatggattgttatatttttattagaattgttctgttcctaaaagttgcttagagtctctgttatccagtattttctacttgattttactatgtaacatggaagaaaataagaattatgagggattttcttggtaacataatttattaatcaatgtcaaaaacaccacataatgtactgaatggctaagaaggcatatgtcagtttgccaaatgagcctagcgttaatggactaagtaatttcaaaggaagcaaaaggacaagggttttgtgccattatcattattatcaggaacatttttaagtactcattttcttgatacacttgctaatcattttatgtatttgcttgttgtttttccctgatccatagtcttggtcttcggccaagacatcttctatttaagaacagagaagactcactacatggctgttttctattggctttaaaggcccatatattgcatggcattgattttatttgctcggttctttagatttgaacttcataaaacataaaagaaaatctcctgtttttttttttttttttttttttgtgggcgtggtcttggtcttggataaaatggcctgttttttcttgaatacacatctaagatatattcagtttctgcagaagccaggaactgaattagtatggagctgagtcttgatcagtctgaggtgtttcttttgatgaaagccaacattgttaaaaaaaaatgcatttgatgtgacaaatgaaaatataacatttttcttaaaaggtggattgtagaaagcttagtagcaataatgtgtttacccaacaatgtctgttatttgccttcactttctttgaaactgtttttttttttcccaccctctttcattttttgttatagtttagcctctgtggcaataaacgccaatttatattttataagaaatccagttctaggcattgattcattgatgtatttaggggccaagaagtctgtctgtagttctttcaaaaactgcttttgatttttttaaaataaagtgttaaacaaataagaagcaaaataatgagtatcacagaaatagacttttatcactctgctccccctggaaataaaaggatccattaaatattcttcctttgtgtaatactgcattgtctaccttcagaccttacagtatttaaaagtaccagatgttgaggcatgcagatggcatatgaccctgctaagctttctcttatcctgtaatccttaggcaagaagaaagtaaaaggagggaggggagaaaagggagtactgtatattctcgggagagaataaggcagtatgacggcagtggaaagaaccctggactgtgagtgtttttgttttgtttttgtcttttctttaagtatctttgcctctttctagccatgtgaccttgagacaatcagccagctggttggtttttagtttccttgtctacagcataccaaattgagggagttgtttcctaatttctcagttcattattgctgtaaagtggtataattattttgaaagaaataaattctaagatacagataattcaattccacataatgtgtgaatgatagtagataaattttggtatagttcagaaaatattacaggaatactatggagaatacatgtcaagtagaggatttttatgttgcttattttgttttcctattagtgttcttattcattcattagctctggttgtacatacatctcatcttctgaaaattacatgtatgggtttagggatttttttccccttatgtaagacagtataaagttctgttttttatattgctttgacatggccttaatatttgcaaaaaagatagttttatataaccagagcatgcgagtgatagggttttttcttctggaattgtaaatcattttattttcttctagaattataaatcattttcatttgaatcctagaatcttatgacacaagatttgtctacatatgtaatatatataggcaaatatatatgtgtgtgtatatatgtatgtgtgtatgtaaacatatatatacacacaaacagagagagagaaagagagagagagacagggtctcactctgtcacctaggctggtgtgcagtagcataatcatagctcactgcagcctcaaaatcctgggcttgagcaatcctcttgtctcagcttcccaagtagtgaggactacaggtgtataccaccacatctggctaattttttaaactttgttgaagagcaagggtcttgctgtgttgcccaggctggtctcaaatccctggcctcaagctttcaaatattgggaatgtagccatgagccaccacacctggcctgcctatatctttaataagttgcaacttgatttcctggtttatgtaaagtagtactaatttgagagcctctcatgtttatctgaaaccaatagtttaaatagcaacattgttactattatattgttactattcagttaccatgtattactatgcattaccatgtattattattgagttaccatggtaataaaggacattcgcttgatttaaacaaacttttcagtagggagatgtatgctccatatctttctagttggtatggatatactctaagtttgccctttaattcttctttttagaaggaatttgtttttctaagattaatatgcatacttctaaggaaaataaataccaaattttgacaaaccattaatttctttaaatccctagaaataatgtgcttctttccctttttaaataattttgtaattacattctaaattcttttcaagtagctataatggcattgaagttcttttgttgtcctggcattttttgtgtgtgcttaataaacagagctgccttggtgataataatttgttttgttcacagtatgtgacaaatgataggtactcaataaaagtttgttagatgagtgaaaaagtgaataaaacatgctttaactgatgaaattctgattatccaaaatattgattttattttcaattctaaattttctatcattatagattattgatatatatgtaacagagcaaaaatattcaccttatctagtaccacggctcaaaaggacttcctttgttggtttgttttattttttataaaacctctccgcttcttttgctttttgttaccagcatatccaggctaagttgactgttctattccaaactctcagagcatacctttagcacttatttacttgtagcgtttgtatcttttgataaataatttagaatgcaattacaaaattatttaaaaaaggaaagaagcacattatttagacctcttctctgctagacctttagcccatgaagaacctcagttggtgcctgacttacagtgcatgctcagaaatgttactgagaaattacttattttaggtgttcacattttgtgtctacatatttaaatagtaattcctacatgttgtgagaaaactcatttgtaccttctatttcaagcatcatgtgtgtgtgtttgtgtgtattgtgtgtctgcattggtgtggtgttttccttggtaggtggaggaggggataatactccaagatctataatatggggagtatgaatgaatgacaactactcttgaagatatgttcatgtgtggtagtgtgcacatccatgccctacatctactctttaaatatatatctatatatacacacacacacgtatagatagatgattgatagattacttttagataaatactgaaaactaaaattcaaacaaatctaaagattaaaaattcaaacaagatatagataaaataaaaagctattatatatgatcaggagccaacaggcaatacttaactgatagagtcaaggtgggcatgatcaagatactggacagcatggctggaagagtaatcaaaatggattgacagtgaccgcctgcacatgccacagaggtgttatttatgtaacatctggaaggttctggaaaaagagaaatgatttattgctgatctttattctacttaaacacatgcacatgcatcacaccccacagtagccgagaacttggtagaagttctcagtacaaagtggagatctatgaagcacctgtgtttcaggttggattagctagaaggtgtgtgtgtgtgtgtgtgtgtgtgtctgtgtctgtgtgtaatgtaaaatgcttattagggatcaatacccatgacaggaaagagaacaaagagggtttgggggaaggaagaatttgaaacaaggcaggttcaacaaagcccagccaaattggtgggaagaactagagcaaatattgcccatcagagttgcctgtgtagtgctgaaatatccttgccttgttcagtcaatggatgtgagctgctctgtgagaggtatttgctttgcatctgaggccgaccctgatggaagtgacagatggagattgcctgccaactgcgctctccacagctgggcaacaagttcttcactgaagaggcacttgggggatacttctctgtatcaactacatgacccctagcttattttcttattaatatttaattaaaaataaaatctcatgtgaatatgaaatggagcaggatgctaggacagcaggaataaaccagaatagtctcagtcaaacaaagacatgtggccccactccctttcagtgactttaattaagatttcttttcattccttaagcaaatattcttttttgttttgttttgtttcaatagtttttggggtacaggtagattttggttccatgtataaattctttagtggtgatttttgagattttagtgcacccatcacccaagcaatgtacactgtacccaatatgtagttttttatccctcacccgacttctaacattcccgctccagagttcttaaaattcattatatctttcttatgtctttgagtcctcaaaggttagcttagctctcacttataagtgagaacacaggatatttagttttccattcctgagttacttcacttacaataatggcctccagctccatccaagttgctgcaaaagacattattttgttcctttttatggctgagtagtattccatgttgtatgtataccacattttctttatctacttgttagttgatgggtgcttaggttggttccatatctttattgttgtgaattgtgctgctgtaaacatgcatgtgcctgtgtctttttcatgtaatgacttcttttcctttgggtagatacctagtagtgagattgctggactgaatggttgttttactttaagttctttaaggaatctccatgtattgtacatagtcatttgcactaatttacattcccatcagcagtgtaaaagtgttccctttttaccacatccataccaacatctattgtttttagactttttaattgtggccattcttgcagtagtaaggtagcatctcatcgtgattttaatttgcatttccctgatgattagtgatgttggccattttttcatgtttgttagctgttgtatgtcttcttttgagaaatgtctgctcaagtcctttgtccactttttgatgggattatttgtttttttcttgttgatttgttttaattccttgtagattctggaaactagtcctttgtcagatgcaaagtttgagaatataagcaaatattttttaagcaactcaaagttaaaaggtggcttaaagatcactgaactcatctgactcagttgtgagttcagaaaaggaattaagaatagaggcagactaaggtcaagaactcaggctctctgacaaccagttgagtgttgtttcttttattttttctttttccaagagaatttcttttctgctttatttaggtataattgacaagtaaaattatgtattttcagggagtacatatctctggtatacatatgcattgtgaagtgattaccacactcaagctaattaacgtatttatcacctcaaatagttacctttgttgtgtgtggtaagaatacttaagatctacttggcaacggtgtcttttctcttatgacctgttgctgctaaatactgcagactgtatgagtgaagaaagatttgtcctttggtatctcctttctcatgtatactctctgataatatttcctgcattaagaagtaatcctcagcctatattgccaaaacaatgtgaaataatatcgatattatggtgcattcatcttattgaccctttttggggtatgaagtactgtctgattccttgcaatataacttctaatactattaataggttacaatatactaggtgttcttaaaactaaggtaaagactttaatagagtcttaatctttaatgtcccttaaggatttcgttttgatgccatttaaaaaaaattaaaactggcaaattagtataatgtgagcattaacagaaagataaaaaaattaacctattaataaaaatgcaaagaacttctgttcaagtaccttttgtttagggaaatactgtctctcttagaaatattttatatgacttcttttattaccctgaaaaatctaatactcaaaacagttaaaatattcatttttatagaggaggttatagagaggcagttagggaagggggattacctgaaggaaaacaatgatttggaattggcaaaacctgtctgggtctctctagcaaacaataggtctttcttaggttgctgttaaaaaaactaattatgtgacagtgatcacatctctagatgcaaaggatctttaggttatacaagaatagcattaatcattgttacttttgttttttatatatttttttctttcttttttttgtagtggtaagaggttttattttcttctcatcccaggaataggtttgcatactgctaagttgcagtgagctgagatcatgccactgcactccatccagggtgacagagcaagactccatctcaaaaaaaaaaaaaaaaaaatgcctactgctttttattgttatgtaaatccttattgcatttggtatattctgcatattggggtggattagagattggtcattttctgcaaaggagaaaatgaaacatcttggtcacaaaaagatgtagaaaaagtttcaattagaaattgaaagaggattttaattttctcatctttgttttcaaataattaagtatattgtgtcacagttgattaaccagagaatgcaaattaatataattgtgtgcagtatgtcatccaggtctaagggcctcataatctttttgttgattgaatgggagaaagaaagagtggatgaaggtctacaaaagcttgtgttaattaagatatatctcctactggtagaaaatcacgttcagacattatcacatcgttagtcagctcatcacggtatcacttcgcagaaaatcctgtttttttttttccagtggctttaatgaatttcttctaagaagtcctgtgaaaggactgagctgtagtatttggataactgtgccattttcttaagaaacagtttgagcctgctgagaaagtaggtcatctggtttgacattttcctgcaaaagaagtagcattaatatatctttttttttttttacttaacaaataaaacatcaaattattttggccttttcctcataatcaaatagacaacaggatgctaattaaataactgataggcaaaaatctgtgagactaaagaactaaataattataaataatttttccatttacttgaacttttctaaggataattgttatcatttatctatttttataaagaaataaatgaataatcagtatgcctttataagataaaattaattgttcacatttaagaatttattaatataatgataaaaataaaatttttttaaaagacatgcttttaaagttctgtgtttactttctgtttatgtatatatgaaccctttcttttcttttcttttcttttttttttttttttttttgagattaagttatactcttcttgcccaggctggagtgtaatggcatgatctcagctcactgcaacctctgcctcctgggttcaagtgattctcctgcctcagcctcctgagtagctgggattacaggcacccaccactatgcccgactaattttttgtatttttagtagagacagggtttcaccatgttggtcaggctggtctcaaactcctgaactcaggtgatccacatgcctcagcctcccaaagtgctgggattatgggtgtgagccaccatgccctgcctatgaacctttttgacaaccacgatagctattcaagatgtttgcttggtattctttgtatttctgataatctgattaaaggatgttccaaatataggaacattagttataggtttccttatagctttataagtgatgtcttttttgctgcttttgctgtatgtgtgtgtgtgtgtatgcacacacacgtgtgcatctgtgtatgtgtttttagtcctgtcaatatgtcatctgcagagattcttttctctggaattattgtcatatgtcctttatggttatgtaaaaagagaaacacttattgctgcgaaaaggatgtattatattatagttgtgtgcattaagaattccgaattttgtttgcttttaacaagtttgggagaaattcactaaactttaatttatactattacctttcaaggaatatcataacacatatagctgtttgatttaacggttctttacctgatatgtaaagttcttgtttgctgttgggttttggcttgatttttcaagactcattttaggaaaaggctaagtgggaaaaaaattgaaaagatagagcattacacattactcatttaatgagtactgcataaattggcaagtagactgaaaaccaagggttatttatcatcagaaagtttactagtcatttgattgaaagaaatgttaattttgtaaattaaacagagtaatatcagcccaaatatcagccaataatataatatttaaaaatgtgaactaaaagagtataattcgagaaaaacacagagtatttttttggatttctagacttcagagtgtaagcacatctgtgtttggatctcattagttcctcctcatctatgttgtaagaaatgtcagaattttgagagaaaaaaaaacagtagaagccagttatgtatctctgattcagtatgttttaataaatatgaagataaaatatacattctgcttctcaggaagcactggccactttgtgactgccgtattccaaataatttaacatctagttattcataaactaggaaatggcaattgtcatcaagtgtatattttcatcattttgtggaaatgctcaccttcagttagtgaaggatttactgcagctggggagtgttagctttgcatactatctaagcctgactgtgcgaccgtatcaagacaggagtatgggtccacttgctgttcatggttgatatatgaccgtttggtctctgctgggagttattatgattaaccttaacaaacagttttctccagtaaaaatagatgttggaaatatttcttcaacaaatatttatccagcaccttaattatgtatcagataatgttctgtatcttggtggcacaatactcatctactagaagaagaaagagggatagagagataaatacatataacaataaaacatagtgtgataaactctgtgaaggtggaagcacaagttgtactgggagtgtacagtaggtccagcctattccaaattgggcaggaggagagaacaaaaaagtaatggagggatcaaggaagcctttccataggtatgactctagaggtaatgcatacctattcctgaaaatgtgcatactctatgccatgcagatagctatgcaacgtaagtatttccaaggtaacatctaggattttttcctttgtcctttttttttcccccttcctcttcccctccccctcctattttctctcttttcttcattatgaattcatatgcactgaagtttactaaatcaattcttagctcatgatatgcagtcattattggtcttttcctggccgtcattcacttatttatttattcatttatgatattacaattaatacatatgaaacaccaacaattacttacatttacccttttgcttctctcctatttcatccccctacctttcctaaaagatagtcattattctgaattgtgcatgtccttcctttttaattggtttgctttatttcatatatatcatacttaaataatacattgcttagttttttaactcaataaaaattatgttctgttacatgcaatctgcggagattttatttcactcaacattatattaatatgattcattaggtttttatttataaataaaatcattcagtttcacttcagttagtacttcattttgtttgcgaataagcacaaatgtccattctctcatgtcaatgagcaactgagctgcttccatttatgttgttctatgagtggtgctactgtgaacatgctcatacttgctgtctaagacacatgtgaaagtttctgcagggtgtgtccctgagaatggaaatattgggccacagactttgcaaaagtaaaacttaaatgataatgccaaattgtcttcaatagctattgtaccaatttggactcccaccagcagtacataagagcttaggttgatcaacatcctctccaacacttggtcttgggagactaatttctgtcaattgaatgctacatgatgtaaatgctagttaatggtgtctggttttgattcacattgcatgggttactaaagagactgtgcatctcttagtatgtttattggtcatgtatattttctctaacctttcaatgataagatttgatcataaagatatatgttaccattaaggaaaaaaaatatatttttatatttatatatgagaaatatctatatgtagaaatgtatatattatgtatatttataggataaatataactatttcaaatattaatccaggcttaattttatatatttaaaatatatatatgaatatatattatttatatatttatacctatttatccttaatggctacatatatatttatgattaaaatattataatccatctatatatatatacacacacacacatacatacactatgtatatattagtaatacataaaatggtgggtaaatttctaataaaggatggatatacagtcaaaatgtctaacaaaataaaccaataggaaatacttccattttgaaattattttcatgacttttatcttttcacagcttgatgtttatttttcttttgacagaacgatttcgagatttactactgcctccatctagtcaagactccgaaattctgcccttcattcaatctagaaattatcccaagtaagcaaaaggagttcactgggttttgatgaggcaatgggcatagtgctgggagagatttgggcaggcaaaaacaaaatgtaatctttcttaagatttctgaaaatcttgaataacttaccctaactaactaagacatcttctgcaatataatgtctcaggctccttgcagctgggtcatagaagaaatacttacttgtaattgcaacccagctttgactgaggagctgccgcacagtgcagacaacatgctgtgtgcatctgtgtctggttctttttgcttgatgtcatatcaacagggacagtattttgtcagtgatgcctcatctggttttctatttactgtcctttaaatgcaaggattcatttatattgtagcaagtcattttcaaaatagccgtgggctagatatgatttttgacaatctctacatattcttatgatttttgacaatctctacatattcttatttatcgtattgaaaacaggggaaatgaaatcttctgacgctttgttatgtgaagcagacctttccttctcatagatgccccaagcgtatgtccttgttgaaggaatatgccttcatcttcccgaaggttaaggaaataccacgactcttataacacatctccttccctaaagactgacgcatgctgaatcttgatcattcctgtggcatcttggggcctcctctatgagtgtttaactctctttaattgttagtgtgcaacaggctaaagaataaataaactaatatctaaaatagaaaagaaaggccatcaacttaaaggaatagaatttggtttatacatatttcatctaatcactatgccaaattctttcatcgctttgagagttttttcaagtattcataaactttgctttccggggaaattattttccctctaatacttagctttgataatactcacttaattatgatcacaaaaataaatgcagaatcctaattatactgcttgtgcattgtttcaaattttaatccaggcttaatttttagcaataaacttgcaatcccctgataacacacacaaagacatacatgtgcctatacagccttgaatgcatactttgctctatacgtacatgttgaccaggagcatgaatgtgcctaaaaggattggtgcacgcctatttgtatttttacttacagtggctgttggcagaggctgatgatgcctgcttttctgcctcttaggcttacagtttgcctaatgcctttgcttgaagagggtagtcatagtagtttctcaggtggttatctatttgcagctacaggaatacctcagagatattgtgggtttgattctaggccactgcaataaagtcaatactgcaataaagctgtcacacttttttttaagtttctcactgcatataaaagtaattttaacagtattctgtagtcttttaagtgtgcagtagcctagatatgtctagaaatactatgtacatcccttaattaaaatatactttattgttaaaaatgctaacaatcatctaagccttcagcaagtcataaactttttgctggtagaggatctttcctcgatgttgatggttgctgactgattaggaaggtggttgttaaaggtaggggcacctgcggcaatttcttagcataaaaccatgaagtttgctgcatcagttggctcttccttttacaaaagatttctctgtagcatgtgatgctgtttgatagcattttacccacagcttaacttctctaaaaattgtactcaatcctctcaaaccctgctgttgctttatcaagtaaattgtcatttcagcattttcatagcttctttaccaggagtagattttatctcaaaaaaactactttcttcctgtaatcccagcactttgggaagccgaggcaggtggatcgcctgagggcaggagtttgagaccagcttggccaacatggtgaaacccatctctactaaaaatacaaaaattagccagctgtggtggcacacgcctgtatttccagctacttgggaggctgaggcaggagaattgcttgaaccgaggaggtggaggttgcagtgagctgagattgtgccactgcgctccagcctgggcaacagagtgaaactcgatctccaaaaacaaaacaaaacaaaaaatgacaaacagacaacaaaaccaaaactactttacttgctcatccatagtaagcaacttttcatttattaacattatatcatgagattgcagcagttcaatcatatattcaggctccacttgtaattctagttctctatttatactatgtttgtagttacttcctcctctgaagtcatggacgcctgaaagttatccatgagggctcaaatcacttcttccaaactcctattaatgttgatattatgacttcctcccatgaatcatgaatgttcttaatagcatctagaaggtgaataattttcaggatgtttttaaatttacattgcccagatctaccagaagcatcactgtctatggtagctatagccttatgaaaagtatttcttaaataataacaattgaaagtcagaatttctctttgatccatggattgcaaaatggatgtaatgttagcaggcctgcaaacaacattcatctccttgtacatctacatcatagctgttggttgactaggtgcattgtcaatgagcagtaattttaaaaatttatttgtataaatttttgtggtacgtatgtaattttgatacatggatagattgtgtagtagccaagtcagggcttttagggtatccatcaccagaataacatacattgtatgcaataagtaatttctcattattcacccacttcctagcccccctgcaacctttcaagtctccactgtctatcattccatactctacatccatgtgtacacatcatctagctcccacttttaagtgagaacatgaagtatttaactttctgtgtctgagttatttcattcagggtaatggtctccagttttatccatattgctgcaaaagtcattattttgttcttttttgttcctgaacagtatttgattatgtgtatatgcagtattttctttatccagtcatccattgatggacacttaggttgaatccatttcattgttattgttctggtgtgagctttgcttactgcctatgtgagtagtaacactttggatagaatcttctttttttttctctggtgggcttaaaatattcagtaaaccatgctatctataaacagatgtgttttcgtctggactttgttcttttatttatagagtgaaaacagagtagatttagcataattcttacgggccttaagtttttcagaatggtaaatgagcattggcttcaacttaaagtgaccagctacattagtccatagacaagagttagtctatcctttgaagctttgaagacaggcattgactgctcttttccagctgtgaataccgtagatggcgtctaccacttgatggctgtcttgtctacattgaaaatctgttgtttagtgtagtcaccttcatctattatgtcagctagatcttctggataatatactgcagcttctccatcagcacttgctgctttgctttgaacttttatattatagagatggcttcttttcttaaacctcatgaaccacttcttctagcttcagacttttcttctgcagcttccacatctctgtcagccttcatggaatagaagagagttaaggccttgttctggattagtctttggctgaagagaatgttgtgttgtggctggtttaatcatccagaccactaaaactttctccatatcagcaataaggctgttttgctttcttattattcatatgttcactgaagtagcactttaaattttcttcagaaactttttcccttgcattagcaatttggctcactgtttggcgcaagaagcctaactttatgcctatctcagctttcaacatgccttcctcactaagtttaatcgtgtccaatttttgattgaagtaagagacatgcaactctcctttcacttgaaacttagaggccattttagagttgttaattggcctaaattcaatattgttttgtctcagggaagaggatggtcccaggtaagggaataagaaggagaaatggttggtagttgcagtcagaacacacacatttattcatcattgcagataactgaaagtcaaagaatttgtagctttgtaacataaaaaaaattctgtaaagttgaaaggtgagtcaaacaattagaatgtatttcattcacaaccactgctgtatgtatctacattgatattttttcctcatttttctgattgaaatatgttttaagacctaaaatatgggttacaaagcaacttccttgccctataaagttataccatatcacagagtatttacagatcattgcataaccaacatagatcataacatcactaacatggactcattgtgcactggttagtgtgagctgtggtagtttggatttggacttgggtttctatttagtcaacatagtgtccctataatctttaacttcctgttaccaagagacatctaacaaataatgaaatatggaaatgtatgtcctttatataggtgaaaaatattcatgaagagaactgactagttctgaaatgtatatgtgtatgtatgtatatgtttaaaggaaaggcatttaaaaaataactcctgcaatggtgcttgggaacactcttctaaaatacaagaatgttcattaatcaatttttacatttgtgagctcttatttgacccactgccaaagccagggcatccattctcatcaggatgtaattgtagacattgctccatgaaaattctcagaacatgaataggtgtgacagttgtcagaaagagacagatgagtggaaaggaataaaaaaagaatgtgcatctaatacaaaatgcatattgttgatttataggttggaggaaacaaatggagataaaaaacaagttttattgctaataaactctgaaggatttaggttcataacatgtagactagagagtagttataatatatttttatccttgtaaatacagcttggacatgtaaaatggttaagtacatctggtataattttatccacaaattacttgcaaccattttggcaattaaaccagcaaaacatgacccattggctctggaagttttaaccacaatgtaggtaaaaatattgtgaaaatacaagaataaactgtttctacttggttctcataaagatcaagttctctgagcttcctaatatcggaactgtttagagagaggaatatcatttatgacaaattttagagctgttcttttttgacttggtttgctgccaaagaacaaccttgattgtttggacaataaaagcaatgtcctacctcaatctcatttctaatgggctacgtaaaaatgacttcaaatggtgattttgggtaatacccttaaactgcaaagcctcagatgacctttccatagtctgttctccagcttatcctcctttctctttcctagccaagttttgagttcttcttcaagatatcatctatctttaataatttctgttcaatctgcatgtctgtaatgtacttgtcatctgatcctgagccaagttattttattttattttattttattttattttattttattttttagacagagtctcgctctgttgcctaggctggcgtgcagtggtgcaatttcggctcactgcaagctctgcctcccgggttcaagcaattcttctgcctcagcctcctgagtagaagggtttacaggtgctcgccaccatgccgggctaatttttgtatttttaatagagacaaagtttcaccatagtgaccaggctggtctcaaactcctgacctggtgatctacccgtcttggtctcccaaaatgctgggattacaggtgtgagccactgtacctggcccaagttatttttgtttataatagtaacacataatgagcactacacatccaggaattgtgctttatatgcattattaatttaattcttactattcctctataagttaggtagtactgtttccctaattttacagataagaggactgagattcaaagaggtaaatgccctacccaaagtcacatggcagagctgggtctccaatccagatttgtttggcccctcaaattatacttaacttagaagtggtgggtcattgagggattactcccaggtggctgaaaactgtgtatgtgtggagcacgtgtgtgcatgcatgtgcaagcacacatacacttggagtcgaggtataaggagaaatgtggacagggcctagaataccctttgtcttctgaggcaaggtctcactctgtcacccacgctgtagtgcagtggtgccagcacagcccactgcagcctcaacatcttgggcttaagtgaacctcctgccttggcctccagtgtagctgggaccacaggtgtgtgccaccaggcctggcatatatatatatatatagttttttttttagagacataggtttttttttgtttttttgagatggagtcttactctgttacccaggttggagtgcaatggtacaatctctgctcactgcagcttctgcctcccagattcaagaagttttcgtgcctcagcctcccaagtagctgggcttacaggcatgtgctaccatgcccagctaatttttgcgtttttagtagagacaaggtttcaccatattggccaggctagtcttgaactcctgattctggtgatccgcctgccttgacctcccaaagtggggattacaggcatgagccaccacacctgaccagagacataggtcttatcactttgttatcacaggcctggtctttgttgcacaggctgctcttgaactcctagcctcgagcaatcatcccacctcagcctcccaaaatattgggattacagatatgagccactgcatctggcctggactgccacttaaatgaccttggactttgttgtaaagacaatgaagacccatgaaaggattttaagccaaggagaaagataattagacttacatttttatagatttctcatgaaactagagaggtacatgagctaccgcatggggccagcacactagctacttggcaatttcatattcaggcaagaaatgataatggtttgtactgtggtaatagtaatatggaagatcagatagatgtctaagggtgttcggaggcataattaacagaatgtgatgactattatgcaagaaggagaggaggagagagagggagaaggaaagagctttgggtggcttcaagctttttcccttgagtcacattctggtttaagtcctcatgattgagggagagtggcaatctgagcatctttatgttgactttttgttctgtattacaaatgatgataatggagataccttccttctaatgttgctttgaggaatgcccaatgcatgacacaattctttcttgtaagtctttgtgatatttaaataaaattataaaaagcacctggcctcttgcaaaagtgaattctcatcaccattctcgttgtcagctctgttctgccatttctcaaagcaattgcttgcctcagggcagggggaaaggctctgccatgtgggctgcttttatatcttcaatccattctaaatcctgtcagaagagatacattgtcctgtctggtagaggtggctctgggtgatatgctctgcttagattagtcaggaaggagccctttcccttgtgtgtctgcatatttgtggtagtggttattccggtacagtttctacaagcacagtaattcataagattttccacagtatacataatgtctttcattaaagaattactgtctttcatcttctaatccttaaatttaggctttcttttatatagtatgtgaaattcgaatacctggatggcaagagatctaaaaggtagtattctgactagagtgtggaatgtagttataagaatgcctaatgctactgatgtttgcaaaactacgcaagtaggatgtctgaaggacgctggtctatcagcaggtagtggatcccaacccctgggctgggattcacaaggctaaaccctgtcatcaggactgtaaaactgaggcactgcttaaattgtaaagattttggctcagagatctaagtcaagaagctgtgttagcgcaagactaatgagcaagcaataaacaagccttagtgctgactgagagcacaactcattcccgactcagataagaattggttgaaggatagggccaagccgagtctatagctggaggttaggtggctaaaatttcagaacaagttggggatgtagccactttctggagatagattaagcacaggtaattctccatctttctttctttgttaccccatcctgcattcagctgccatacatcttttcagactctttagtttttatgtttgagggatttttgttgtttatttggggtttttttttttatttttaggcagaaattgtcagtcgacaaagtagcctaaagtccttcctttcttaaaaatcttatattaaatgtatccattcataatggttattggagcataattttgttagcatgattattttatggggactccttgccaaagaacttttatccttacagactttaaattaattaatttgtaaggccttgactgaatcattcagaattccaagagataaacatcaaattggttttttttcaaaccatgttccttttaacatgagattgcattagataataattacaaattattgtaagtgggcttgagttcttgatttcgctctcagcttgaacattactggtacatggaaatgctgctgatttttgtgcattgactttgtatactgaaactactgaagtcatttatcagttctcttggcagagtgggtttttctaggtatagaagcaaatcatcagcaaagagagatagtatgactttgtttcttatttggatgcctttcctttctttctcctacttgattgctctggctaggacttccagtgctatgttgaataagagtggtgagagtgggcatccttgtcttgttctggttctcaaaggaaacacatccaccttttgccaattcaggatcatgttggttgtgggtttgtcatagatggctcttattattttgaggtatgttccttatatgtgtagtttattgagggtttttaccataaagggatgttggattttatcaaaaactttttctgcatctattgagatgaaaataggttatttgtttttatttatgtttacatgcaaaaacagaaaactaaacattgggtacacgtagacatgaagatggaaacaatagacactggggaatacaagatgtgggagggaaaggtgcagggattgaaaaaattacctacctgtattgaatgctgctgtacactgtagagtacagtattggttgtttaagctcatggtcatgtgtctggctggaagctgtggcagctgcccagcatcatgagagaatattgtaccaaatactactggtacaggaaaaggtcaaaaatcaaaattttaagtacagtctctattgaatacatattgctttcactccatcataaagtcaaaaacatttaaattgaaccatcctaagttggggaccctctgtaaaatcaccacctgtaccagctcactcctgatcctccttacctgctctatcagcaacatcagtagctcctgggggaatggtgaaaactacaaatgctcagacttctgagtcagcaagtcttggggtagggcctagcattctgtgttttaagaagccctacaggaaattctgatacacagtaaaatttgaaagctatcaagggagaaccatcatgggctttttaaactcattccttttgtttattgtttctattgatatgattatctcctgagactagaatggtctaaaactgccataccatcctctcctgaggaatagtttatcacactcacttttttcctacatgaagagagaattgttagatgataattgtcctggaagctttttttgtttttacctttatataatacccctcaccaaaataactggtaattgtaaagattattatctgattattaacaaactaagctttggagttagactcagaatgaatttagtaaaagtcatccccccttaatataagtgtgaccttaagaaaattatttaacctttctgagttttagttcccaatgcaacaaaatgggcattatactttcctatgaaagttgttgtgtggattaacagtgaaggtatacatagaacattcagtaccaaccttggattaaatgttcggtgaagagtatccattgttaatatagcttattttaggtttctgaggtaagagtctcaggcatgtcttgaaaaagaaaaaatttttggacactgagttttactctgtcacccaggcaggagtgcagtggtgtgatcatagctcactgcagtctcaacctcctggactcaagccatcctcctgcctcagcctccctagtacctgggattacaagcatgtgccaccgtgcccagctaatacttaagacaagggtctcattttgttgctcaggctgggcccaaaattctggccctaagccatcctcctgcctcagcctccctaagtgctgggattacaggtgtgagccactgcaccagacccttgaaattttttattaattaaaagaactgtttaaagtgacagatgatcagagaagattttaaaaggcaaatatttttcaaaaatttacacttatatgaacattaaatgttgtaaattacaaacctttacttttaataataatataatatttattatattattcttaaatatctaatatttatcaggttcttactatgttcaggcaccatgttaaaagctttaacaagtatattcacattcagccacataaaacagaaatgtagcttgaaactcattaaccttaataaaagatttaaatcagtttttttaaatgtaaataaattctactttcaaaggaaaaacttaaatgtcaaaaaatgtttatatacttttgagtgggtcagggaggaagatatctcttattcttagaattatcttagatacacaatccttcataaaggatcttttcattagttatcaacagaaatttaaaaatatatgaagttgatttcatctctactatgttatagcaagactttaaagagttgcctttaatttctacaatctggttacatatattatgataatagcaacataacattcttttaaagaacatgtactatgatagggagaaagtcactgctcataagtgaaacgcagtgtatttcacacatattaatcagattaaatatgtaaaaaaagtggtttaagtagtttccgtttccatctccctcaaaaaagtagatgtcatgaagtaatcaaatactagtaattttatcttcttattttttccaagaaaagcaaaattttctctctcctggtacaaaaaaaaaaaaatcaaatgaaaaacaactgattctctaagggccttgaaatcaaattcccacctacatttcccagctcatactggacttagcccatttcttgcatcaatactgggcctcccagaaggcctgtcagtatactgtaggcactcattgataccgttaataaaatgtatttctgatatttgtgtggccctctacaattcttagcacactttttttctgtagcatcccaacttattgacccttttatagatgaaagaaatccagtttagagaggaaaagttatttgtctggaatcccagccttagtaaatgactagaacgctgagttctagtcgtcctgtccaaagttatttcaaaacaccaaagagtagctttgtggggagtggggagggtgtgtgtgtgggtgtgtagctcagaaagcagacaagtaggaaggagggggcagtggccaaaatatagtcacacagccaaaacagatgcagggagtctgagaaatgtagtattttggctggactttttgcttccctgaataaaattaattgtctgttactaagaaagaatgggaggatgaatattatatgaacaattagcatttctattgcagttaagaaggatttctctatgctctctctctctctctgtctcacacacacacacttgaatatataaacatgagcagagtaattagagctgcagagcttcctttgtgattgtcctttacagctaaagaactatcagtttgtaagtaaagttttatacttatgaacaaccagggcaagaggagggacagtgttagattcttttccttactcctgctatttttctgttcacatagtaaatgtttaaataagtatttccagtactgatctagccattgaaaaaatgtttattgaatttagacacagtaaagcaattgttactttaatttagtcatatatagtctaatatatgactatattagacatatagtctaatatgatcagagctttaacttgtccttagctacctggcatgatcatatttacattaccctatacttttaattaatggtttcctcaaaaaagacacacttagaaacagacgtatttattttaatcttgacacttcataagcaacatttgctactcctttaggctaatcactatgagaaaccatgaaataaggcctgacccatcacaaaatctagagattgcattcagcatgtttgctatatggtacagaaaattaatttcacttattttcatttttttcccacctttttctgactgctctacaggctgtatattgatggtccttttggaagtccatttgaggaatcactgaactatgaggtcagcctctgcgtggctggaggcattggagtaactccatttgcatcaatactcaacaccctgttgtatgtcattttgatctattttgttaatccaaatagagaactgccaatatttctgatatctctctttttagtataaaataattccttattgaattattctacttgttgatcaaggacctccatttcctgattggtgaggggaataattcagtgattctcaacatgtggtctgtggctgctagcatattctcttgtagaaagatgtcatatcacagttatgcactcctctgtccttttcctctgttaaaagtcattcgcctccatccttcattttctatgtcctcatcagcggtaagtggttctactcattcattcagtcaacaaatatttttgaacacccatgtgccaataggtcttacaggtattgggaagacagcaatgaatgaaaacagagtccctgcccttaaaaaacttacattcaaatggggcaagtaaaaaagaaagcaatgagaaatgtaaataaaattatttcagaaaatattagaattatgacaaaaggtagacattaatggatatggaaataaagggctgggtttattgttgaagtatggtcaggcttttctgagatgacaactgaacacatcattccttcatttattacttagcaaatttacaacagactaaagaaagtaacttcaaaggtgaaattgtggccgggcacattggctcacacctgtaatcccagcactgtgggaggccgaggtgggtggatcgcttgaggccaggagttcaagaccagcctggccaacatggtgaaaccctgtctctactaacaatataaaaatcaaccaggcgtggttttgcatgcctgtaatcccagctactccagaggctgaggcatgagaatctcttgaacctgggaggtgggggttgcagtgaggggagatggcgccactgcactccagtctcggtgacagagcgagactctgccaaaaaaaaaaaaaaaaaaggtgaaattgtctgaccaggaaatactaaactaaaacttattttagtttcaggattataagcaaaagttaattgattgatattcttatgaaaacacaaagcaaaatgaaagtagaaagttattctcaaatctattccatttactattttttttgcagaaccaaaaaagcaataataaatttaagtgatgtgtttgaatgatattttatttcagttttaaatactagatgtaaatttggtactttctggcggttcttacaaaaatgatcatgctctaagccagaaatagtttgtttctgacaacacattacaagttatttggacacctaatgttatgaaaaaggaagaaaattttcttaacctcaagcctactttataaatggggatccagacttggaattatgagttgctggaatgcattacatcatacatgattgtgaaatctctttctttaatgatttttaagaggggataaacaaccaagtttctggaatggttttggctcattttgccaaaaagccagggcaagactgaatgacctttggagccctactcagtctgtgatagaattcactgaaagttgaaaacttgttttttttctgagatgcagagcccaatattattctggtccagttcagttatggccttcaactggaaatggatgatatgcatacttgtgaatattattcacacttaaattcatttaacatttaacacttaaacacctaaattcatgaagtatgtcgtatccttgagtcagtatattgcatattaaattcatttaggtctcgtgctatcagacgctagaatgtaaatgactgatttttctgttggtttctattggatatttctattggttgcttactaatgaaaaggaaactttaaaaaatatacgaattctttaatatttgtgtttgccatcctaatcactatcatgttattttcattttaaagggatgactggaaaccatacaagcttagaagactatactttatttgggtatgcagagatatccagtccttccgttggtttgcagatttactctgtatgttgcataacaaggtaacattagggttggttctagttttgcaatttttcaaattaaaaatgttatagcttttatattacaaaagcaataaatgcttgccatagaataaaccatagaaattatgcagataagtagcaaggaaagaaataagtctcttaaacataaaaaatcagagataatatctgttagcaattagacacacatcttttcagatatggatatttgtgagtatgcatatatatctaatatattttaacatggaaacattcatttctatgttttaacatagggtgtttcacatagaaatgtatgcatatggctaaaggtgatgagggaagacaatggagggaaataccagaaggctcctgctgtaacaccttccatcctctgttctgatagcacttacccttgattgccatctttaatactgcaaatcaccagactttttggtatactatacaaatctcaacaatcccaaattttgtgttttattttttgcagagataaagcaggaatcttttcctatcctacgtgtaacatttgacctatttatctttattcacactatacaagtgatacacatatgtatccttgctacaaatatttcaaacaattctgataaagtaaaatcctctcttactaccttccctacctaatctatgtaaacagaggtaactcttaagtgttctataaattatatcatactatttatattgtttatgcaaattcctttattaattgattactgtgtcttgactattttttggtattagtgcatctagaactacttcactgtttttccctgtgccaacagttagagatgatagacccaccagattcttttagagtatttcattgtatagatttatctagtttactgaacaattctctaatgttagatacttttttattacaaagaatgctgaaatggatatcattatatatacctctttgtgcatgcattcactcattcagtcagtcattctatcattcagtgtatatttattaactgcttactatcaatctgaaactattctaggatctgaaaactcatcaggtggcaaaataaaaccaagtttctgatctcatgtggtttacattctaagggggcaagatagacaacaaccaataaatacatccagcatcaggttctgagattcaggttaggacaaagaaggaagggaaagtaggagtaaagcagcgtaaacagtagagagtgtgttaatttatattgcatgttcaagaacaaccatcaaacaaaatgctataatgccatttgagcagacttgactgaagtgaatgagcagactagacacatattttggagaaaaaaaatcaaggtagagaaacctaacttcataggcaagggctctgaggcagcagtatgcttggtgtcctgaaagaagagaaaggagatctgtgtggatgaagcagagtaagcaagagaaagaatagtaggacaggcaattagagaggtagtgtctgtgcttttctgggaagaggtggattacgtaagtcctccagactttatgcaaaataagtaaataaaaataaatgaaaacattggttctaggtatgtacctagaagaattaaaagcaggcaattggacagatatttgtatgccaatgcccatagaagcattattcacaatagccaaaggatggaaacaacccaaatattcatcaatagttgaatgaacaaattatgatatacacatacaatgcataactattcagccttaaaaaggaaggaaattatgacacatagtacatggatgaactttgaagatataatgctaaataaatatgccagacacgaaagcaaaaatatattatgctgtcacttataggaggtccctagagtagtttcatttgcagaggcaggaagtagaatagtctctacatatgcatccttgctaaaaatatttcaaacaattcagatacagtaaaatcctctcaggttgccaaagccttcggggagggggaagtgaggggttgttgttccatatttttttctagactatttatttttgcaggtatatttttgcctcgtgcatttttgtacaagagaaaccagagcccattattgaataagcggaaggaaggaacaggaaaaagtgtctatttgttttgttttatatttgctagcatgcataaattaaatcactattgtctttttttctcaagaaaatcatgttcttgatgagtaaactggtacaattttgagactcttaaggaataaaataaggagtatttcagaaggactaatatttgtacagcattcagcatgctaaattttgtatctataaagataacagaaaattattccctaccactaccaccatcagaactaattaataccaagaggccagattattaacgttagaatctgttatatatatttctgtgtatgtatgtgtgtgtgtattcattttcttatagatattgactatgataagctaggttgtgttaaattctagaatcaagtatgttagaataggagaaaatctgagtatacccacagaattgtaataagtctattcctttttctgtcctctcagttttggcaagagaacagacctgactatgtcaacatccagctgtacctcagtcaaacagatgggatacaggtatgtggttgatgttatcgtaaattaaacaagcctcttgataatagatttactgtaggagctgtggtggaagaaaattcctgcaggtggttcgaacagaagtttcctagaggaaagcctcctttggaatatgtccaggaaagtcatagcttgtccttgaagtcaaccacattatgccttccatttgtccttctcacagggagcttttgagtctgcccctcccctcttcactatcgcctcaagttcttctaaaattcagactacacatgaacagccttatgatttctttttattgagggaatgttttatgtggagagagaagatgagttcgtatacagttaagcttatttctagacaaagaaaactaaaaaataatgatagccatcatgcattatttatttactgttctaggaactatgctaataatttcacatatattagtttatgtaattaaaacagagtcaagcagtaaatgttattcccattttgcaagtgatgaaactaatatttgaagacaacattgaagagctggactggtgtataaatctaggcatgaatgcattcacaaattttattttagtactttttgtcatacattttcacaatacttggaatacaacatttgaatgttttcagttacctcaaaactaatctaactctaagttttccagtcgtatttctaccctacttggtatgtaaatagtatttcattttaccagtctcacgaagtaagtcaatatcacttttcctcctggtattgcgataattaaggtatgaagcataatttgcatctggttctcagtttgcctgcctgggactcagatacttcctcctttctccgcagttcactctgactcttcacattgatttagatctaatgctctgttaattgcaaacaggagcctgttcacagccatttgttgatagacccaattttggagttttgctgtcttgagctgtcttgtctaggattatttccccaaatttacgatgacaatttgtagtattttacttatataatgagccaaatatgacaactgtatttgtggtgccaaaatacttcaatgttgaagtctatgtgctgagcctttttgagattgaccaattagaattcattctttgtcttacactgcagttctttaaagatgaaacaactaactgaagtctaagaaaattagccatttgtcagaatggcattcaaggagattagttctaacaattgattcatttaaaaatcaaatttttctacctttttaccagaatagattttgtttgtttgtttaaaaacaaacaaatggaattcaaggagataatgaattttaaaagaaagaagaaaggaaatgatattttgaaataattgtacgtgataggttgccatttgatacttacattctttatatcacagcaatttggtgggaagccgcagcaccagcagaaatgatgttagagaactggtttacttaactaaatatcgaataatgtagtgctttctttttggcagaagataattggagaaaaatatcatgcactgaattcaagactgtttataggacgtcctcggtggaaacttttgtttgatgaaatagcaaaatataacagagggtaagtactatacctcaaaaatttgatatgtggctaataaaataattaaaatattttcaaataattacatgaagtttgaaaatgaattggcaatgagtttaccaatgacaaattcactgaaacactctttcactatcaaaggaagaagtaaggcaggtatcgtcctacatttttgtaattccaaataattaaagtttggcttagaaatagtctacagtgtatttatgagctaaactctcctatctgattataaatttgtataggcctatattaaaaatgggtattcgctcccacagcatatatcaggtgatcctaggaaaagttttcaaaatcatgtttccaaacaaagaattttacaattagttctaacaatgaattcatttaaaaatcacattttttgtacctttttttaccagaatgaatgttttttgtttgtttttcaaaaaactctctgcattgtaatatgcagtctttaaacctagaatatttccaaaaatattatttagaaactataattttataaagaatcttgttcttatggactacgtgtctatgatctgaagaaattactaagaaggaaagcttccatttcagggcacagaccagccagcccatttgtcttttgtaaatttatcatagtgcagagcactgatctataagaattctaagaagattttgaaaactatataaccactcacgtatttttaggtttacatctaaatagtttcatcataagtttacacagttgtaaaagatgtgatttctaacatattgcagatattgacattttgtaattaacataatttctttaaacatatccactggaatataaatacagctagatgatactgtcatttattacaaaaatacataaactcttcttttagcagttggatgttttacatcattctttttctttcatttaagttgtatttctgtcccattaacccatataattttattaaaattcaatttatttttacatttgaactaatcatatttttattgctaacctaatcctaatcatacttctgcaaaaagaatgaacataaattaaatatttcattttaaaattgcctgtaatcataagactctagtgttaatttttacttctggcttgagttatcatttcaattactttatatagttgaacacttcataatttttaaaatatatttttataaacatcaaaaggatatttgattataaatgtacaggccagcttattaaatggatattttttaaaaaatccaatttaggaaatcatggatgaatattatttattgaagaaatcactgattcaagatgatccctatctctaccttcaaagattttgttttagaagttacagaatggaggctgggaagcaaaatttatgaaggaataacgttacccatgtgattcagattacagtcatgtttaaaacacttttgtagtattacccttcccttgatgaagtagttttgggatgaagatgtaagcatgatttacaaagcagaacttttttgtaatattcagagttgaaatttagaaaaaaatgatttcaacccacttttggctatcttcctttcccatctttctccagtatcacccatcttagatgtgataatcttgtcatactcatctgtctcttgctatgcattgcagacatgttcctctttagtgccatttactgacttctgacaagaatttttttgttgattttcactgtatattgctgaaaactgatagttctttggctgaattcagaaaccaaatccctaaagagcagattatttacagggaaatagattgaggctgttggttcctacagttagttctcaagaagtctcatttgttaggctgtttgtgttttagagcgatttgtgtgtgtgtgtatatatttggtagtttgttctttttctggaaacaatggaaaactggtttaagaagagcaaatgtgcaccatctgctgttgacattttgtacaacactttgactttgtgtattggttctcaggcaggtgcctgaaatgtgtttacattttctgaaggatttttatgtagcatacttaggaaaagaatggatcaacattcttcaggtctcattaactggacaaaggcactgtgtaaatggatggtttcatttacaatgtagcattttgattaacctcatgcacacaaattgctgaaaacatatagagataacagtagggaagacaggcatataagttaagattttaaaatatcatgggttgggcaacagtttttatctttcagaaagtgattacttattaaaccagtaggcattaggttagtatactatgtagaatacaaatttaaattgcattaaacccttctggcccagaggtaatgactggtaactcttcgttatgtattcttacagaagcttttgtaagtttgtgtgagagtgtgtatgtgtacttatgaaagtatatgtaaacatatgtttgtatgtgtgtgtgtgtgatatatatttaaaatcaaaaccttagttttttaacaaaaattgaatctatgacaagtaattcttcagcttactttgttgtttttgttgttttatttttttcttggctttgctaggaagaacgagctaactttttaatgatgtgcttcttttgatcatggacaatttctgtataattgtacctcaaagtattctagagtatgaataacatgactcctactaccctaattctttatatttagataacttatatttctttacagttaaaaatagtgctgtggtaattatctttgtacatactttctcatgtgagagtattgcagtagattaagatctttgagttggaattgctggctcaacaggtatacacatttaggtactgctctacaaaaactaaaagtcagaattaatttactttccacatgtgtgtgacagtcattcctttcttttgttgctttttttaaattcagaaattgaattatatgatggtattatatgatcatggaaagtgaaggagctttgggagtcaacctgccttcatttttattttacaaatgaagaagctaggacctcaaaatataatgatttatcaaaagccatggttaatgagccagaatgcagatatgaacacaagtctcctgactgcaagttcattgtgctttacagcagggcatagtcagcttgtcacagataaagagtggcaatcttattttaccatgttccccttagatgggaggtagggaggtgctgcaagaaattcccatgtttactatgaatgctgtagcagaatgttaactgtaacactaaaagaattaataactaattattttgaaatagagatattctaaatattacattgtaaaccatttagtatttaataaactattagaaaattatttattatatctaacccaaacttggtttcctattgtttgtaattaaaatgtatatcctgttttgagctgtgaagtttattcatgatgcaaagagagaaagaaaatttgaactttgtttggctttttgagtagagaattactactctgggattgggtgaaatctttgagattatatctttattttactgccttgtagtgttttcaaacaatacaatttaagaataactaggtttagtctctcacatttactcctgtgaccctgagtcaagtgacttctcctggatctgtaatacaacgagtgaataagctctccggggtgattaagttctcattatgtaagatcctgcgtttacaaatctacatgaaaaagcaagtatgaacatttatagaactagtttctaatgtctacccccaaaccacattttcttagtacccgaatctacctccactcattccatcaaaggtctagtagacaggtctccagataattgttggattgcagcattctaatgcaaatttagtacaaatgaattgcaaagattccttgtagaattcgaaaaagaaaaaaaaaaaagtaagatttcattaagttagtgagagtgacattagggaatcctcaaatcgcacacacacggagaggatatcagagagttaagctagttaataattgcaaaagaaaatgttaaagaaacacaaaaatcataacatcctgtgtgatttaaaaataatgatttttattattatttattttataattaatacttgattttattatcaagtatttaacaagggcctttaggaaatctgaaagacttgccaaactaactctataattgccctgtcaaagccaagcaagaaaataatggtatcttattgccatcatatggcgttgacagaaagtttatacaaagaaataaaatgactcaattctcttttcattttaatggaagctacattatgtttcaatagtaatttaaattttattaagtataacatcatttattttcatatatttttatttcttttgctcactttgggtttaattagctttttttaatttttactagtttcttaaaatggaaacataggtcattgatttcagactgtttttcttaataaaagtgtttaatgctatacattttcctctaaacaccacttttgctaaaacttatacattttgatttgttttcattttcatctcgttcaaatattttttattttttatgttttttctttgacccatgggttattttaaaatgttgtctaatttccaaaaatgaggaaattttccagatatctttttgttcttaatttctagttcaattgggatttgatctaaaaatgaactccttgtgattctaatcccttaaaatgtattgacacctgttttattgcccaggatatgttcaatcttggtgaatgttccatatgcacttaaaaagaatttgtattccattattgttagatagaacattctacaaatgccaattagttccaataggttgatagtgatgttcaagttttcaatatgcttactgaatttctgtctgcttgtattaattactcagagtattgaaataattaactataattatgaatttatctgtctttacagttccatcagtgtttgctttatgttgaagctttttattttcagtgtttaaatcatttacatttaatttaatgaaaatacagttggctttaaatctagcagttcaccattgctttgtacttatctatttgttctttctttgttttattttctttttttaccttgatttgggttgaatttttttttataattccacttttttctctaatgttagccatgcctctgtatttttttttttttttctttttagtaattgctttaggttgttggttcctgaactggattccttggaccagcatcaattggaatcttgttagaaaagcaaattcttgagccctatccaagatctgccaaatcagaaactagggatggggagacctagctatttgtgttctatgaagtctctaaaatgattctgatgaagccaaaattaaagaaacattgttctaagtttacagtatacatcattagcttatcacagcctattttattttttatgtttatgtttatgtttattttttagagacagagtattgctctgttgctcaggccagagtgcagtgacatgatctagactcactgcaaccttgaattcctgggctcaagagctcttcccacctcagtttcctgagtagctggaactacagttgcataccaccatgcttagctaatttttaaaattttttgtaggaatgggatctcactctgttggccaggctggtactttgaataatattgtaacacttcatgtacttccatttcttccatccgttttgctatttttgcattcatcttacatatacatatgttatagttctcattattagtattttttgttttagacatctagcatatattaaaaatattagaaattagacaaaataaatattttatatttactgacagattttactattttggtgtccttctttcctttggttgattcaaatttctatctaattttattttcctacttcttgagtagttttctttagtgtcctttatagtgctggtttgctgacaattctttcaggttttgtttgtatacagtttttattccatcttcatttctgaaaaaatatttttgtttggcatcaaatttgcttgttatataatagttgatgtcttgatttatattttagtactttgaagatatcacttcattgccttctgacttgcatagtttatgacaaaaagttcactttcattcttatatttcattcttatattttctgttgatgatttgtaatgtgtcttttctcccagtctgtttggttttatgtttttctttttgtcactcgtttttagtattttattatcaattgcctaggtatagtttcctttgtgtttattctccttgagatttaatgagatcttttattttttttttttcttctcccttggtcttctctcatgttggactgcagttacatgtatttttgactagttgttttgactagttggtattgtcccacaggccacttatgctctgttctttttttttttttttttttcagtttttttctctgtgggcttcaatttggataatttctaatgctttttcttcaagtttactttttcttcagcaatgcctgttcttttattaactcatctagtatatttatcatttcaaatattgcattccatctctagaatttatgtttgggccttaaaaaatattccatttatcatctcatcatgattatgcttttctttaaatatatgaagcctgtgtatcatcactgcttcaatgaccacgtctgtcatctctatcattctgagcctgtttctgttgaatgccctttctccttgtattagtttgctagggctaccatagcaatataccacagactggtggattaaacaacagcaatttattttttcatagttctgggggctggaagtttaaggtcaaaatgcaggcaggactggtttcctgagatctctctccttgacttgcagatggctatgttcttgatgcctcttcaggtggctttttctctgtgcatgcacttccctggtgtctctttttgtgttcaaattacttcttataagtacaccattcagattggattagggcctaccctagtaccttcattttaacttaaattgcctcctttaaagccttatctccaaatgcagtcacatcctgaagcactgaggattagaacttcaacctacgggctttggatgggcagacttcagcccataacactcttagttatagttcatactttcttgctttttgaattcctggtacttttttgttgatttctgtacattttaaagtttaaatgttagttgccaaattttgatttatttattttaatagtgttggacttgttctgacatgcagttaagttactcgggttcagtttgatctttacaagtctcacttttaagatttgttagtggaggtccagagcagccttcagtccaaggctaattttaccaatatcccctctactccttgcaaataaggtgatacgtttctgagaatacaacccattgccctgtatttataggactttctattctggtgtgtgtgaatacaaattatttgcagtcctgtgtaaactctggcaattatttgtcctgttgatctctgatatctctttactcacattcatgaagtttcttatcatatatgaactgattattaatcaaagacttgaggattctcctctaccaatctccgaggcgtctttctgtggatctcccttcccttccatattctgctccacaaattccagctgtttgggccttaatgtaactccgttctttgtctcctcagtgtagtcaccaatctttgctggagtttcccctgtctgctgcagccagcagattgcctccaggcaataagcaaagagagtgacggtgcttagcttgttttcttcccttttctcagggatcatagttccatgctacctattattcagtgtccgaaaatacttatttcatctattttgtttgctttttttctagatttttaatgtaaaagggtagatctactccctattaccccatcatggctgcaagtaaaattctattttcacagcttttagtttcatttttcaaggtaaaaagttttaataactttttttcagtatttactattaatttttggtaccaattttaatggattcaatgtcttttgttcagtgcgagttattctgacataattaagacatactggattttcccaagatatgagatgaaatattaataattttgacatcctaggaagaatcaaatacaaatcaaacttgggaagaaggtcaatttgaaatattatttatttcctgggatttatttagtctatttgttagagatacgtattatttaactactaaaattttatattagagaataataaaaactgcttgaaatttgttaccattattgcagtgcataaataaaaaagaactagatgaatatgttttttgttttactgtgaatataaattagccacttaaaattattatttcaaattggtaatatcttttttctttccttccttattcatcgctgcttttgcaaatccgtgtaggaattttagataactatgtgtaaagtgtctaataaaagaagaatgtacatagttcagtgtggactgaacatctattcagaagtcacctgtttagcaattgacatctatcaattgctgctcttaatgaggttgctggtttcaccaatgacaagtcatgaaaagactaaggcaaactgataaatctctacctgataataagcatatttgtgctcataggtacattctttgaattatcctaaattctagaatgaaaagtatgaggtaaataaaatattttcctggttgacatttacatttggaaataattagaaaattgttttcaatatgtaaaatagcaagaaatcaactttgttaatactttaaaccatgctcataaagcatacttcttgtcatgttctgcctaattttacacctgattttccattttctctgctcttgttctagaaaaacagttggtgttttctgttgtggacccaattcactatccaagactcttcataaactgagtaaccagaacaactcatatgggacaagatttgaatacaataaagagtctttcagctgaaaacttttgccatgaagcaggactctaaagaaggaatgagtgcaatttctaagactttgaaactcagcggaatcaatcagctgtgttatgccaaagaatagtaaggttttcttatttatgattatttaaaatggaaatgtgagaatgtggcaagatgaccgtcacattacatgtttaatctggaaaccaaagagaccctgaagaatatttgatgtgatgattcacttttcagttctcaaattaaaagaaaactgttagatgcacactgttgattttcatggtggattcaagaactccctagtgaggagctgaacttgctcaatctaaggctgattgtcgtgttcctctttaaattgtttttggttgaacaaatgcaagattgaacaaaattaaaaattcattgaagctgaaattccattttctgtgttgtgtataaacagagtagctttaatttgcaagcactccaggcaaatatattagatgtttgaaaacacagcacaagactctgtattgatacgggtactttgtgtcaatatctaatcgtctccactacttatgctaatacctctatttgatatctgaagactatatgctaactgaaccttcctcaaatgttgttatagtatctatttttatatatttttttctttttattcctctctctagggaaatatgccttcccttagcatgcattagacataatgatttaataggtccctttcatcttcatttaaatctatcactattgcatggtaatgaaaatattcctactataaattataaagggatatatatatatggatatatatatgtatatacacatatatatatacacacacacacacatatatatatatatatatatatatacacatatactaataacttttcccttttttcagcatttttgtctctattattattattgtttttttcccaggtagggtttgtcttaggctgtagcctctaaggatagttagttaatttgcactttgagaccaaaggacatcatgtgtgtcagtagggactgaatataagatttatctcctttgccacacattggtttatgatggagacattgaaagtctagtcatattcctgaacagtaaaacctgtattttaccttttaagtaagaggaaatatgatattcttattcaaacttaagtttagaatccagaatattactgtcgcactttttggtatcctgagtttccatagggaactattgggtttaaagtcaccgttggaactacactgtgtgatcttataaacttatgttccctggctatcatattcttggctcagaacaatatttcccattactatcttaagaattaaggcattcatggctcacgcctgtaatcccggcactttgggaggccaaggcaggtggatcacgaggtcagagttcaagaccagcctgaccaagttggtgaaaccccatcgctactaaaaatacaaatattaggcgggtgtggtggcgggtgcctataatcccaactactcgggagactgaggcaaagaatcgcttgaacccggtgggcggaggttgcagtgagccaagattgcaccactgcactccagcctgggtgacagagcaagattccatctcaaaaaaaaaaaaaaaaaaaaaaaaaaagaattaaagcattcatacagtttagtgattttgtttagtagtcggctatcaattgctatcaaatataacactgctgaaatcagcagtgtgacttaccttgccattgttaaaatgttacataaaacataacatgatagatgctaaggcctttttttgctataattcaccaatagcaatcaagcatgctaacccatactgaatgatatttacttgtagatatttcttcctttccttgaaattctcctttctatggaaagaagatgaacccaaaaaagtgataggaaatgtggaatgctcatgcagatttagctctgaaggcatatttaataactagtatgtcttgacaacagtctttagattaaaaagaattttcatggaaacatttaacagaaagaactagtaaaaagacactttgagttagtccaggcttaatgtgcaatactgactctatactgatcataatttatttatgcgatcatattaatagacctaatttcattaaaacaggtagaagatttttcaaaagaaagatgatgtttcaaagctggtctgccattctagatgagcctccttgcttatttaagttccagtaggtgttcaaatgttaaatgttaaacataggtcatctttgcttctgcagggcttcatcttgcatgtttaagagaactttgttttattttgagggattatttctctggggatcattcttataatacaagccttaaatcactaattttagtagcaataaatgttaaaattg

SEQ ID NO: 57 - DNA, 15091 bp, Homo sapiens
aaaatctctcctccttccttcactccagacactgcccgctctccgggactgccgcgccgctccccgttgccttccaggactgagaaaggggaaagggaagggtgccacgtccgagcagccgccttgactggggaagggtctgaatcccacccttggcattgcttggtggagactgagatacccgtgctccgctcgcctccttggttgaagatttctccttccctcacgtgatttgagccccgtttttattttctgtgagccacgtcctcctcgagcggggtcaatctggcaaaaggagtgatgcgcttcgcctggaccgtgctcctgctcgggcctttgcagctctgcgcgctagtgcactgcgcccctcccgccgccggccaacagcagcccccgcgcgagccgccggcggctccgggcgcctggcgccagcagatccaatgggagaacaacgggcaggtgttcagcttgctgagcctgggctcacagtaccagcctcagcgccgccgggacccgggcgccgccgtccctggtgcagccaacgcctccgcccagcagccccgcactccgatcctgctgatccgcgacaaccgcaccgccgcggcgcgaacgcggacggccggctcatctggagtcaccgctggccgccccaggcccaccgcccgtcactggttccaagctggctactcgacatctagagcccgcgaagctggcgcctcgcgcgcggagaaccagacagcgccgggagaagttcctgcgctcagtaacctgcggccgcccagccgcgtggacggcatggtgggcgacgacccttacaacccctacaagtactctgacgacaacccttattacaactactacgatacttatgaaaggcccagacctgggggcaggtaccggcccggatacggcactggctacttccagtacggtaagtacccccaagtccgctggaagcacccgtgcacctggtccccagctatgtggcttctcgacgtggctgcctgggcgcggcgggccccggtcctcgcagatccgatccctcccccacgcgcctgcagtggcagccctggaatccagtgcaaaccgcgcgtctggcccctcctgcttccttttcacattgctttgcagtcccgggcgtccccagttctcttgctgtcctccgctccactctgcagtcccggtgggcgaagggtgaggagtaagggacctagaggggtagggagttggagcggggggcgccgggttgtttcactgctgcgcccgtcgcctgctgacgtttaggtctcccagacctggtggccgacccctactacatccaggcgtccacgtacgtgcagaagatgtccatgtacaacctgagatgcgcggcggaggaaaactgtctggccaggtacgggctgatatgtctgaggccccgctccccggtctaccttcagggggcgctctggtgcctggttctgactgctactgcttcgcgcagacaagtgttaggaagtgggacaagagctgggaagtgggacgtgacctcctgggcatgctgacctggacggagagttaatatttttgaagatttctgtgggttctgtctcaaagtgcagcaggaatcacagaggtggaggaaacccttatcctggagactgaaagtctcatgctctttttccaagatacttaaacttgggagtcaattgttccaatcacttttcataaaacaactatacagtaattcaaaaaatttattgtaatggaagggtgtgttaatacccccttaaaagattcggggcaaatttgccatcgtagcctcattggtaaagactaagttttcctcttttgtttgagaccacgatgaacttggttgttttggtattacttcagccagaataagaccgtgagcaagagctttgtttttccactattctaaaataaaatagtaactctgggattggggttctctgggtttactgctgggaaacagcagagggagcaaaagatgttttaataaaaatttaaagtgtaaaataaggtcatcaataccacctgaacatatagacacactaaatatattagtaggaacacagtgatgtttatttgtacatttcttccactttgaccctttataattgtcaggctaaaggaagtgaagaaatccaagctcattttcattcctgagtcttgcatcactcacaccattgaactccctatgatgtttttacagtactgccattgttttgggatagtgaagttacaaaattattaatttaaatctgggtatgctcttttagagttatttcctcagtttgcagctcattaacttttttaaaagttttgttaagtttgaagtttgtaataaacatctatgaattattttttttattgggggattatttccacttcagtttcactcattcatatgatcaaacttgaattgattctaaagtttacttctgacatttagatttttaatgcttattatgtttttactgttaagatctgtggatttccataggtgttattcattcacttattcaccaaatattcattgagctctgactactccaagacggttctaggagctttggattcagcaatgaacaaaaagaaacaaaatgccttagactcttggaactgatagtctagttgggaaaggaggattgtcactactatataatggatgttttatttgtagttttgtctttagttaatattccatgaatataataatttttcttttttcaaaatcacagtacagcatacagggcagatgtcagagattatgatcacagggtgctgctcagatttccccaaagagtgaaaaaccaagggacatcagatttcttacccagccgaccaagatattcctgggaatggcacagttgtcatcagtaagtaaatgggcctcctgggtacttttgggttgcttttcatttctcaggtgatttttgatatcacaaatgcaagtcttatttcttacctgaagggagaaaattgctattacttatatttagaatttttctctatgtaatttcacataacccatctactacaagatcctgttatcttttgaaatggaaaatctgaagcccagcttattaaagctgttgataggatacagcaattgacttcaataaaatttactccaatgcattacagataggatttctttaaaagtccattacagccaagatcatctaaagttagttagcattaaatagcatttcataaagaccacacgttttttatcacaagcattcagaaaccattctcaaagaaagatgtagatgatacatcccatcagctcagaaggaccttcttccatcttttaaaagacctgtatcaagcccaaggtggttgccttttctatcctaaatttaaggatttttgcataaggtaattctatcatttgccttagtaacttgcctgggtgtttattttcaggaaatcctcatgtgtggccttaaacttacttcctgaaatccaagccagtcctcattgttttttccttatgtgggaagatgaacagctcagcaccttccatttaatgaaataacaaaagtagatataagtcccttaatttcctgataaaataggaatattttatttctaaataaaagtgtgtactatttaaataataatggtggataaaacatgccatgagttctcccttgcttttcactaatgattttaaatatgtgagaactcaattttttaaaatctcatagaaaccttgaaaaagtcatgtgctgcttttcggaatgaaacatcagcagtggcagccaaggggaatacactagagaacacagggcaagtttcacttaagcacagataatttattgtccatttctatttaatattcaaagacaaaatggggtacaataagaaagcaaaatactgaactaagtcttttgtcctagtagcaaagttaaaccttacaattttgatagacttatgtcctggggaaaaaaaaaccctagcatgaatctctcttttagaagataaatttggtctcaattttaatgtgaaaacaaatttgtgaagccatgggggaagtcatttaatatcttcattgctttctctgtatgtaactgaccaccatctttttgttttgtgggacatcagacattaccacagtatggatgagtttagccactatgacctgcttgatgccaacacccagaggagagtggctgaaggccacaaagcaagtttctgtcttgaagacacatcctgtgactatggctaccacaggcgatttgcatgtactgcacacacacaggtatgttggcaccctgaaatccagaacctcaagcctcagagagaaacgggtcatctaccgttagttagcattaaatagcatttcatgaagagcacacacatttttatcaaaaggatacagagactgttctcaaagaaaactgtagatgatataccccatgagtctagtattttctttcctctcacctctcttttataaagcattcaatttgaggtccatgttgttaagatgtaaaataattgggaaaaggcaaatgatggcttgatgatccaaattacttttgaagtatttccagttatgcatgtggcccctattcatgatcacaggtcagtgtgggtccttgttacagtccacaatgaagaacaaaaatttactctctgaaaaagtctgaatggttgacaacatatgcacccattctgtattccttaaccggcttagtaaataactgtaaaaaaagatatctctgttttttcacctgtgaaaccattccttccttctgttttatgctgaaaatagaatagtggttgcggttagcaaatggaggaaaaataagtttctttaaaagcactttaaaaagttgcctcttttaataatgcaaataagagcagaaggacaccatttctttctccacacatatatatttaaatctacagtataattgatgtcagatgttgtttggatggatttttttaaagtagtgctgaactaagcagtttgcatgttttatcattggaaaatgcgtgtcagttaaaatctatgtcagtatttccatatgaaaccctaatttgtaaaaggacattataatttgactcccgcccagatcttggcaaggggtagtgaatgtacataactgagggtatgaagggatcagcagttggcatcttgggaagcaaattccagggctgtggcaggaagctgtttggtgacctaaatgttaccattgcttttttctctgagcttagaacatcatagcaattggagggggaaaggttaacttctacatgccccaggacagtacttacttaagaaagaggagatgtaacttacccacacattattcatgtgtgcatatacagattcccttttcagtgatctgcaagtcctgtgcaagggacctagagtttatttgccccatttacaaaaagaggcactctggacagctcactctgaaatatttgaagctgggattgtagacattatagcacttctggttcccccccttctttggggtgaccccatttcattttatatggtagctttcttgttaatcatcttccatatatgttctttttaaccattattcaccaaatcttgcattgagcgatttatatatttgtttttttcattagatcaatgtctctttcacatggacttcatttaaaggaaaaaatagtctctcaatcacctaatgatgactcagattagtttattgtaatgctgcttaaatgtattcaagcataaaactaggtataacttctttagatttatacttttacatattaataactcttgtgttctgagacaaaaatttacatattaaatatatacgaaactaaaacagttgaattcaccttattaatttaatgtaacaaatagtatgtattgctaaaactcaaattgctgatttagagagcctcagctaacattcaacattgaatctgtttttatattttgactttgcctacatgaaatgcctatttgccttagtaactcgtttttgcttgcttgtgcaaataatcaaagcttatacttaagttctgccagcttatgaactcgagtgccaatttcagcatttttaaggctcttttgtctatttgaaggcaagataagcactgaagcattatgtaaacccatcttaaatgaatatctaatccagtgaatcctttacaatgtcatgaacattgtggtagtagtagaagtaataactagcacttattgagtatgtattatatgccagaatcagaattgtatgctggaatcagaccaaaaattcttcattttatatttactactcaacatactgttaagtgatgtatggatcaaggtaggaatctagataataacaacagaatatgagtctcactgctgtgacactgacccttctgagttgggcctgtctgtgctattgtgtgctctatgacagcacaattctcccctgctcttcccaaatcaagctacagctaaaccagcattggtagagcatgctaaggtgattttactgtctcttgggtgaccaaagtgatcttaaacagcaaagcaatattggttgctagaattgaatggcagtattgagttaaaatgaatctagcatgtactttgaatttaaattactattagaataaaaatacaagttaaaactttttgtgaagaactaatggaatcaagaatatacctacagactccaatctgaggaaacttctctagactataacattcttaaaagcaaggattgtatttgttatatttttctcctcccagcctgtagaaggcattcatttacttattgatgtgaatattttagcaagtggagtgatgtggcattcatcaatttagtcatgcatttaccccttcaacaaaatatgtcatatttcagtgactgtatgagagagagtatagtggggtagttaagaacagggactctggaccttgattacctaaactcaaaaccagcttagccacttactaggctggatacccttgggtaagttatttgatcttagtgtgccttagttttctcatctataaaatggagataatagcccctcatgtagttgtgaaaattgaatttttatacacacacacacacacacacacacacatataaatgtttacgattgttcctgccacatactatttaataaatgttagttattcaaagatacaacgtaaactctacccttagggaacttgcagcctctggttagctatattcttacatagcatgttataatgcagagcaaaaagggataaacactgtaaaagctatccacaataaaaagtatcatggacgttcaaagcacaagaaggtaatttccaaaaggggaaactggggaggatttcactgagaagaggacatttgagctaagataattattatgtggcctttattcctgaactgttaaaattctagaactttggtagaggcctattttgttccttcagattgcatttatctctggtgatatatgacacttttaagaagtgaggtgtactactacttatattagtcctgtatcttttttagctggaggtgctataaggctgagtaataaatacttctcaagggagatgaaatataagtatagttttatgtcagactcttgtaagtactaacttaaaatttaatttgcaaataatagcatattatttatcatagtctgaccacataccataattttaaattttttattttgtttatcttagggattgagtcctggctgttatgatacctatggtgcagacatagactgccagtggattgatattacagatgtaaaacctggaaactatatcctaaaggtaaagacctttgaaaatatatcatatattgatattgcagatcaataggccctcttctctggattcaaatgttaaataatcatggtattggaagcaattatacatcctcaaactatttataaacaatctaatctaatctaatctgtcttattttaaagaacttcaggggaaaatatgcagtctctttccataacgtctccagagtttaaccacttacttaagttaaaatcccttccctgcttgatttagctaagtcctcattaacaatttccttattgtagccctatggaaaaagaaatactgaggaactctttgtgttgcccaggtcagtgtaaaccccagctacctggttcctgaatctgactataccaacaatgttgtgcgctgtgacattcgctacacaggacatcatgcgtatgcctcaggctgcacaatttcaccgtaagtgttatttgcttagctaagtaattgttgtcacaaataatttttgttcatgccaaacattatacatagaatgtatctgtttctgctactacagcagctttcttgtaagcagaccaaaggcagaaaatggtatgcagtctgattttatttttttaaataatggaaggcaaaggagaatgtactaaggtttttagttttcaggagaagcttagttttcaggagaagacataaacagaccacagtgtttacccagaaggcatttgtgaaggcccaatatatcaaattgctcaatatgtagagtgggtgagcttgtagaagccccagtagttgcttcttggccccttcctcgcagtccctgaaagaattgctagggttcttcaaagtacattttgaaaaccactgccataaagtaagcaactgaagagttcagccccctctggtctgtacaaatcaagatgtcatatatttgagttctagaaccattgatactaggaaaatactctgcaaaagattgaggtgtgtggaggtttcttcataatattcctactcctgagactcttcttagaatgaaatactggaagatatctattcacagggaggtgctctgatgaaaataatgaaaaaaggttgggtaggtttgactgcatgcctgtctgtcctgccccatctccttaagcactacctccccaagtgttgctgggtgctagattataattacatatgccacttgagttatgccttcccaacaatgagaatactatttccattggaatgatactcaacactcatcagctttgctttgtcactggagaaccaccagtgccactggatcatacagacaggtatagcagagctatactagaatctcataattaatagaaatttctgcctgatacaaaaacccaggactttctacataaagaagcagagactgtgctttacaagtgttgtcacaacattagagatagatgaagcctgtgatagcaaaaggatagcactgaaaaaacagagtcacatacattcttctgaacatgcccacagcacagaaaacctggcaggttttatggcccatattgtgtggagttggttatagtagaaccaacccccgacccccaccgccagaacaccattataatttaagctaaaataatttgcacttaaataaacagattagttttttcttaatttttataattccttaatttattcatccattctccatttatttattcatttgcactctcatttttgtactgtttgttgatgccctgagctagatattactgaataatgcaaacataaataggactactaatctctatactgctgtagccttattacactattttcagttaattacttatgaatttctttgtttaatgtctgtctcctgctctactcagtgatggctgtgatttagtctcttgtccactgttgtatacccattgtcaggtacaggtctgccaccttgcagcctctcactcactgcttaatgaatttctttctcaaataatttgagtaaaggcattttgagtaggggaagtgagagaattacacatataactgtaatagagatacaatatgagaagtttcatgagggataaaataaaatgtggtgagatcagaaggacctttgctataagtttggtaactcccaactatgtcttactgacttcccactagaaataggtctggagaggtctgttgcatagaatgtctcttgcttttaatcagtagaatccattgaattgggtattgctagatatttagaagaaataaaaattgttgtattgctccagcaatatgactgtacaagagggattcctgatgtggtcactcatatagagttgaatttttttttttttttttttttttactagttattactgactgtaacaaacttcaagagtggttgaagctggaatgtttataactaatataaaccagatgaaaatatgaaaagtgaaattataattagtgatcataataaaatgtcatacttattctgagtggaaatattggggaaagtatagaatatttgagaaaaaaaccccacaccttcaggatagtaatacttgcttcttacattttgactttcacatcaggccttccttcctaggaatcagagttcagacagaggagaggtctctttgggctgagtttcaggagtgactttaggatacatttgaattgagccttgaagtctggggaatgcaccggggagcattaaggaaaggaagcccagggcaagtcaacgtcacaggcaacttgcatggcaggaggaaactgcagggcatgtttggaaaaacaagtcttctagtttggctaaagcatgaattttgtggagttacgagttggacaaaaaggatggaaaagtaagttgagccagatggaagacagccctgaagagcaggctaaaatttattctggaggcagtgggaggctgaagctttttgagcaggaagtgtaacttgcctaaggccatcaggtcagtctggtggctgtgtaagcagcagtgagtgtgactctgaagacatatcatgtatcagttcactgattgcttttcctgccagatatttaagagcattctgttgatgtgtaaaagccacccagtaaatagttgaataggtatgtgctgttaatgtaccctctctccttcattttcctcactgaaacaaaatgtacggaccaggtgactctgaggcttctttcagttataagatactatgtaagtttttttttttctcctcacagaatttactgtttggaaattggtagtttatgatttgaataagtgaattttcacttccttacatgaagatctatggtcacatttaaagacagtaatatttgattgattagctttggtccagtttctgcctattaatgtattattctacatccaaagccatgctggagaaggactaattcaagatggagcagaggccttgactctacttcttggtggacatgccacccttgttccatggaatgaattcccctggtcagggatgctggtcccagaagtcctgctgtactcttgagtgtttcagaagtggtttctttgcctctaaatgtgaagagtgtaggcatcaggcatctctgctgttgacatagtcactttcttcaaaccattattaaaatgatgtactactgcataatttcacaacatgattgctgcttaggtggagggaaactgttgcataaagtttttaaaaggttgactttaaatttgtctgttgtactcattcattatattatcaggttaataatttgtcttattttgtcttcttaatctaggtattagaaggcaaagcaaaactcccaatggataaatcagtgcctggtgttctgaagtgggaaaaaatagactaacttcagtaggatttatgtattttgaaaaagagaacagaaaacaacaaaagaatttttgtttggactgttttcaataacaaagcacataactggattttgaacgcttaagtcatcattacttgggaaatttttaatgtttattatttacatcactttgtgaattaacacagtgtttcaattctgtaattacatatttgactctttcaaagaaatccaaatttctcatgttccttttgaaattgtagtgcaaaatggtcagtattatctaaatgaatgagccaaaatgactttgaactgaaacttttctaaagtgctggaactttagtgaaacataataataatgggtttatatatgtcatagcatagatgaatttagaaacaatgctcctactgtttaaatacatatggacacatctggtgctgagaaagaaacaaacacattaccattggtgtcaagaaatattactatatagcagagaaatggcaatacatgtactcagatagttacatccctatataaaaagtatgtttacatttaaaaaattagtagataacttcctttctttcaagtgcacaatttcattttgacttgagtcaacttttgttttggaacaaattaagtaagggagctgcccaatcctgtctgatatttcttgaggctgccctctatcattttatctttcccatgggcagagatgttgtaagtgggattcttaatatcaccattcttgggactggtatacataaggcagccgtgaaactggaaagtcattttgatgactgatgtgatacatccagaggtaaaatgcatttaaacatattaaagtatttgccaaagatacaattttcttgctgacataaaaatcacacaaacaagtcccccccaaaccacaactgtctctcaaatagcttaaaaaaattgaaaaacattttaggatttttcaagttttctagattttaaaaagatgttcagctattagaggaatgttaaaaattttatattatctagaacacaggaacatcatcctgggttattcaggaatcagtcacacatgtgtgtgtgtctgagatatagtctaaattagcaaagcacatagtattacatacttgaggggttggtgaacaaaggaaaaatatactttctgcaaaaccaaggactgtgctgcgtaatgagacagctgtgatttcatttgaaactgtgaaaccatgtgccataatagaattttgagaattttgcttttacctaaattcaagaaaatgaaattacacttttaagttagtggtgcttaagcataatttttcctatattaaccagtattaaaatctcaagtaagattttccagtgccagaacatgttaggtggaattttaaaagtgcctcggcatcctgtattacatgtcatagaattgtaaagtcaacatcaattactagtaatcattctgcactcactgggtgcatagcatggttagaggggctagagatggacagtcatcaactggcggatatagcggtacatatgatccttagccaccagggcacaagcttaccagtagacaatacagacagagcttttgttgagctgtaactgagctatggaatagcttctttgatgtacctctttgccttaaattgctttttagttctaagattgtagaatgatcctttcaaattgtaatcttttctaacagagatattttaatatacttgctttcttaaaaaacaaaaaaactactgtcagtattaatactgagccagactggcatctacagatttcagatctatcattttattgattcttaagcttgtattaaaaactaggcaatatcatcatggatacataggagaagacacatttacaatcattcattgggccttttatctgtctatccatccatcatcatttgaaggcctaatatatgccaagtactcacatggtatgcattgagacataaaaaagactgtctataacctcaataagtattaaaaatcccattattacccataaggttcatcttatttcatttttagggaataaaattacatgtctatgaaatttcaattttaagcactattgtttttcatgaccataatttatttttaaaaataaattaaaggttaattatatgcatgtatgtatttctaataattaaaaatgtgttcaatccctgaaatgtctgccttttaaatataacacctactatttggttaattttgacgatttttttttttcaattaggaagctaaaaatactactttattccttatatgaacattcatccccctcctggcacctctaaacacacccaaataactcacaagtactgatttaacactctgtattactgaacttctttgaactattttgaactttgaatctcttctctgaataactgccgaaactcaaagataataattagttgatgaaggttatcaattaataaaataacacagaccagtcttaccaaactctaaatacattttaaaaaataggaactggcaatgataaaaagaatgttgagtactgacaggagattggcttttacactaaaaaagacagaaaatggactaaataggaacataatttcagagtttatgagtcagtttacaatatgccatattagcgatctcatgatgattcagaccacagtctgggttaaagatgtcttgacctctgaggctagcataacatatatgagaatacaacttgcctatttccagaaaatctgtatatttttatagaataactttatttacaatttctatcatccaattactcactaggcattatttgtagtactttttttctctttgaaatctcataggatagtcacacttataaacattcccaatattcggattctagaagaaatgcaattcattaaaattttcctggcactgagagttaatctttagcagattgcatgaaaatactgaattcctggtaaggagatattttgttttaaaaataatgtgttttgatacgaatcagtgtattaactgataactaaaaagtactcttttttctatatatacatatttttttgaactcatattcacaatcaacatattcaatcagtgagttaagtctcattcctagctaccaaaattcctgggccacttttaaacactaaacatttcatttatcctctaagctaaaatggtgctgagttatttaaatctgaatgtaaaatgcattaaatcttagcttgtggtatataaacatttaattaatataaaactgcttgctataaactaagtaacatgtcatttggtgttaggtttttagtgaagttttagcttctcccaaatttttcaggaatgttatttgtaagacgtgtaacttttttgaagaactcttattttaaatgctcagacattggctttatgttcctctttgcattctcatattcttttattatacatctatactatgattgcaagattatataaaaatgccttgaataaatgatttcaagtgtc

SEQ ID NO: 58 - DNA, 36262 bp, Homo sapiens
agactctcaggttgatgcagtgttccctcccacaactctgacatgtatataaattctgagctctccaaagcccactgccagttctcttcggggactaactgcaacggagagactcaagatgattccctttttacccatgttttctctactattgctgcttattgttaaccctataaacgccaacaatcattatgacaagatcttggctcatagtcgtatcaggggtcgggaccaagggtaagtgagtggtttggttttataaaccatttttctttttcctcagcttgttagatgttcaagtatgcataaagtttctcatatatgcctcagggttttttttcctaattattataaagtaataggaaaaaaaggaaaatgtgagtattctgtgatttatctatgcacttttaagctttaagacttaattgctctctaaataccttgaatataattgctttcttatgaaatgttatataattctaatctaattaacacaatttagctgggcattcttttataattccatttatttatgtttttattttcttccaaaaatctgaaattgagttttcaaaattaaaaaatctattgttaggaactatcatatgtatgcaaacagcattgaaatatctcacatgatgttagagaaaattttatttaaattacatatgaaggttaaatactgggtaatgtaactagttctctgaattctttgaagcatttaagttacttttaaactctgaattctgtaaaatttgcaaaggtaatttatattttatagaactaatgcaactacaactaagcatttttaaaattacacataattttgtaacttatccaaccatttataattttttaagcggatcttggcacttcttcctatgcctcacaggaattttcataatgttcacaagcttctttgacttacagtgaaaaaagacttctgtccctttaagaggggaaggggaaccttaaaattgtgacagaggatgttctgatctgttacttccattcaaaaagataaattctcctttgtgcaaccatattgtttcaaagttaattttagcacatttacttctgtgattacttacctagaaaattacagagtatagtgtctgtgtacataataaaccttgtctcttttgctctctgacctctcattgttccagagagccctgaagttatggccatcctccaaatgagcacatgcttggtttaaaaagggtcagtagattatctaccattaaaagtaataaggcacatagaaataaaattacgttcatactgtttgaatagtcctagttggttaactttttgaaaagcttgtattttactctcagaaatgtataatttttctctctctccctgccacctcctgtagactttcggtttttcaacaattcagtaggattgtgtcaataattagatttgtgcaaggctagaatcatgtctttggatatcaaatccacatctcaacattttcttctatcaaccaatctttagatacgaaaaactagtcattattaggacattaacttttttcctttccctctatcctccagcccaaatgtctgtgcccttcaacagattttgggcaccaaaaagaaatacttcagcacttgtaagaactggtataaaaagtccatctgtggacagaaaacgtaagtctcttttttttttcataatatgtcagttccaaaaacaacatcatgatgtatatgccttcccctgggtgtacacaccattcttcttgaaaatactgaccaaaattgtgagagttatttaaagaaaagaaaggaatacatacgtgaataaagaagttctccctgcatctccaatattactattagaactcagatttcttcctgaatccatgtgacatggaggccagaaggaagcagatcacatggctcaggattgggtatagaatccgtgtgagtaaatgatgttgtttctactcctggtttggccctcttttatcttaggcaagtcacttaacctctgtgacttagtttcctcattttataaaaaagtgggccagaaaaacaaactgatttaaaatatcagagtttctgaggcaaaaagttaatgtttgtctctagtcatttggaaattgtctaaagtattccagtttaccggagagttttcatcaaagtttaaagttaaaaaatacttgagttttatctctttatttaatccagtgattctccgttcaagatgctccatccccagaggtccacaaggtgataacggaagctcatcattatagttaatatctcaatagcccaaaggatgattatgttttaacatatgtttcactgattagcttaaaatttgaaagcattatttattacttaatagacatgccttctggtttattttaccaataaatattggtggaaaaaagtaataaacactctggacttattaaggtcaagaaccactcctgtgatccaaagtctttattttacaatgagggagaccagtcataaatagggcaagtaatgcaatcagaaaggtttaggtgtcatccccagtcaagaaaacagtgcaagtggctccttcctgcttcctattaatttgaagtccaccctcagtgaaggatcccttgagaatcaaaagaccccaggaagaacctgcttaatacatcagcattaaaattcagttaccctaagttcgggtggaataatttattagaaacttatttctaagttaataatattggtataaatcctaaacatgggccaggagtggtggctcacacctgtaatcccagcactttgggggggctgagacaggtggatcacttgtggccaggagttcgagaccagcctggccaacatggtgaaccccatctctagtaaaaaaaaatacaaaaattagccggatgtggtggcaggcacctatttgggaggctgaggcaggagaatcgcttgaacctaggaggtggaggttgcagtgagccgagatggcaccactgcactcccgagtgggcaacagagtgagactctgtctcaaaaaaaaaaaaaaaaagatactaaatatggaatcacttaacttcttgtagacttacctgtaaaacatggatttaatagctatattatagagtttctgagaaaataaaatgaattgataaatgtgaaattactaagtaaccataatgcataatatcaattgttcttaaaattaaactcttttaaacaaatgcatagatgtagacaggaaaggaagttgtgaccagatgcctatttgaaatgcacaagattgtctttatttctaagtaagaaccatgtatacaaggcatttaagcttagctgggttgcatctccacatggtaaccaagtctagggcaccagaggactttgctgaccatctcctgctcattggcttaatagagtttcaacatgatgttatcttttgacctgaacattattcctattattgtgcagacttctgctagacttgtgagtcattcacacaattataatgcaatcagttgttacaatgatctctgccatgctgcaagctaggccccagtagggactctaaggctctgagttttcctctttgttatttatattcttggataccatgaagcatatttgaaatgcacacttaactagataagaaaggaccttcaccctgaaatgttagggagaatgcttattacatccttcctagaagatagagaagaatgccataaatttactttaaccatctaaatatatgagagatgtcaaggcttgtacagaggctatgccaaaattctttcttgctttccattaaaaaaaaaaaaatcactactttgaagcctggctttttttttttttaaccagaaatgtaacagtgtctcctttgttcaattgtattagcttatttttctaaagtagattcattttcaaaaacatagttacgtctgggcactgaaataaatgtaaatgctaatttcaaataaccaaagaaatcaatactattgacaggaagactgactggtctgccatctgcttgcttctgctgaaatttccagagatatcatcaggactttatgatcagatgacagaaatgtttgcctttcagctgacagttgctctggggatttgagaaaagtaaactgagcaggcctaatgaaaaacgtgaagcttcctagggtcaagatattgtccaaaatatatattggtctagtaatatagtattctggaaacttcctctagagaatgtctgtgatatttttagctggcatctcatgaaatgttagatactattctgaaaacaaaaataaatttctcatgtttagagctatgtatagcaatattttttttactcttgttttgccctactgaccatatgggaacattgagttttgggtagcataaatgttcttctgaaaaaaactgctttttttttcttttcaaaatatccgctcagagataaccacattgttcaattatctgatgatattacaatgaactgctggaattttatctcatctactgcattaattctctacattatgactgacccttgtcatattagcatttgctaataataattttttgttaaatttccttttctattcactattttacttcaagtaagtattatcaatctatggactaagcacatttgtatctcattttttaaattgtttacaacatatgctaaagctaatatataagcaattgttaatcaatcttttgacatccaataattagatttatttacaagagctcatgtaaataaaattatttagaggctctattatgatttgcataaggctcctatataccttttatatgtttccaataccaactattcttcaaactatattaaaattagagaataacttgaagtgggtatttcccatttaattttgtctgtatttttagctatctattattcttaagccaatatttcatgccaggaattttttattaacaaataaagaatgaggatccaaggttataaaccagactacaaatcctagataattacttagtgtagcagggttcaatttgaaaacatttatttacttttattcaactctataaaatcatcttttatatcattaaaatttttgcttcttgatagtttgcttttatcatttttatcatactaaaaaaagattttattcttatacttggcgatctctttcatgtctaaattattttattcattcatacttcttgaatacaattaagacaactggataaaaagccagaaaagaaatagcatttgaataagctgattcatgtttaattagtgaattgcaaaataattaatctataattgtcataatctgtttgacatgatatttatcaattaaaaattacaaaacgatgtgcatttattttttacttgtaataatccccctatttctaattgtttggtacatgtacctttatatttcttttgaaaggaaacataagtaactatgtaaaatttgagttaaaataggctacctatgttagatgatgaagtccagaaaatattctatgaaatgcgaaaaaataaaaattaggattatattataatattaataatataattatacattaatataatcagtttttattttgtaagcaattatatataattttaaattattattttccctcaaaatatagtaaattagataaacttattttttgtatatcgtgatatcttgaattttctggtctgttaccttaattattgcctatagaacttaacacacttcgttaactttaaacaggatgccactttcttgaatactaaactctaatattaaaataaacttacttagattatttttatcaaattttacaaaaataaaaagattttaaagtttatatataatataatacaattaataatcctaccaacaattcaaaccaaatatggcattattttatctagcaatgagatagcatgttacggactccaatgggtcaatgtattttcttatgtttccaattatattaaagcagatttctagccatttttagtttacaaaatgatttcaaaagcattatttcatttgagattcacaattactctgtgagtagatattatagctactatattcatgttaaatgcttggggaaacagggactcctattgattaaatgacttgctcaaggttcacatgtcaaccaagtagtagaactaggacccaaatgtcgttcttctggatcaacattatggaacttttctatagtaacatgagactgtagtgagaaatcaaactcatagaaatatagaaaaaatcggccgggcgcagtggctcatgcctgtaatcccaacactttgggaggcccaggtgggcggatcatgaggtcaggaaattgagaccatcctggctagcacggcgaaaccccatctctactaaaaatacaaaaaattagccaggcgtggtggtaggcgcctgtagtcccagctactcgggaggttgaggcaggagaatggcgtgaacccgagaggcggagcttgcagtgaacccagatcgcgccactgcactccagcctgggcgacagagcgagactccgtctcaaaagaaaaaagaaaaaatcaggggggaaaaaaaacctgatttttagaacctcaacaaatcaagtcaataagtgaaatattttgtcaaatttatgtaaaaatgtatcctatttagtttctcattttaatattaattttcttcctatgtacaggactgtgttatatgaatgttgccctggttatatgagaatggaaggaatgaaaggctgcccagcaggtaaaatctcaattttttgaattaaataaggaattatatgcaaagaaagggttgaggtggcttgtggagaagccaattgtgtatgtgtgtattcagcaccatcctaaatccaagatatatccctcctatttttgtgttaatcatgaatttatgaatgataaaatataagagcatatttctcatgcactggatgctgggcaatacaacagaaacttagtcacaaatttaaattagttcagcttcccttcaggaacaaaactctttacaaaatcctgttctttgaacttgtctaggaacatggaactcaactacttggcaaaacttcatcttctctagttgaacagctctgattttataatattctttatattgaaatttggtttcctctacttctgccaactagagaaaaaaaaaatagctcatctatttcctctttgaaatggcagccattcagatatttcatgccaatcaccacacctttcctccagctaccttctcttcttgaataaagtcttctattctctggctaaccatccccaattcttttaatatgacacagactttgaagccctccccattataacaccaacccacagaaagtctctagtccagtaatctttcttctgaatacaaacctagactgatatttaaagtccatccatgtgggtctgagcatttaagacaataccaagataagtacctgatttggggacaccttgcactttggataatgtcattggtaaccatgttacatcattagcttatattgaatttagaatcaattaaaattgattacagttttttttacatacactattaagtcaggtctctaggatttgtttttctcaatttaggcataggaattacatggaaccttgttaaatttaaccttgttcattttgactcaatttctccatctttttagggtcttttaaaatcctggttttatacttaatagttgtgtcaccaaatctaaggatattcacaaatttaataaccattgattctatgctattaatcaaattatactaattttcaaataaatagggtcagaaaaaataagttgactgcacattaccagataaatcccttcaggctgacattcattcatgaatctttcttctgacgttcgggagaaataatctggaaggattgaatattttaaatcatttgctcccagaaattgtaatgaaaacaagcaggcctacatatttttagggacccaaatctataaaaatgatagatttaaataacagataatattgaattataattgaattattattgacatagcaggattgagatctaaataggttaaatgttaaaccaggatgacagtttaaatttttttttcctcaacacaaaggatatgtaaaataatgtttttcagtagcattttattatttagcactcaaaagataacttttatataaaaatgattattcatataattgtattgctaaaattattagctaaatgtcttgggaaacacagcataaagtttaaatgattatgaataatatcctgagaatattatccccagtactgattcatttcttgattatttcagttttgcccattgaccatgtttatggcactctgggcatcgtgggagccaccacaacgcagcgctattctgacgcctcaaaactgagggaggagatcgagggaaagggatccttcacttactttgcaccgagtaatgaggcttgggacaacttggattctgtaattcattatttttatcaatatatttattttttgctgttattgttatttcattttaactgacttattaacttggatattagtagaaattttatatctttctattgtacatatatgagaatacctaaagggatgagttattaagggaagtaaaatatcttaatacatccgtaaatagaataaatctccaggagacttatactttaatttttttaagaaggggaatcaagaatcagctaaaagggcacttactattctattttactcctttcctctttcctgtttgtttgtgaggatatgtatgtaatttcagataacatgtctaacagaaaggtaagttaagaagcctactgaaatttaaaattatcataagcagtattatacagcaatattttattacgtatgtttaattatatgtatatatatggatgttcaggttgtcaaatttgtatacatgtatgtggatagttaaatgaaatgtgaaaatacatttgattttcagacttttgtgcacagtctaatttacaatgccttaaattattactcaatttccgaatctataaaactgatataaaaatacattcctactttctactagatatggagatgaattgataattattactagagtgaaatatacataataaaatgtaggtatatatctgtaggcattatcttgctacactagctgtgtggttaattgcttgattatagaaatcgctcctctggttgtctttcaccgcatctctaaccacctctccagttccttttgctgactcatcttcttccttgccttaaagaattgagcaatgagaacacatggacacagcaaggggaatatcacacaccagggactgttgtggggtgggaggaggggggagggatagcattaggagatatacctaatgctaaatgacgagttaatgggtgcagcacaccaacatggcacatgtatacatatgtaacaaaccttcacgttgtgcacatgtaccctaaaacttaaagtataataataaaaagtaaaaataaaaataaaaagaatggaacttataagaatttcttccagcacttgactctgctctttaaatgcacttatcatggtttcaactatcactttagtgcatacaaacagtaaacctacgcttgttgtttggacttgtttcttcttggaacctcagtagaatatttctattgtttatcttagcatttatccttggatataccatctgcatctttaaacaaaagttatctaaaacatatgcaattttctttccccccaataaataattggttttttttgttgtcttttccccacaattggcagtaccagtgtcaatgttcagacttgaaatttgtaagccatccttacctcccctttctccaattcttaaaaactgctgttagcctcatctcatgtttcatctaaagtgatccccctaatactctaatttctgctgtacattaccactcaaccttcctgaagcctggttctaatcattaaattccaatgccacaaaatcttcagtggttccttatggccagtttatttcactcctcttagggcattaaagttatccacgttattgtcccacatacccttctaaatttcttagtattatctgagaaacataaaagtgtgtattaaccaaactggacaacttttgctctcttggcattcaccctatctcagcactggatttaaaagaccaccacaccattcctattcatttaaatctcatggtctatctccaaactacttccgaatagctgttctttcttattggagccctgaaagcatttttcccctctgtcctatatcttactctgtctacttttacctgctgctatatgataaacagttgtgactttttgctttacttatcattatatttcccatagcattgagtaaagcataatatgacacatagtgttggatagataaaaaggtacaggacagttgaattcttgaatttgttatggaataaacatgaaacccttgttaaaacttaagtgttgcatacaaatataatgtcatttttgttttcttttgtttgccatttaaagtattttaaatatgtgataatttcatatctccctttcttatcattttattatttatatcaagattgtctcttcatcaacatattcactttaaaaattgtgttctaagtactgtatcacattcaggatccttaagtaagtatctgaacttacaaaatcccttaaccaattagaataatataattttaagttatttatgtcaattttgtatgaccatctgataatgaaatgagaaaatagcaagagagtagaaatagggtgatcgtaagacttttactaatgttccacaataaattgaatttctatcattgcaatttttcctaggatatccgtagaggtttggagagcaacgtgaatgttgaattactgaatgctttacatagtcacatgattaataagagaatgttgaccaaggacttaaaaaatggcatgattattccttcaatgtataacaatttggggcttttcattaaccattatcctaatggggtaagttttatcagtaaaaagtacacttatgaaaaataccttctttaattttgtctatactttttatataatgctcacaaaaataataaaatgttagtgagaataaggtaagtgctatattatgactttacccccaaatctagggcatgtaaatttccaatctggttattaatttctactaaagagtgattgtaaaggacaaattacatgaacagttcattgacagtagacaggtattctagaaaaggaaattttagtagttgatatgtttgaaataatttatcgtagtagcaaaaagaataatcaaagaatgagtgttcttttactccccctctagctactgtactaactgaagtacttgtgtgtttggatcagattttgtgggaaactgccaacagggtcataggactttttccacagccagccaaattctcagggacgaaagaggtcaatgaagaaacaatttttaggaagttcttgtaatgtaactaattatatctatacaataattatttgtttctccctctcaaaacttaaattttaggactgattagacttctttacctaattcattgacccacattaaaaagtttatgactatttgcataaaagagaaaagcaataatttaaatgaaaaaaacacctttgccttatgttgctagatatgttaagtatgacttgacttgggttctcaactggttcccttttctcttacagtttcttttttagatataacaacatgtaaatcttcatccacagcgtttacatttacaatgtagtttcctgtatgttacatttactagtataaatgaaaaactgggaatgggcttgcagtctcagtggtcaatgggtatctctggtttcagcactttgatttttccaaataattataggttgtcactgttaattgtgctcgaatcatccatgggaaccagattgcaacaaatggtgttgtccatgtcattgaccgtgtgcttacacaaattggtacctcaattcaagacttcattgaagcagaagatgacctttcatcttttagagtaagtccaagagcagattgtcttgagtcattgaaatccctcttcttctcctgtcaaaatctaaaaacaataaaaatgctattaaatctggcaaaaatgtaacacatattttttgaaaggactactattttcattttacacagaagaaaccatctcatatgaaataataatatttctgtggacatgatagagtaagaatggttagtcacatgactggcgtgtatttagctcatttagaacgtgttcatctgttattatatgtactgctggatattgctacagtcccataaacatgggcagaattcccattcttgcaaacacaatttgaagaaagttggaaaagacatggttgtgtcaaaaagtaatattttgaagatttaacaacaacaaacctctatagtgtaggaatcagctccttcatgtcagcctaggctaagtgtgttgcaatctttttctggatttacaatgtgaaagtctctgaaaagcacatttgtgtttcaggcagctgccatcacatcggacatattggaggcccttggaagagacggtcacttcacactctttgctcccaccaatgaggcttttgagaaacttccacgaggtgtcctagaaaggatcatgggagacaaagtggcttccgaaggtagtttaatgtcttcatctctaaggagtctcccagcattctgagaagggaataaaaaagaggctagtccttaccaataatattagttttaataagcaaaggcagggaaaaatttttattctgagatgtactatgtcttccaaaagtccttaaaagagtaggcagagtataattcttaaataataagaatactctcaagatcacattctttcatactgctttcaagtaaataagtagtagatattcagaaggattagcaggtgttggaaagaaatattagatcatcaaattttaatattgtatgcacgttatgcaatgcttttaattctgtatttatgccaaaagatattgagttgtgagaactgtatggttctcttgggcctctaattactgatacacataagaatttggtggctttccaagcttctttgctgttgtcagataggttttacattgtgcttgcatacttcacttactcagcctatcccaaaatacatttaaccaatttaagatgagaaaattttaggatgcaggatagatataatgtagttgaggcatagatccctccagaggtccttcaatgaatcatctttatttggttactttctagaagttgccttccggaaataatttgtcttatcctcagcctctatcgacctcattacatgttatatacaaatattctgctatgagcagctattacaagatactgctcttgggtattttggaatttcacaggccttccttttctttctcttttggtagagagggatcttgctgtgtttctcatcatggtcttgaactcccggcctcaaacaatcctctcacctaggcctcccaaagtgttgggattacaggtgtgagcccttgtgccagtcaaagttcctctgaaaggaacaattcttgctttcacatcaggagttacttttttatgatagctggaacttaacctaccacgttttctaatactgcaccaatcatttcctgaagctgatctcctcttattattcctacgaagctgagctgtttctattttatagttgataggaaaaaacttttagaacataaataggattttaaagctgttagtgaatccttaggttttactacattttaaggaatacttagttccacagtgaaacacatcttttcagggtcaaatgttatttcccttgatctgaaagctacctgtttttattgtgttctccagctcttatgaagtaccacatcttaaatactctccagtgttctgagtctattatgggaggagcagtctttgagacgctggaaggaaatacaattgagataggatgtgacggtgacagtataacagtaaatggaatcaaaatggtgaacaaaaaggatattgtgacaaataatggtgtgatccatttgattgatcaggtcctaattcctgattctggtaagcaactttttttgtttttgtttttgtttttttacttactgtaatttactaattatgctgtctcaaagagtaagtccatgaaaaatgaatgtgcagtataaagaatggcatgcaaagcactaacacaataaatagtgagctacttgagcactccatagataggcagtgtagtgatgggaactccatgcatgaatctttggctttctagggtttctgacatctaatatttataaccgttttcacagtgccagagtttttcttggaaagagaaggaaagatctaaccaaatggtcagctttggataaatggaaaagctatggaactcacagtatagagagaaagatgagagatgaacaatagagaattaaagaaacatgtagtaggaagacagaaaaatattttccttctgaaatttatcgtgattatcaactcccaccaaaaaatggaagtggaactctcttattagggaggaggaggatgtcttatcacactgacattgcagtaaatagcttacaatattagaaaagagtcaggaattgatttactagtttcatgatggagataatagcaatgatgacattgttgtgatggtgatggtttatttttcagccaaacaagttattgagctggctggaaaacagcaaaccaccttcacggatcttgtggcccaattaggcttggcatctgctctgaggccagatggagaatacactttgctggcacctgtgaataatgcattttctggtatgtgctggacactgttgttcctgctctctgcctacacacctttttttctttatgatgattgtttgcaataagaaacaataaatgttttaggaggtgttgattagtttctgcattggctacacatacaatgtgttaacactacatggtctctactaaaatgttcttcatttctaaacatttcattataatggataatagcctacagagagtgaaatttgtaatttgtaattaagactattcaggccaggcgtggtggctcacacctgtaatcccagcacttcgggaggccaagacaggcagatcacttgagatcaggagtttgagaccagcctggccagcatggtgagaacccatctctactaaaaatacaaaaattagccaggtgtggtggtgcactcctgtaatcccagctactcgggaggctgaggcaggagaattgaactgaacccaggaagcagatggcaccactgcactctagcctgggcgacagagtgagactccgtctcaaaaaaaaaaaaaaaacgaaacttaaaaaaaagcatatttagtttctctgtgaatctaatatttccagcacaataaggatgcattgacagatctctaaaaaaataaaactgatttctttatttgataccaacataataatatttagaaataaataggtgtgttttgcatctcaaaatttggacagtaagggtgtcaaattataaataaataaaatgaagagacttatacacttccatatcatgatgtaaaatagtatatataaatatttcacctagtagttgctattcacagaccatgttcagattcatgcaaccttcgacctttctcaggaaaatgatttcacagacatatttaaattgttaggcaacatttattaattaaaaataggtaacacaattttttgtttttccaaatgctaaattgtgatataaaaactattaatcaaaaaaattgaattcctagatatcctgactttcttctttgtaataatcctgcccatgtgttttgacaataacccatatttaagaggttgtttgctttgattctctttccagtaatcaagattaatttacaaaggattcatcagtagttctttcatgtgactaacagatatctaattatcagacaaagccttggccaccattaaggtttagcatttgccagtgaccactataaaactatgtagcccttacagaggtgaaactcattgattgaactggttggaactgtattattgtcatttaatacaataggtcacagagtttctacttggtgaattgaattgttagtttttagcatttggttgattcatgtattatatgagtgcaaaatccatgatatcaataatgtcagggattatctgtttatatgattctgtcttaccgggagaaacttcaatgttttctaaataaaataatgctctttcttaatgaatttatttacagatgatactctcagcatggatcagcgcctccttaaattaattctgcagaatcacatattgaaagtaaaagttggccttaatgagctttacaacgggcaaatactggaaaccatcggaggcaaacagctcagagtcttcgtatatcgtacagtaagtgaatcacaacaaaataaaaagtctgtcaaatgacatgtcaaataatgctgtttcaatgaatatttcacagaattttatgagtgtggttctaatagtaaatattcatagaagcatcagggaactgggtagcttgggtgaaaagactgtgagcaaagtccacaacaagtgctatgtattcaaaactcagatagatattttgcatgtgtttcattatgaataactttctattctagagcatcaattattttaaattccagaaagcagtaaattttttaaaataaacttttcctttgcagagtactttacaattttcaaggtaattctgttctctgcctacacaccatttttctttatgatgattgtttgcaataagaaataataaatgttttacaaggtgttgattagtttctgcattgactacacatacaatgtgttagcactatgctgtctctactaaaatgtttttcatttcaaaacatttcattataatgaatcaaatatgcaaggtgatcttatactgtaaaataaccagtcagcatctgaatatcttttgaatggctttcaagataaacctttattggcacatagagatttctggactctaaaaaagggttttaatgtactttttttttttaagggacagaatttcactctgtcacccaggctggagtgcagtggcacaatcatagctcactgtaaccttaaactccttggctccaggggaccctcccacctcggtcttctgagtagctaggactataggtgcacaacatcaccctagttaattttttaatttaatttttcttgagacagggtcttgctacatttcccaggctggtctcaaactttcagcctccagtgaacctcctactttggcctcccaatgtgctgggattacaggcatgagccgctgcacccagccctaacatacattttgctgcaggaaaatttatagaaatattgcttatcaaaattacagttcaactaatgatacgttcagtatttgtccagataacacgtacagctacaactaaaagacttcacaggaagtcaggcattacctagaactgaatctggcacatgtcagcagctccctgcagctacaaaattccaaacatttttaagtatgcattaaatgtgctgcactttaaattttgtatatacaaatatatgtgtgtatatatatatcacgttcgttcaaaaagctatgaatatgtcaatgatttgacttacaatgatgaatagggtcttacagtcaagaaaataaagtaaatatttgtgaagatcactaaaagcactaaagtgaggaaaccttacagatagtgttggccaaaagagggtctagagaaatagttcaaatctgaatagaaattataaaaaatgtagaagtgggattccatggaacttttgtaatttattgacaaaattacctgcctgatccataaggtagcttgacttttaataaaaaacccggctagataagaagtgtcttgtgagtttgtgtgagccattgaaaacagaggaaagaagctgttcccgtggcctcagacaccaggcaacctctcagaagggccgatccggaaacttaattatgtagttacatctatacgggaaatttcaagcaaggaaaatgacaccccatacctttctttcctttcctaggctgtctgcattgaaaattcatgcatggagaaagggagtaagcaagggagaaacggtgcgattcacatattccgcgagatcatcaagccagcagagaaatccctccatgaaaagttaaaacaagataagcgctttaggtaagcctattagtggcacctccacagagaatgagagctattggcatatttttgtttcataggcggtatcccaaaaggcattcagtctcctatgtggttgaaaatggaatttagaataaaatgttcatacaagtgttttcaaaattgatatatgttttcgctgctactttctggtacaccgttatatgatttcatgtgtgaaaacaaatctaacagactaaactacttcttgacatttttcttatagtttttagaaattgatggtatatatagcaaagactatcttgtagagtattacatgataaaaatgcttcttttttgttatgtgtgaccttgtcaagttttataggatgaaatcagatgaaaaaaattaaaaattgtattgtatatttcagtcatttttcatgataaaacttttaacaggtaaattgtattcgaaacatatgaaaatgtatgagcagttctctcatgctttccacaatacatggattctattctattacatgcactgtaggtgaacatacctaaatctaaatctgacaaaatacatatacattcttcccacttagcaccttcctcagcctacttgaagctgcagacttgaaagagctcctgacacaacctggagactggacattatttgtgccaaccaatgatgcttttaagggaatgactagtgaagaaaaagaaattctgatacgtaagtggaagtgaattccagatattttccctttcatttcaggatctcacttctttctcaagctttcctgtccagatgtctgccttaaaaatgccccctctctggtattcatggttagctttagtttccttttatttcgtccacttgggatgtgtggagggtcactcagtaatgttcttaaactgtgaactgttatgttgttgggctagatgttcacttatgtggtttctattaaagaccatgtaatcaggggacaaagaagaaaacagttataatttagaaaataaatagatttttttctcccagtaagttgggttctattttgattaggctaattgaaataactatgttttgaaatagcatcgatatctacttgagagaataatgatattatgagaaagtacaatatggaaaaagataaagactaataagtgttttgtttcttagtccttatcaaaaagtcatattattcaataaaaataaacatatattttcccctaggggacaaaaatgctcttcaaaacatcattctttatcacctgacaccaggagttttcattggaaaaggatttgaacctggtgttactaacattttaaagaccacacaaggaagcaaaatctttctgaaagaagtaagttgtctagaatgaatttatgatagtgttcatccatcattaagttatctaaatattcatccttaatgaaatttcctcattgaaattgcctcctattttgataggtaaatgatacacttctggtgaatgaattgaaatcaaaagaatctgacatcatgacaacaaatggtgtaattcatgttgtagataaactcctctatccagcaggtttgtaattattgaactcattgataggctaagtctttttttaatatgaacctcgatttttattttatgctttcttaccaatattcatttaatatttctcttcatagacacacctgttggaaatgatcaactgctggaaatacttaataaattaatcaaatacatccaaattaaggtactaaaagttacttgatttatttctttttttttttttttttttgagatggagtctcgctttgtcgcccaggctgtagtgcagtggcatgatctcagctcactgcaagctccgcctcccatgttcactccattctcctgcctcagcctcccgagtagctgggactacaggcgcccaccaccacacccagctaattttttttgtatttttaggagagatggggtttcactgtgttcgccaggatggtctcgatctcctgacctcgtgatccacccgcctcagcctcctaaagtgccaggattacaggcgtgagccaccgcgcctagcctaaaagttacttgatttatttctaatatgtagaacatatattacaggtttaacataacaggctagaaatgtacgcattaataagtaagtatgtactgggcttggattactctttgttgtttatgtaccactgacccacctgtaaagaaatggcatcatttcttcatggttttgttcaacaaatatctattaaaagctactcaggaccaagtattgtgtaaagtgttatgaaaaatatgtatttaaattggacatgtctttattcaaaaagtttacagtccaatttagaaaaataaaatggtacataaatgactaaaatcgttgtatcattcaatactttcactgcagaatataaaggaaagaacattcacttataaaaaattgtcactcatcacagattaaagggaacggaatatttttcttctttttcaatgtagggtaaaagtagcaggaaacataaaattgtgtttcataaatatatttaactttggattaattattatataatttttaaatctctgagtaatgaatccaatgatttttatgccctctgacctgatagcattgaattggaagatgatttatatgaggacttcacttctattaagtgtaataatagcttcactatttttactttaataagaattaaagtggtgccatggttttgttaacacaactatcacctttcatgttactaaatataaacatttattttcagtttgttcgtggtagcaccttcaaagaaatccccgtgactgtctatagtaagtatataataaatattggccacctgggtggcaaggtatgaaaaaagaaaacaatacatttctttgtatttacagagattattgataatctggtatttagaattccaaactatggccaatctcatttcacttgaaaaaaggattgaggtctcagataaccttcaactccaatgaacttcttccccactcattggaaaaacagaaatgatatgacatgagaaagacagcaaaatataatattagcgtggcaaagagccaggaaaataaaaagacatataaagggaagagatggcgaaaagaccctctagaaatatctaaaaattcagatgtgtggacacagaaatgaccttagccaagacttgttgttcacgccaccctcaagccctgagctatctaagggcaggctgagaagcacgtgttgaagaataccaatgtttataaggtggcagttcaaaaactctcccatccaaaattggacaaaggaacaaaaaaatctgccatgtgacaaatttaaagtttccaaattccagggttctttgatctctgacacaaccagattatcaaaattaaacctctactacttaacaatgataaagggtatttcattctcataagtgtagctagtagtatatcttttccatcatggctttttctctgtttatcttttctctctttctttatttcactgtagctttcaagcagaaattcttttcattttgttttggctctgtaattaaacactcaaagtgtatcagtagctaaaacattacttcaatacccacatttattctggctagaaaatcattccattttataccatgagcatccagttatttaattaagaaaatttcccttaagatttatactagatatggaaaaggagtaaagccaatgtaaggagcaaaacaaaatgtctgctgctgttgttgatttcaattatgcaataataacatgcaattccaggatcaggccagctcagcactgtattaaagatttaattggaatagttatgattcaccatgggaatacaatcttgtaaaaaatatgttttctgaaaattaagcaatccttatgggctctattcatcagacatgttatgtcatctttcttcatcaaaggtataaatatatacatatgcatatatatatatacacattcccactacatttctttagcttcccttctttatccatcttagtttcactactttctatatatgtgaatgcaatatcttgattacaatgagcaaaaatataattattttctcctactaaattacatcctcactcacagagcataagctacattttattaagacacacatgttcaatggtccttccctacctacccagaggccttgaaacagctctaacatttacattccaatgtaagatgtttcttttactcctccttagacggtatgctgttattaagaagtattttaaagtagaagtaaagataaattaaaccaaattttctatttttatatttcgttgttgacttgtttctaaaattcctataattttttgctgcatattatcctcatccccaaaataacatccattttaaagtgtatagttgaggggaaggatgctgtttttggtataagttgtcaaatatggaacatttgacctggagagggctaaaatcaatatttaatcctcagagcttcacctgtcaaaactatttaagtctgcagaaaatcaagattgaaatgaaaactaccaaccagctgaacatccaaaacgtcaaattccttaacatgatgtaaaaaatgtaagctaaaaggaattagtccattttgatagcagcaatagagagccctgtgtattcgtattcgactttcatggaaaggttcttctgtggcaagaccacctgtggaactagtacctaaacacacagatttgttttattttagagcttcacaatttgagatctcaaaatacaaaacctaataaggctgaaacacagggtctatgaaggctaagaacccacattaattcaaaaagttgacacagctaaacatcttacaagcatgaggtgagaactgcagaaaccaaagctgtgctaacatctcacctctactgctttgatgtgatctagatgcacagttagcttcagtgtggcccgttatctaatagaaccatctttcaaggcttttcattagaaatgacaaaaagccagttgctctggctgtgtggcttcagaggcacatttccagttaatcagtacaaccaaagtcaaccaaatagttgactggtatttaatttattttaatttacttttattatagatctaggggggtacacacgtaggtttgatagatggatatattgagtaatgctggggtttaggcttctagtgaacccatcacccaaacagcaaacatagtacctagttcaaagactattatcttacttaggtagacgacacacgtttaaaatatatacctttaaattaaaaaaaaaaaaggatagtgataacaaagctgaaaattaaagacattttagcctataacttaaatactgatcatatcatgtttgttgaatagagctcatgtctggctggctgaaatttattcttacttttaagtattctgaactatgtttcattttttcctttctatgtcactgttatcagatgcatgaaaaacattttaaaagcctttttctttcattttttcttttaattgagaaagaatccagcaatgcaatttaagatattatgaattgcatgacattaatcatatttgtcttctgttgcaatgcagccagtattttcaagaagtacaaaagaaggtaaagcgctttagcggtacaattaaaaattacagatttctagatataattcctcactttgtgagtatatatttcactagatcaaattcaagtcactagacttcagagttcaacacctggacatgagaagatattatattatgtaccataaatatttcctgtatctgactgcctgaacatattaccacatcctgtgccttagtatcctacagagacaaaaaagaaaaggaaaaaaaaaaaaaacctttgttcaggtttttatgtaaatatttttcatgttccactttctatactttcagcaactaaaattataaccaaagttgtggaaccaaaaattaaagtgattgaaggcagtcttcagcctattatcaaaactgaaggtaaaaatcaatgttatacatggttccttttatagtaaaaacatctgtaaaaatactgatctctatgaatgtatctacattcttttaaaaactaacatgttaaatgttatataaccaatattataccaatggcatgctcatgtaattgcagaatgcggagtgcaaattatttagcaaagtagatgatgcattcctaatactttcagtacatttgcttgtacttgatttaatttgaatctaattggcattgcattaacttagtatacagatactcactaaacaaagacatgagttttttttactttagtcagactcctacaggctgtatactctttatgttgctttgtttgcaatctcccacatgttctttcttataacagtgcaagaagctcttccaaaaaaaaaaagtataggcatttttcattgtgtaacataagatagcatagaagctatgtttactgaaagcttttaaaattacaaccacgcatgagatattttttaattagaccatcagaattataaaacaaaatgagtagtttatgcagtgaattgatttttaaaatacttaattccagccctgaacatattattacatacagacgtatatattatacatgagatatatataatacagacacacacacacattctctcctgatgtttcagactagaacattaaataagcagttacttttctctctactcccactatgtatgttagccaacttcaacatctttgatgttactttcatttcatgtattttaattatgtccaaggatcacaatttaaattttttaagatttccatgtataagcatcttaatgtagcaacttacccagagaaaagaactagttatctcctttgtgctataagaaagctagaaacagtcttccaaaaagagaacagattatatctttgatggaatctttgggaaactgtaattatacttatgtttggttttgctatttcttttggtggtttgagaaggtaacttcttgaatacttttatctatattttttaaagtaagtcattaatttaaatttatacactgaaaatacataggtaaaaacttatttcctagctaattagttatctatattagtatttattcttgagacttaaaattgagttattctttgaaatctatccttgtttttttcttgaaaaaaatactataattataattatttaatcgactttctatagtgatgaagacaattcggtattttaagaagaaattaaatcagaaagttttgttgaaaaaatgttccttgatcattgtaataaaacatgacacaatgatctttgataatacaattgattttaaaatcaaatcttgtcctgtttttaaaaatcagattccctaaaattttgcactataattgtgcacagcttctttacctgaaattatttacatgtgccaatgttcttattttcaaagattcttctcctttgaagcttctttattcaacttatttatctcctcaatctttgtcagtaggattctatcctactaatctttattcagttaagatcatactggcgggtcatctctacatggcttcttcttataaagggaacatggatgaaaaatggagttgtgtcacctactcattaataacttgagttcagaaattacactcctgtgtagcataatgaaggaaacaaatatttatcttagtagtaatttacaatggtccagcttccaggattgctactggcatttccttcttactatttgaacaattacagatttattgatgacttttaaattcttactaaatgaattaaactccaggacacaattttaaggtgtctcttataaaagatacataacagcattttggaattaagaataaatcagctaaaattcaattcaacaaatagttattgagcagctattctgctgggtactttctgaggtgttgggagtaaataggaaaacaattttgagaaaatctcttcttttatagagcttaactataaaggatgtttccaaaatttcagtttggcttttctaaagaaatattgatttagatattttattaacgcatttttggttcttaaattccttaggcgtcctttcttttgaagttaccgcaccttaaaaacctggctttatgttttgtgctcaatatcccttggccttatatatcaaatattatggcatgaaatacttatggtttcaaaaaactttacttttattttcattattttggattgttctaggctggtttcgttttggtaatcatgtacattgacaatttctgaacaagcaaaaaaaaatgctctcaaagataagcaagcaacagttgcattccactattgaaggctattacagtatgagttaaatgtactgaacttatttttcttactcctctgtgaaacagtcttaattaactaatgtagtaagcagctttctaaccttcaaaatgattttctgtggtagcaaaatcattttgcaagtcaaatgcaacactagtttatcttttgcatttgaaggactgtttaactattaactggttaattgtgtatcattcccatacagaaggtaagtactcaaattattttcctcataaaacctgacattcagcatcttaaaggtaggtatacatttggtactttcttatgttcactcctatacccactagatcaaaaatataaggtactgagtgattttaaaacttaaatgaaaaattttaataaggaaaaagtaatagacaatatcagtatgataaagtgggatctacaccagttatcagagaaacacaaatgtgtacatactgcatgatctgcaaagtgtagccacatataatattttgcataatcatactttataactacgaataaacagatggatttatccatctgtttaaaagctaaagcagatgaaagtaattttagtagcacacaaacagactaaatcatttgttctcataactcttgtctaatttgaagacaatgggaaatatttaaaagtgatttcatagagcctgaaaccactttgacatttgagttgagtcacaccgaatgttgaaataaatgtcctattccggtaaatttaaaggactgttttaacatgataatttgtctcctaaaataatgtcccaggacccacactaacaaaagtcaaaattgaaggtgaacctgaattcagactgattaaagaaggtgaaacaataactgaagtgatccatggaggtgcgttccttatgttacctggggccgactaccttcgctgtgattattttgaaatagtgttggtttagaaatattgaacatctgatattttctcttagttcttattttataaaaattgtgggaattatttcctcagctatgagttcttattagctggtcagaaataaaacatagttagcttttaatggatctagttggaattaatttatctattaagtcactgggcccaacaaaatgtcatgatttttgcatatacaagtgaggattgtggaataaaattgtaacattaatgtcagtataaaaggaaatattagaaacagtaggaaaaaatgaccattgtataagtctctgtctaataagccactccactactaggatttatgatagggctcccattccaatgatatagaactccctggattctcactaagtatttattccacatccagaaaacaagtatgacatggagagttaggatgtcaaatggccctctctctcaaccaagattcaggacatagctattaccttttagatccctattgatatgatttttgggggatatgttctaaaaatgtttatgattgaatcttaaatggtaatatttgtagaaatatagttaatcattacaatgtctagcttatggatgtatagtcacaatatgagggtaaatcaaatgcatttgtattcccctgcttttagagccaattattaaaaaatacaccaaaatcattgatggagtgcctgtggaaataactgaaaaagagacacgagaagaacgaatcattacaggtagccattaattccatacatggatctatgcctagattataaagatcaaattatagttaatccccaaatataagaatcattaaagaaacaagtcattttcatagtgattactaaagttacttcatattttggcagatataatattattctaaatatgtaatctatgttttactctgaattgaaaatttgtagacaaatctaaaagcatttgtttttattacatgtatgcatacatacatgtaatatgatataccattgatatgatattccattttcactttactgtttgttaatgagttagaggaccctagaagaaaagccatttcctcatttgagcttccattaatcttaaggtctgtacatctacctgccaaaatagaagcaagtttatacaaagcaattgatcaatattttcagtaaacctcatatcagacttccaaactagcgtccagttggtccaaattagcctaaaattcgccgaaaatccttaattcagctattctttaagtatttgtttaaacaattagtgagcaagtgtggcttgtgccacccatttatggaaataaagttttatcggaacacagtctttcccatccatttatataatacctaaggctgctttcacactgaagtatcagagttgaacaatggcaacacagactacatggcccacaagtgtaaaatacttactctctgtcacttcgcagaagaagtttgcctacttctgttttagacctttttcattgtccttctcataggtcctgaaataaaatacactaggatttctactggaggtggagaaacagaagaaactctgaagaaattgttacaagaaggtcagcatttctaggaaaataagaatgtgactttacctaagctatccatatacaagtctaaaataacattctacatgttttctactctatctcaatctattgttcatttccataccaacaagaaaaaagcacaagaataaggaattaagcataaatggcagtcatattttttatacagtattttgttcaacaactttataagaatattagtatgtcagaaaacagcactaaaatttgtgaaagaatcgagtgttgggctggaattcattattgggcagatgccattatttatgacataaagtctgctgtctttattttgttatataaaccaatttctgctataaacatgtatcctctcagaggtcaccaaggtcaccaaattcattgaaggtggtgatggtcatttatttgaagatgaagaaattaaaagactgcttcagggaggttagtaaaaggacaacaactaacccccttaacaggttctagtgactgagttcaactttttaaagactgagcaagcagattttttcttttaattgggttaaaaaaaaaaaagacaacatccactgttgtcttaatagatggattggttcaatggtagttaatagttatgaagaaatgattactagtttaaacagtctttaaaaagttctatggtataaagtttggggagcaatgaatattttttttgctttgattcagataattttaagggccttttaagtatgcaaaagggaaataattgttaaattgctagctgttaaacaagcccaaatttgatatactttttatatttaaaaaattatattcactgcccccataagagcaatcaaggcatgtctttaaattctatacatagatatagccaaaaatagtgcatttagtaacattcttttccaaaactatattcttgggaatgaatatctgtttcttctaacagtttgagtgataatctatacctgtagatataagttattttgcatataaaattaatcttaatcttttatggaatgttctctgtctgtggcattaaatgaaccttaagaacaaaaaaaaaagaattcaaaatcttacacaaaccctacatagtaattattcaaagatgttgtttatatagatacataatttgtatcattggcatttgaataaacaaatttctacttcattttttaacaaggaaagaattaagctgaaaaattattttttgtgaaacatgtatttatattctttagaaaaaccaaataggcactttgaaatatactattaattgagaaacataactgaagtttgatgtttatccaaaacacagtccagatggcttttcagcttatactttttaaaactgtatcactatgtccaagaaaatgtaaattatcttgggactttctatatttttagcaattattatttctatattctgtagtttaataaacgtaaaatctcttaaatagtatttagaaacttgtcagtgatagtttaaaaatttttaattcaaccaatgattgaattttccctcaatagaaatatatatgtctgaaaaatacaagtttcctcccagaattctaagagtacatagcacaacagagccataacggaaccaaagattcctgtaggatctaacaaagaattcactatctacccctaaatgctcaactgtctgctaggaaaaaaatctaaggatttgagggaagagacaaacacattatgaagattaaattgaattcttttttttttctttcagtccttgccatagtaagcagctttgtagaatggtagtgctttttagggaatcaataaattagtagctgcatcagtttatattgctttaattcatttaggattaaatttcaggtaagtatattttcttcccctttgataagcccctgttattgaggccactatgaaaaatccagttaaatactaaagaattgcttcagccaagaaaacatataactgctacaagttaagtatatgacattcaatttttagttaatgaactcctttcttagctcttgcctctgatcatcccagaagtttattcctttagttcccagtgtatgatctctctacatatctgtaaggcatcggttttcacaatgccacgtcaactattatagcattgtgaaaaaacaaaaaaaattaaaagtttttatcaaatcatttctccaaggttttgctttttgtaggaaaaacactatatgcggtagaattactagtaccagcattaattggacatgcttgttttcttttttccagctatctaaaaccatcaggtcattactgagtcacaagtatccccttgtctagatcctaaaaggcattgataaaagaagctagtaaagattacactatgtaagactttttttttttccaaggtctggccaattaatacatatctgaaccatgctcttcaactcaataagttctacctaaaactgaattttctatctaaacagttcatatcgtatacattgtggtacatgtagtacattttttttttttttttttgagacggagtctcgctctgtcgcccaggctggagtgcagtggcgggatctcggctcactgcaagctccgcctcccgggttcacgccattctcctgcctcagcctcccaagtagctgggactacaggcgcccgccactacgcccggctaatgttttgtatttttagtagagacggggtttcaccgttttagccgggatggtctcgatctcctgacctcgtgatccgcccgcctcggcctcccaaagtgctgggattacaggcgtgagccaccgcgcccggccatgtagtacattttttgtacttttggtaatttgagtatatttctcaatcatttaagtcatgactattaacatggctaactggtactttgagtactgatgttgtgatttgtcactgatacacttccaagaccttaactgaaaaaatttctcattaaatgcataaaatttttgggcttaccttagaattatgcattctgaaacgactcaagcaattaaaggagaataacagactatgtcgaaaggaacaacaacaaaaagtcatttttgaaggttttcgcaaatctgccaacataagaggttaagatttgtaacctctatagagaatagtagatcgagttgtaggtctgcattcagtctgagccccaactcaatcccaaattagttgactcttttcttgcttgtttccttcatctgaaagtgaggatagtagtgatacctacagtctaaataagttaatatatgacaagctcttagaacaatgttcagcacaaagtaagctgtcatcaaatgttactgtcaatcatcaattgacattaacatggtcaattaagtaatgtttctcacccaactttaaatttccatagtcataaccatggaaacatacaaaaaacaaacatgcaaataaaatgtcaaaataattgagctgagtactttgcatgctttaggaaataagatgtagggtggttctttgtgccaatatattcaagtaattggtttatcttcccatgttttgctgctctaaacatgatctaatataactctcattcatgttgacatagcagagagctgctaggagtaaacctgttttctacacattaatcaagctgttctttcaaagtatttgtttgacacattgaatgttttttattctggaatattatcacagcaaaacctcattaattggatgctatcaaaattatgaaaggaaatctgagtgagcacacttgttttgaaaagaaattggtaaatacttctatgatgcagttttaagttatacaattaactgctatttggaatttaataagtccactataagcaatgtgcctgcacaccaattaaaggttggatctgtctcttcttgacaattttttagaagccattatttcgttaccaaataaacctgaagttaagaaatatttatatttacatctatttatatctgttggagaatatttcataactcagacttggttgttttacacagacttctccccattatccaacatagtgagatttttctatagttctatattttactctagtattaatgtggttttataaatgattatatgccttatattctggggggaaagaaatgtgaaaatgtgctaagtagacagaaacagaatatataagttgttttgaatgttatttcttttttaaaaaatttgcttggtgtcatatagccaaaactattcatggtgacagtttcattgcttactttttatatgatttcagcgaattgaaaacatgtatataatagaaaaaactggacttcatgctgagtatagatgatacatataaaagaagtcaaaatttggagaaaaaatttaaaaagataagtagaaaaatgaagtaactgtagaaaccatacttactctttgatctcaaatgcccaaaaactgaatgaaaatgtgaatttaggccgaccaggtagtcttgtcaataaactaaaagaaaaacaggaaaattgagaaatatgttacaactataacaacacaaaacagcatagttttgaaacacttgcagttcttaaatataaaagcttttattagttaattttttaaaaggatctcataggattgacactgaatcaggttgggaggtggaacaagggtgatggcatattctttctgaattacttattataacatttctagaatcattaggtcagtgctactttgttgtcgtcaatgtacaataaaggaatcacaaattgatcttagtgataattttacagaggcagacattgcacataggtatgactgcaaaaatgggtggctaactctgggaagatacttgtgttaaactttatatgacatttaataacccttcatcataaggcaatgttttttacaaaaagattgaaaaaatcatgtaagtcatttactctgcaaaaatggcacattaggtggggttccaaaatccataatgaaacaatgtgttttgcaactaagaaacattcattatgatatatggaaaacactgtctgtctacttgtcctttacgaaaaaatgtaaaactctgaggatcataaaatttaactactaaaaataatcttcgtgtttaagtgatacttatttaagactttacactgttctgtttaaccatggtctcctgtctgattttagccataattgcgaagtatttctaactacaacaatttaattttagacacacccgtgaggaagttgcaagccaacaaaaaagttcaaggtaagtgtattggctatagtaatgtgtgtatatggcctcttttgttacatgaagagaaatcaaacaataggaaagattttaaagtattttattgaaacttgttatcgatcagagagaaaagctagccagttttgatgaaaacaattttgataacaatcagaaaataaatttctcatgttctatactatcagaatctaataacaaatattaagggaaaggtcaacatactcatgtaaactgctaggcatattgaacccttgagatagactcaagtgtatattctccatacatatatatatatatatatatatatatatatatatatatatatatatatgtaatgttttgtatatacaagtatacatataattttgtgtatataagagttaagtcaaaaagaaattgttgaatatcagagataaacaaatgtagattgcaggtggacctgaatccttaaaaatgttattatgtgagacaatgctacagtttgagacataagtaaataagaaatgtatatatgcaaaaaaccattaatatagctatttacaaaatgttcatttaaatatgtagattatatatgtatatatcacatgtgcattacaatttatttcataattacactatgtgcatttgctaattcctccacttaagttatcttacattccaatacattgagagagcaagaatttcccttgtggaagctagagtaaattgcaagtttggaattgcaagtttggaatttctgggttaattagatactagtagtgaaaaggagacacaaggcttatcaatgcgctataggaacttcttactttaaaccaatccaatatacagacctttgaaagtaaaagatcaactgcacagatattttttaactaaagaatgtgtcagtaaatctatgtaaatatccaaattgacacaaattttctaaagagttaaaattattaaatttcaaattattattttatatacttttgatcaaaatataatatttgcttcaccataagttgaagatattaagaaaacataatctaaggtttattacaaaaaataatggcctctgatagatatacagagaataatatattcttaaattttaaaatttcctaacatttacagtctatacattctcctttctttctaattaggatctagaagacgattaagggaaggtcgttctcagtgaaaatccaaaaaccagaaaaaaatgtttatacaaccctaagtcaataacctgaccttagaaaattgtgagagccaagttgacttcaggaactgaaacatcagcacaaagaagcaatcatcaaataattctgaacacaaatttaatatttttttttctgaatgagaaacatgagggaaattgtggagttagcctcctgtggtaaaggaattgaagaaaatataacaccttacaccctttttcatcttgacattaaaagttctggctaactttggaatccattagagaaaaatccttgtcaccagattcattacaattcaaatcgaagagttgtgaactgttatcccattgaaaagaccgagccttgtatgtatgttatggatacataaaatgcacgcaagccattatctctccatgggaagctaagttataaaaataggtgcttggtgtacaaaactttttatatcaaaaggctttgcacatttctatatgagtgggtttactggtaaattatgttattttttacaactaattttgtactctcagaatgtttgtcatatgcttcttgcaatgcatattttttaatctcaaacgtttcaataaaaccatttttcagatataaagagaattacttcaaattgagtaattcagaaaaactcaagatttaagttaaaaagtggtttggacttgggaacaggactttatacctcttttactgtaacaagtactcattaaaggaaattgaatgaaatt

SEQ ID NO: 59 - DNA, 42573 bp, Homo sapiens
tttgcagataaagaaactgaggccaaagtacacaactaatttgccagcgtaacaggtaattaggagccacacagctccctttcacattttctttctattatttcatggttagaagttacataatttccactgatattaatacgtaaccatttttttgttgttgtcgttttgttagtattgtgtgtgagatcgaggtgggtgggcagatgagttaaatattattaatccaatttaaaatagattccagatatacacagcctttagctgacgagaatatcatccctataatctgataaagctcaagtgacatcatcctggctagtataaactttaacatttttaatgcgaatagtctatgaaaaccacagatttcttaatcaagctcatttttgtgtttccaactctgccttttcagcctgcaaacaaaatgctcttcccccacacccactgctgttttctacttttcttatgattaaaaaaaatatttcccttggtaaccattttccctggttactttcttggctgattttctgcacaaagaactgaaaggcatttatccccaagggaggcagttattttagattttactaagaagttcagcaaatacttttcaacattcccttctgtcctttctttgtttttaaagaaagctctgattttgtttcattttcagctggagacttaaatgacaccaagcaaagcctacttagtttagatctccaggtaaaaaagttttaaattttaagtttctacttagcatgtggaatggttttaatatttgggtattttatttcacaactgtttaactcttgagtaaattagctcgttactaatagatttttaaagttcaaagtatgcattattctgtttgtttttttcacgatgtacttcccaagtatttcagaccttgtatacttagtattaaattatttttatatgtttaggtggaattatgtgttcaatagaagtataaattggtttgaaaatattattaatttttaagtcctaaaagaacataaataattcaaaatatttttcattttaaatctgttgaatgaagtgaaaatagataatagacatctcatgacttcatgtagaattttaaaattctaaattaatatttttaaagtttacttaagataactggtaagaaattttaaatgaagaaaaataagttaatcaaggtttataaataatatttaatgttgggataaacacagtaagtgctagaaggaaaaaaattacttgataaaaatgatactatgattggaatcccagaaaatttacctctaggaggcaaacactcaattacgaagttgtttatgaaagcaaatattaagtgcaaagcaaaattctgtatatcaatgaaaataatgagggcctaagcattaatagtaaaattagtattgagagaccatttcctaaaatgtatttaaacactgtagtgagactgtttagatactgattttgtcaaaattcaaatagctctgtaagtttatttctgtgcctatctatttagatttctgggtaagtaaaagtgagtcaatttgggggaaaaaaagaaagagaggtagtttccagaatgaggatactgggagagaggggtgtgctcagaatggccacagctggcacattcacactcctaagcactcaatcaggcaatgccccataagtgagtgctttcaggatgcctcaggacagcaggatgcctgagaccctcatgagagtttaactctagagcctcgaggtctaggccctgactcctcacaacaggatggaaggtctgcacatacaattgttaatgcaagaaaatttcaatgtatacatttcatgcattgcagagcacttatgatatccatcagagcacacttgccatgccactcagcaaattctagtttcactttgtctctcagttcaggttttcatattgctttcccctgctgttgttgttattcccttccaacatactactttgctctctgaattgacttttatgatttcaggtgccaatcagctaatggatttggtccttctttacatgctgcatgttaatttttctaaaactaaagtagattgcaaaaagttgttcaaaaagttgttccagtaacctatgaaatataggtcatttcaataacctatagtaatggttttcaaatgactgtggcaattaatgtatatatacgctgaagaaaggtttgtatgctggcatgaagatactttagagactgccgtttgttgaacaaaggtgatgtggcaagtcagactatgaactaactaagtgaaacctgactagaggaagatgattctggcagatgaagttataaaaagaagtactgagattcaagaggggaaactgagctgaccttgtgccctcttcccctctcaccaactcccttgaaataatacaagatatattacagacaaataaatgcacgaatatacagctacactaggaaataaaaaggggagctcctggtgggacagacactctgaggagtccttcacagacaaagagaagacagaaatgaatttaaagaggaaaaatgtacccttgaacagtcatgggagaaaacagagtgaagagagcttgtataggaaaaaaagaagtttttagtttaaaagatcccaagaaggatacattaaacagcaaaaacaacctataccaaggtacattccattcttttaccaaggtaaaacttccaaatatcaaagatatgttgaaaatttgaaaaaaatttctatagaaagaaaaaaaatttcttacaaagggatgagaatcagattcaagtcaaatttctcatcggcaacactaaatataagaaataatggacaaatatctataaggtattaaagaaaaatgattagaatgattttgaaaccgtaattctgtttccaattaaacaatgacattttcagatctttaataagagcacagaattttacaacttacaacattctctgagaaaaagaggatatatttctgcaagaaataaaaggaatctgagggagcttctccttctgataatggcagacaaggcaagtcagatcattagacctgctgagaataactagaaagggtgagaaaaacaacagggccaatatttgggatgggactgaaacccagagaggtttagaacagtttttcttctagaagcatctggattccagaagaggtggttgagaagattaatagagttttaaaacagcctcaggaggacagagagaaacaaacaaacaaacaaaatggaggcaagcaagcagtgggggatggtaggaaaagtgaagtggacccaaagcatatatatatatatatatatatatatatattttttttttttttttttttttttttgtttgagaccgagtctcactctatcgcccaggctggggtgcagtggtgtgatctcggctcactgcaacctccacctcccgggttcaagtgattctcctgcctcagcttcctgagtatctgggactacacgcgcgtgccaccacacccagctaattttttttgtatttttaatagagacggggtttcaccatattggccaggctggtctcaaactcctgaccttgtgatccgctagccttggcctcccaaagtgctgtcattacagacttgagccaccgcacccagcccaaagcataattattaattcaatatggtgaagcccagcttcaaatcactcaatattctattcataatgtacttaaccttatgcctgaaacagacgcaaattctcaagtattttcatatacaatatctggcactccatcaaaggtcatcaggtatatgaagagacaaaacatggctaaaaacctaaagaaataagagacaaccgaaatagacacatagaggatccagaaaacctagtcttcagacacagactttaaaacaaatatttttaatatgtttaaaaaaataaaagatgagattaaaatttttaacaaagaattggaaacaaaaagaacatactgaaaacctgaaaactagaaaatacaataaaagaacaaggaagtcaatggatagatttaatagcagataaatcacagatgaagagagtatcaatgaactggaagatcagttcagagaataaccaggatgaatcactgaagagatagacaaacaaaaaatacaaatgaggggaaagtgacattaaagacacaatgagaaagctgatatgcaagtacctgtagttatagaaagaatgaaaaaagggaaaagagaatgtactatttgtatagttaagggctgagaagtttccaaatgtgatgaataacatcaggccacaaattcaagaagtgccaaataggataaaaacaagaaaattatatctttgtatacagagtgaaacagctgaaaaccaaagacaatgagaacatcttaaaaacagtgagagaaaaaaaattacttttaaaagtgaaaaaattagattgagagatgatttctcaaaacaaacaatggaaaaaagaagacatagaaattgtatcttcgagccgggtgtggtagttcgtgcctgtagtcccagctactcgaaaggttgagtcaggtggatcgctttagcctagggattcaaggccagcccaggcaacatagtgagacctcatctcaaaaaaaaaataaaataaaaaaaaaaaaacattaaataaaaaaagaaaaagaaaagtaggtgggaagaaggcaacaataaaatactggaagctaggaaggaaatgaaagtgtagggggaaaaaatcaaccgtatcttcacaatgctgaaagaaaacacttgtcaaccccagaatgtatatctaacaaatacatcctttcaggtaaacaaaaataactgatcaacacatctgcacaaaaggaattattagaaggtgatcttcagtcaagaagaaaataatcctaatagaagaaagtagatataggaaggaacgaaggaaaatgataaatgtttaggtaaacctaaacaagtggttctcaattgaggggcgggttacatttggtaatgcctggaaacattctttggttgtcacaactaggaggaaggtactaatggcatctagtgggtagaggccacggattgctgataaatagcctataatatacagggcatctccccataaaaaaagaattatctggcgcaaaacgttaatagtgatgaggatgaaaaatctgatctaaataaactttgacaaaataaaaataatcttttgagggtttaaaaatacatatataattaaaacacagaactgaaacagaatatatactgggatagggtaaatggagttgaagttcatcctggttcttgtattgtccaggaagaggtaaaggtactaatttatattaagactttgataagtcaaggatgtatgtggtaatctctacaaagaaaagaatggtaaaaagtgtataattactaatgaaataataaaaaccaagcaacaagttaaaaagaaagaaaacagaaaaaggaacatagaacatgtaggacaaataaaaagcaaatagaaagtatatttcaattcaaacattaaattttacattaaatataaacagcctaaatgttccaattaaaagacaaaaattgttaaactgcattaaaaaactccacaatatgccactaataggaagtatactgaaaatataaaaatatagaaagacagcaaaacatatattttgcagacattaatcaaaagaaagcaattacatgcaggagcagaaaaccaaagaccacatgttctcccttataagtaagagctaaacattgggtactcatgggcataaagatggcaacaatagacatgggaagaaggcagggagaggaacaaggattggaaaactgttgggtactatgctcagtacctgggtgatgggatcattcatatcccaaacttcagtaccacataatatactcagttaacaaacctgcatacaaccctcctgaatctaaaaagtcaaaaaagaaaaaaaatgcaactacattaatattagacaaagtagatcttatagcaaaagcactcccggagacactgaaagtatccacctaatgataaatgcaccagaaagatataacgactaaatttgtacatacctacaatcattaggacaaacaaggcaaattattaggacaatttgaacaaataggttaatagtattaaagtctttaaaatccttattgatattctgtctactaattaaaaaatattaattactttttattggcataaaatgactactaattttttaacagactttttttcaaagcagttttagattcagagcaaactgagtggaaagtacagagttctcatatgtgcttttcccctactatcaaaatctcacaccatggataaatctatgctgacatatcattatcacccaatgtccatagtttacattagggttcactcttgttactctgtattcttgggttttgacaaatttttaatgacatgtacccacctttatagtactgtcgtcccttggtacccttgggggactggttccaggatccctcaaggacaccaaaatctgaggctgctcaagttccttatataaaatggtgtagtatttgcatataatacacatatcctcctgtatactttaaataatctctagattacttacacctaatacactgtataggctatgtaagtagttgttatactgtatcatttaggggacaatgacaagaaaaaaaagtctgcatatgttcagcacaaaagctacataggccaaactacatttttcgctcatggttggttgaatccacagatgcagaacctgtgatataaagggctgactatactgtatcagaagagtttcactgccctaagaatcctctgtgttccacctattcatccctctccgccccaaattcactattcttttatagcttgcatagttttgccctttctagaatgtcatagagttgaaatcatacatatgccatctcaggttggcttatttcatttagttatatattatatgcatttaaggttcttccatgtattttcatggcttgatggctcatttctttttggtgttgaataatattccattgtctgaatataccatagttttttttccattcacctattgaagaacatgttggttgcttctaagttttggcaattatgaataaagctcctatacatatctgcgtgcaggtttttgtgtggacatagattttcatcttatttgggtaaataccaaggggcacgattgctgggttgtatggcaacagtatgttaagttttaaaagaaactgccaaagtgtcttccaaagtggctgtaccattttgcattcccaccagcaccgaatgagacttacagttgctccacacactcaccagcactgggtgttgtcagtgttttgggttttagacatttggtaggtatgtagaggcatctcattttaatttgtaatctgtctactatttttgaaactaatatttaggattgaagtgttgaaattttggatgacaattgtggatttgtctatttctttttgcagtttttgaaaacaagtttaccaattatttttggtaatgtctaatctgctattcatcccttgtcatgtattttttctctctcacattgtagttttcatctttaaaagtttgatttgggtttttaaaaatatcttctatgtttctacattacatggttaatccttcttctcacttcttgaacatatagaatataggtataatgatttttaaacacctactttattagtatatcagcactgtcatttctgaactggtttcaataaactgatttttcccattatgggtcaacttttcctgtttctttgtgtacctggtaaatttacattggatcctaaaacatttgttgggttatctgagacactgtcaagttattgtacgcagtttaattctttcagaaaggcttgcttttaagctttattaaatgggatcacagcagcctttagcctagggctaattattttcctctactgagctaatgctcttctgagtactctaccagatgccctgtgaattgtaaggttttccactctgactggtggaacacaaactcttcctggtcttttttaagctccagagacctgttttttttgttttgttttgctttgttttcccctttgtcctttaggttagttcttttcccagtctcaagtattaatagtttacttacatacatgtgctatccagtactcagtggaagacttcacatctctggaagggttcctctgggctagctctcacctctctgtactctgccctaggaacactagtctctttggtgtcctcagatttccagctgtatcttttcaacttatggagactgctggactctgcctgtgttcccctcactgcaactcccttgagggagtaagcaggtcaatcacaggtctctccgggcatttgatttgcatcccctttcagggatcactggcctggactgctctttgtttaatgtttggaaaatgcttcagatatatgttgctctatttttaagttgtttcaggtgggaaggtatacgtagtccctattactccatgttggctgggagtcagatttgataagttttgtcataatactggtgtaatggctgaatgattctctaggaagcgaccatgatgtaacttcacagactctccaaaagtctgaagttacatcatggtcgcttcctagagtatcattctacttcatggagccactctggttactagttgtcaaactagtaggaatgttgttatggcaatacagggaaggtgatctccacaaaaccatgctcattttcttggccttcaggtgatatactgtatgcagaatgtaaaaaataggtcagttagtgacatctgtacttaggccaaggacccaggatggcagccatatgtttgctactaccattgtaggtttctactaagaaacaatcacaatatttgccaagacttagcactgatcaccctgcatttcctaaacatttgggtggtagacactgtggcttgaggaaggcattcattaccctgagctcatgctcatggttttcagtttagatacccttggaatttcccacagcttgtcttaggttgtgaagcagacttctaagaatctggatatcaacaaattacagtcatatgtcacttagcgacaaggatacattctgagaaatgtgatgttacatgattttgttgtcatacatcataaagtgtacttacacgaacctagatgggacaacctactatacacctaggctatatggtagagcctattgctcctaggctacaaacctgtacagcccatgactgtactgaaaactgtaggcaactggaacagaatggtatttgtgtatctaaacatatctaaagccaggtgtgggggctcatgcctgtaatcctagcactttgtgaggctgaggtgggtgaatcacttgagctcaggagtttgagacctgcctgggcaacatagtgaaatcctgtctctacaaaaaaaatataaaaatcagctgggcatggtggcacgggtctgtagtcccagctactcgggaggctgaggtgtgagattggctcgagcccaggaagcggaggttgcagtgagctgagatggtgccactgcactccagcctgggtggcagagccagaccctgtctctaaataaataaataaataaataataaacatatctacacataggaaaggtatggtaagaatatggtctaaaataatttaaaaaatggtacactatctagggtacttaccatgaatggagcttggaagactggaagtcactccggtgagtcagtgagtgagtgtgaaggcctaggacattactatacactactgtaaattttataaacactgtacactaagagtctactaaatttataaaaaagtttttttatttcttcaataatgaattaaccttagcttactgtaatttaactttatatactttttattttttaaaaaattttgactcttttgtaatagcattcctcttttttttctttgtctaaaggcttcttgatttttttaatcgtttcagaaaacttttcatttcattcctcttttctatagtttttttggtttctattctgatctttattatttctttttttccactaattttgggtttggtttgctgttgcttttctagttctttacgatgtattattaggttgtttatatgaagtttttctacttgttgatgtaggtgtttattgctgtaaacttccctcttagtactgcttttgctgtatcccataggttttggtgtgctgtgttttcatcttcatttgtttcaagaatttaaaaaaattccttcttaataacacttggcttaaaacacaaatacattgtacagttgtacaaaaatattttctttctttatagcgtaattttgtaagcttttttctatttttattttttaacttttcaaacatttttgttaaaaactgagacaaacacgcattagcctaggccttcattgggtctggatcatcaatatcactgtcttccccctccatatcttgtcccactggaaggtcttcatgggtaataacactcatgataagaatgccttcttctgaaatacctcctgaaggaaccacctcaggctgttgcgcagttaatgtttgtttaaatagatagaaggcatgtactctaaaacaatgataaaaagtatagtatagtaaatacataaaccagtaatatagttgtatatgaaagtattatgtactgtactgtacataattgtatgtgcttttttttttttttttttttttggagatagagtctctctgcactctgggcatggtggtgcatacctgtagtcctagctactcagtgcaacctccgcctcccgggtttaagcgattcttctgtctcagcctcccgagttgctgggattacaggcgtgcaccaccacacacagctaattttatatttttagtagagatggggtttcaccatgttgggcaggctggtctcgaactcctgacctcaggtgatccacccaccttggcctcccaaagtgctgggattataggcttgagccaccgcgcccagcctgtgctgtatttttatatgactggaagtgcagtaggtttgtttataccagcatcaccacaaacattatgagtaatgcgttatgctatgatgctgtgacgtctctaggcaataagagattttcagctccattataattttatgggaccatcatggtatatgcaatttgtcactgacaaaaaagtcattatgtggtacatgactgtactttctttggtcaaatggtcagacagaaagattgagtcaaatgcttgcagggtctttcaggttttttcttttctttttttttttttgagacagagtctcgctctgttacccaggctggagtacagtgctgcaatcattgctcactgcaaccttgaacttctgggctcaagtgagcctcctgcctcagcctcctgagtagctaggactacaggtatgcaccaccatgcccagctaattttttatgttttagttgagacaaggtcttgctatgttccttactctggtcttaaactcctggcctcaagcaatcctcccaccttggtttcggcctcctatagggctgggattacaggcatgagccacagtgcctggcctctcaggtattttctgaggttccaacaagatgactgggttagcagtctatggccacttatcccttaatccttcaatgcctctcctttgcagtttagggtattcatctctgtatgtaacatcaccttgaatgttttaccattccttcctatcatagatttgttctggttggcaaaggagaccaaggtatgcctgtgagaattgaaataaatttcatcactgagcaagttagttactttaaccttctagaatcaccaaataccttaaattcccattaaaaagataacagcggcaaatctgttgtgatctgggttcttatgatccctggggttttagtttctcctccatactggctgtgtaaggaaggcttttcatctcaggaaacactgacagtgagtggacctgaggcaagagcaggaggaaagctgcaaggggtataggtgtgtgtatgtgagtatgtgtgtgtttctcagctgtagaattctgagaggcagtcaaaactgccaaccttcctttgtaggactaactttaggccaagagagattggctgagtgaatcctttgatgacagctgctgcaacaccttgatggaggtttctcttgtccctggccaccagacttcacagggattgcgccagtctgtctgaccataatgctactactgtaccaagagtgcctaaatattcatttcttaaatgtttttcagctttaccatgtgcaaggccctatactaaccctgagaccagctaattaaagagttactcttcctgactcttacctccttataactgatgctattgactgttatttttatatggcaccatcacgcccttccccccagacaattataaagctagagaataaaagcacaaaacagaaaacggctgggaaaatgggttgtggattacatcagtcacagaacgtcttagcaaacaggtggagagaaatctcccaagtaatctttgaaaacctgcagaacagtagggcccagagagggggccatgtctgatccaccacctttactggtaatgagtttccctggaacacatccatgctcatttgtttacaaattgttgttggggaaaaggcttatggagtgcctgcataaactggccataaaaatatgggacaataagttgtggaaagccacaagaggtctctgaggaggaaagccttcttatcgccgttatgttcccatgctctgagtgcaacctgctctcttatctataaacactgtgctcaaggagaaagacactcctctgaaacactgaaatgtggacagacgtacaggctcctagttaagcccgctcctactagctactctccaataagttaaagatatgctgtttaagcacaaaggagattcatttaaaccgctactgctatagattacgcctatgacatgctgcctccctttcactgtttcgccctaaacatctgcttcttagatctaagtgattgtactcaataaatcgtgtggagaccagaactctgggccttttgcagcctccattgtgcaactggccccctggctcccatctttatgaactcttaacctgtctcttctcttcctttgttgccacagggctttgggtaccctatgggtggtgttgaggctggtccccaacatattgtctatggctgctttcatgctacaatgacagagctgaataggtatgacagagaaggtgtagcctatgacgcctcaaatatttactatctggccctttatagaaaaaggtttctaattcctggtctaaagataaaggtaagatacaaaaaagttctgaacaggcatggtgactcatgctgtaatcccagcactttgggaggccaatgcaggaggactgcttgagcccaggagttcaaggctgcagtgagtcatgactgaaccactgcactccagcctgggcgatggagcaagaccccatctctatttaaaaaaaaaaaaaagttttttgattctgatagaagaattccaaattatgatttggcaataatactatagcatatagtccatatatcataagtgtaatttctcaaagacttgcctactgaggcatacaagcaaatatataagccaattttcagaagtaaaaatttagtcaccactaactttgaaatattgtttcattctagaaattggctggtggaaaaaaatcaaacatgaagattgcagttttgttttgtttttttctgcttatcatttttcaaactgactttggaaaaaatgaagaaattcctaggaagcaaaggaggaagatctaccacagaaggttgaggaaaagttcaacctcacacaagcacagatcaaacagacagcttggaattcagcaaacaacagtttttacaccagtagcaagacttcctattgttaactttgattatagcatggaggaaaagtttgaatccttttcaagttttcctggagtagaatcaagttataatgtgttaccaggtaagagaacactatgagagagagacagaaagagggaggagggtgagagatggtatggggaaagagaaggagagagggagagagggagaacatctccatgaagataattttctaaagaaaaatccaggttattatattactttttggtttaatctacaaacatacattttaaaataatttaaaaaatagggccaggcgcggtggctcacacctgtaatcccagcactttgggaggcagaggtgggcagatcacgaggtcaggagtttaagaccagcctggccaacatgttgaaaccccgtctctactaaaaatacaaaaaattagccgggtgtggtggcatgtacctgtaatcccagctactcgggaggctgaggcaggagaatcacttgaacctgggaggtggaggttgcagtgagcagagatcacaccactgcactccagcctgggcgacagagcaagactccgtctcgagattaaaaacaaaacaaaacaaaacaaaacaaaacaacccccaaaaaaccaaaaacaacttaaggaacacatttataattattagacaaaaattacttatcctaccactatatttacaaaatcatagttatcattttggtttctttccagtatgtttactatgcatatattttaaatagttgtaatcctaacatagataatatacataaacatttataaactacctttccatttataacaatagatcatctagaatacagaaataaattattcagatgattctgtgaacatatggctattacatattttcaaccaaaaattttcaaccacaaatagaattaaagccactgaattgattttatataggttaaaccactgactttttaaagatttaaaagactaaaaattctgctaaagatttcaattaggcatttttaaaaacgtattaaatggtttacatttttccaaatttggaaggaaaaagtatattatagacatgttaccactaaataaaactttcaaaagaataacagaaaatatcaccatataatgttctgtggccagtatttcatatattgtctcaatacagctaaatgcttcttcgttaattatttccatgtatttaacagaaataatatacaattatcctgaaaataggcaatttaggccacacttacaacatgattgggaaaagaaaggaagagaaatcaacttaaaaacattgtaataataatgtactcataactgctaaagaaagatgaggtcaatttttttagttaagtggaaagatggctaagctataataatggaaaacaaaaaggctgaaaaagaagtattcataatgtgatctcaaacttgtttaaaaaaaagtttttatatgtactaaagggtggtatgcataaaagtacagaagatatatactaagtatttccaagttgtccgaaaatattttccagtgatcttacagtactttttgattgtatcaccacacataacacaaaatttaccatttcatccattttaaagtgtacaattcaatagcatttagtacattcacagtattgtgcaaccatcaccactatcttgtttctgcacattttcgtcccaccaaaaggaaactctgtacctaaactccccatttctccccactcccagcccttggcaaccactaatctgttctgtctctatgaatttgcctattctggaaatttcatgtaaatggaatcacataatatgtggccttgtgtatttgacttctttacttagtataatgtttttaaagttcatctattattagcctgtatcagaacttcattcctttttatggctgaataatattccattgtatggctataccatatttgtttatccatattgtctaccagttgatgaacatctgggctgtttccaccttttggctatcatgaataacacagctatgaacattaatataagttttctttcaacacctattttcaattcttttgggtatatacttaggaggggaactgttgggccatttggtaattctatatttaatttattgatgaactgccaaatgttttccaaagtggctatgctgttatatgcccaccagcaatggaagaggactccagtttctctacattcctgccaacaattgttatttatttttaattatagctgttcttgtatgaagtggtatctcattgtgcttttgatttgcatttccctaacaactaatgatgttaagcatctttttatgtgcatgttgtctatctgcatatcttccttggagaaatatctattcaacccctatgcctatttctttctttttttaagagatggggtcttgctctgctgtccaggctggaatacggtggtacaatcatagctcactgcagtcttgaactcctgggcttcagtgatcctctgcctcagcctcccaagtagctgggactacaagaatgcaccaccacacctggctaactttttaactttttctgtagagacagcatcccattatgttgtccaagccgttctcaaattcctggcctcaagaaatcttccctccttggcctcccaaagtgctggaattacaagcgagagccactgtattgggcaagttttgcccatttttttattgcattgcctttctgtagttgagttgtaagagttctttatgaatattctggatatcaggaccttatcagatatatgatttcacatattctctcccattgtgtacaccatcctttcactttcttaacaatgtcctttgatgcaacaaatttttaattttgataaagtctaatttatcttttactttaggtgtcacatctaagaatccactgccaaatatgaggtcataaagattttcccctatggatttttctaagagtgttgtagtcttagctcttatatttacagcaaaggtctaaatataagatatattaggtctttgatccattttgagctaatgtttgtatttggtgaaaggtagggattcagcttcattctcttgctggtgttgtcccagcactagttgttgaagattgttctttcctccactgaatggtcttgacacccttcttgaaaatcaattgttcataaatgtatgtctgactttcagtgttccattggcctatacgtctatgcttatactagtatcacactgacaaaagctgattatcatatctttatagtgagctttttgaaatctgaaagtgtgagatctccaactttgttcttttttctcaagattgctttggttatgtgggatcaacttttccatttgaatttaaggatcagcttttccatttctgcaaaaaaaggccatggaaattttgatagagtgtagtgcttttgataacctggaagaaactcatatgtgtatttttgttcagaggaggaattgggtaggtgggattagcctattgcaagtattcgaatgagagatgggtagggcctgaattgggctgagttagtggtcggggaaaggaggggactaatgtgagaggctcatttgggggtggaacttggggacagtggctcagatggaggaaagttatctggaatgacaccagggttggaagaaaaacatcccctctaatattctcctcagctttctaatggcctgcttagctgatacacttatccacatatctacaatcttgtatgtagggaaatgaatatatgcactgcatcatgaactttatttgtttatttatttatttagggacagtcttgctctgtcatccagactggagtacagtggaacgatcttggctcactgcaacctccacctcctgggttcaagcgattcttatgcctcagctttctgagtagctgggacttcaggcatgtgccaccatactcggctaatttttgtatttttagaggagatggggtttcaccatgttgcccaggctggtctcaaactcttggtctcaagtgacctcagactcccaaagtgctgggattacaggcatgagccaccgtgcccagacagtattatacacttcaaaagggtgaatattatagtatgtgaatcatatttcaatagcataataaaccataaaagacatagctcagtgtctcattgagaagcaccacggaagcatgctgtctggtttcacctattcccatgtgcatatcaagggtgggctgtgagctcatcattagtgctagctcagctctctggtcacatgagggaactggattggctggcggcttgggaagtctggtgtggccatacgatttgctttggtcagtataattagacactttaagagctcatgtgtgatttgtaacctcacatttccactaccgcagtgatcaggacagcctgcttatagatgaatcctgagtgaatatgatgagctgagcccctgtgtccccacattagacacaaagtataaatgaaaaataactgagatttggggattgtttgttgatgttgtataatttaatctatcctgatggatacaaaatggaagcgcagttcagccccaagttaccatgaggagttcactcttagagcctacgtgaaagggctgagaggagagcctgtgaaaagcatttcagcatttcttatgtctatacgacatctttaccctatacatgaatgcacatagaattctattcttgtgtggttagagcagtttgacttcacattgtgtttacttccattcacagttactgataatcacataagaaatttaaatttgtgcttttgttttcttctaggaaagaagggacactgtttggtaaagggcataaccatgtacaacaaagctgtgtggtcgcctgagccctgcactacctgcctctgctcagatggaagagttctttgtgatgaaaccatgtgccatccccagaggtgcccccaaacagttatacctgaaggggaatgctgcccggtctgctccgctactggtacagagatttagctaagcaaaatatcagtgtgtgattaatctttaacttccatttgtttttgttactaattttagattaaaattatgatacattagtcagatctgagtacttaaaatattggcaaaatgctgattaacatagaaaatatctgggaaaatgtatggtaggggatataaataatagactgtggctttatagttctagctctatcagattcagtaaacttggatgagattacattccacatttgactctcagctttagagatatggtaacagaatttctacaacagatcctgaattcttattgcattaagggctctgctttggtctatatgtgcattatcccacttaatccagtgcaacgtgcctttatcatcttgaagccagggtaaacaaaggaagagtgatttgcatctaaagagaacaaagccccaaccctctggctatacccaaccactcaaaggcagcacaggaacccacatcactgcttggataatcccaggaaaatgcagaaaaagtgtagcctgaagcatgattttctcatgtggcacttctgtgtgcaggagatcacagcgcgggttttgttggctgctcatggaccccttctccaatgaggctcatacctgactgaatgaaggacccttgggagggaggcccagtctcctctgagaaaagcctaaccaacaccttatgaaaataagcaaataaatacttgttaaataattggctgggaagggatagggacatcttctcttgtctataaccaaggtagattgctcccatgcacacagatgatcacagggtaggtgtctacaaaagtctccttgccaggaaaaacttttgactatttagaaattgtgttttgcgttatactaccaaatatttcactaatatttaaaaagagttaggaaaaaagtgttcaatgaaatggattccttggagtgaaataaatacaaggtttacaaagtaagagtcacaaattctcagaaattttttcagaagacttggagtattcttgaaatgtagttattttggaaaaataaacttggatatacaggaaggattttaaatgtttcaatatgatagctttagtttccttttactaactttttcctattcttctgcatgttttgctagagatgtgaaaaaataattcacagactttataatacatactgaattgatatctcaagtaatttctccaaataattatatttcctgagttctttttgggagtagtttatatatagtgttaaataaaagtaggcagatgattaagtaaatttttaaatcttgatggaagaaaacgtatgcactctggctgggcacggtagctcacacctgtaatcccagcactttgggaggctgaggcgggaggatcacaaggtcaggtgttcgagaccagcctggtcaacatggtgaaaccccatctctactaaaaatacaaaaattagcctggcatggtggtggggtgcctgtaatcccagctacttgggaggctgaggcaggagaatcgcttgaacccgggaggcggagggtgcagtgagccgagatcatgccactgcattccagcctgggcgacagagcaagactccgtctcgggggggggaaaaaaaagtatgcactgtgaaatcagttcttcctagaactgtttacccagagagtgaatttgaatctagtctttgtcatgtcttccccactttctgccaaagacttaacagctaaatataaatgtagattaactgtctactatcatctattctactcccaccatcatggaaggataaacagcactcctgggcatatgtctaagttaaagcaacatcacttaagtccagaatgtcatttgtaagtctcaggtagtaaagatgatttaagtatagagtctgggacagagaaggaggaaaactctctctctataattctgaatttcagaggatgatgttatgatgccatggacaaaaataatgacaaatctataagcaaaagttggtttcactgctataagcaagtaaaatatacacctgtttcacttttctaatgtctggtaaacagtctgcaaattctcacattagcaatagccccagtgaacagaacagtatctattataaaggtatcacaactgattataacacaatctcacaacaggattgcttaccattttgcctcatgtggcaatattattccctccttagtcaccaggtatcatgatatgttagcaaaaataagcattaagttatttaatataaaaattagtattaaggcccacaggtgaataaaatgtaacagatattacaaaatagaaataaagtgactattaaaactttttaagcaagaatttcaaggtgcatttcatctttaaattgcactcaaatacttggagggaataatatttactaacctcattttcattatggttttttcttttattaatatcatcaacttatctctgctacctcatccttgcgtggtcattagtctcctattctctactcagtggtatagcattaaatgatagaaatgaattttctggtgattcttcagaacaaagagaacctaccaatttacttcataagcaactgccacctcctcaggtgggaatggaccgaatagtaagaaaagaagcacttcaatctgaggaggatgaagaagtgaaagaagaagatacagagcaaaagagagagacccctgaatctagaaatcaggggcaactttacagtgagggggacagcagaggaggagacagaaagcagaggcctggagaggagaggaggctggcacaccagcaacaacgccaaggaagggaggaggaggaggatgaggaggaggagggtgaggagggtgaggaggatgaggaggacgaggaggacccggtaagaggagatatgttccgaatgccctctcgatccccgcttcctgctcctcccagaggcacactgcgcctgccaagcgggtgctctctgtcctacaggaccatcagctgcatcaacgccatgcttacccagataccaccgctgacagcaccacagataacaagtctggagctcactggtaagagatgttgacttctgctttattttgtgctttaaaagtaaatgactcttagcagctgggcacggtggctcacgcctataatctcagcactttgaaaggctgaggtggccagatcacctgaggtcaggggtttgagaccagcctggacaatatggtgaaaccccatctctaccaaaaatacaaaaattagccgggcgtggtggggcatgcctgtaatcccagctactcagaaggccgaggcaggagaatcgtttgaatccaggaggcggaggttgcagtgagctgagattgagccactgttctctagcctgggcacttgagcgagactccatctcaaaaaaaaaaaaaaaaaagtaaatgactctaagccacatgcagttgtatacacttgtagtcccagctactcaggaggctgaggtgggggaatggcttcagcccagtagtttcagactagtctaggcaacagagcgagatcctgtctcttaaaaaaaaaaaaaaaaaaagtgaacgattctcattgctctgtgaagactgtattttaatttcatcctaaaaattgatcctgaatagactaatttcataatcttcaaatatataaactttgcagaagagatagctgtttactgcagaatagcagttaggtataaagcaaactcctccaaatcaaatgatgatttcctactgatgtttcttaaaaatcagctttaatgaggtataatttatatgtagtaaaacttatttttagtatatagttctgagttttgacaaatgcacatagtcatgtaaccaccaccaaaattaagatataggacattctatcactccccaaaattccttgtttccccctccaccagtcactggccaccacagaacactgatctgttttctgtctctacagttttgccttttccagagtgtcacataagtggaatcatacaatacatagccctttcagactggcttctaatgtttttgaaagccacccattttgttttgtgtatcagtagttcattcctctcttctgccaagtagtgttccatcatgtggatggggcagggtttcctatcagttaaacgtcatctgagttgtttccagtttggggtgattatgtataaagttgctataaatatccacgtacagatgtttgtgtggacctaagtgttcatttctctagggcaatgcccaggagtgggactgcggatatggtaaatacatgtttaagtttataagaaaatgccccacagttctctaaagtggctgttcctttcccacctgcatgctggggagctcctgcctctctgcagcctgcccgcacttggtactgtcagttgttttctcccttcctttttgacattctagagggaatgtggtcatctagaccttctgcccatgtttccataggaccaccagggagggctctgagtggaacaacagcaggaccaggtgtgagaggctggctggtggggacactttgggtgctgggagcagcaggagcattcgtctgggtaatgaggcccccatgccacgggtgtccctggagatgctggggtgagggaagctgaaaaggtcaacacatttgtgcagagatggccatctgtgacagcacactgccagtgtcaaacataatagaagcttccatggcctctctgacaaaggatttcatcctactttcatatgatcacctaaggaactcctctcatgctcaggaaagtcccttcctcctgtggcctatacaccaggtatgctctgccctaagaaaaccccatttgtgaaagtctaaagccttggaaaagataaatgacccatgctgagctacactgttatggttttataagaaggtcaccacgtggcttttatggtatgtactactggtatgctcactttccgggtttaaaaattgactactgaacttaactaaatgttaaaacaaaaacctataaaattaaagcatacaggaacctttgtagattgaagccgtagaggcataacattagatctgagagagtctgggagatgatctccccaagcttcttatgcagagatggagacaggctcagaggaggtgagtgattggcatgagcattcatggacaaaaacagaggcatgtttctagtccaggaaaatggctatgggaaaatatgaagaataaaaatcagtttctgtgtaaccttccacacctttgttgtaaatgtacaatgttaccagtactctccagcagaccacattctggctgtgttaagcaccttcatctaaaccatgatatatttacagcttgatgaatccttagagagaaaatgtcaactatgttaaaccatctatttccagcttgttacttttctgaacatgctttggttatataatatatattctgtccttgttctgagtattgctttctcctccagacaaagctctctcttgatatctatgcacacatgcccatacatgtgtgtacatgtatgtatatgcacacatgcctaaaacataaccgctgtgtgtcctaggcaattccatcgcctccatcccagatgaagcatttaatggattaccaaatttggaaaggcttgatctgagtaaaaataatatcacttcttcaggcataggtccaaaagcattcaaggtaaatacatgctctgatttgtctatttggatgaatggcttcactatgacttgcattggttggagatggggaagggaggaaaaggaaaatgcttctaattggtagtcttcttctaagaaagtttcctctctgatgtccctaatttgaattcaagttttcccttgaatatagtttactattttacatacttttagctttgctgtaaggacaccaacaatagcatcagtgacaaaagtaatgattttaatttatggagtagtttcttcccaagtaactgaaaacatgctaaaatctggtcttttagcatctgaagtattttctggaaacaaattgagcctatctggaacctctgttaacatttttcaggccagcaagacactgcttcctttttttgtgtgtgcaatcaacaaaacctgatggaggatactttggcagaagggggttctggaaaaacaaataggctcatataaaaattagggatagcttggggaagaagagggaaagagagagaacaggaaacagcacagagtaaacctttgaaagatacagattggactaattatatatttaaaaaaaaaaaaaaacaggccaggcacagtggctcatgcctgtaatcccggcactttgggaggccaagatgggcggatcatgaggtcaggagtttgagaccagcctggccaacatggtgaaaccccgtctctactaaaaatacaaaaaattagccgagcgtggtggcatgcacctgtagtcccagctactcgggaggctgaggcaggagaatcgcttgaattcgggaggcggaggttgcagtgagccgagatcgcgccattgcactccagcctgggcgacagaggaagaccctgtctcaaacaacaaaaaggagaaaagaagagagaattcaaggaatttcagagccaagagaaaaggggtttatgtttgtaaacaaaaactcataaatgtgtatgtttgaaaagccaaaaataaagcacactatattccactaagtgaaactgttactcccttgggcagtcttctgggtcttccacccactcttcagacaaatcactggtctcttctattctcatttcctgtttcttatctggagtctggcagataaaagggttctacattcacaccctagatctacttcatgctatccatccttcttctagaaaatggctagcattagggggtccttttcctatttgtccaagagaaaaatttgtaagagattacctccttttcttgctttggaattctctgtcccattccgaaactgttgaaatttgaatatgatcactggagaagtgaatcattccatgggactttactaaaacctacccaaccacaggtccccacttgtgggggtacaggctaggtttgaccaatgaacacacaactacaaatgtgaaaaagacacttttccagacagtcaactggatgccatattggaatggcttgtgatatctgtagtccttggttttgaaaaatttccacagtaattagtgttattttatgacctttctggagtagataaaaaactgaggtttacaagtatgtttaaaggattgattgctatcttaattgttagcatccatgacagcttcagattactgcatgatttcataaaatttctgtctattgctgtaaaggtggaaacctaagatctagcaagaatgaccaatccagtagttatggcagctttctctcactttctaaagctgcaatataaacgtggtgagtaagctacaaaataatcaaatgtagtctgctgaaaatccctgagaatcaatgctattaccaggatcaatatcaacctggcagggggaataaggggtttgctgtgtggcctggacattactgtctaagcctaaggaaggataggtttgtgagacttttagtcacgaccattatatgaaatgtgactgcacagctgtgactagataaaaaagtaactttgagatttgctttttaagcttctgaagaagttaatgcgtttgaatatggatggaaataatttgatacagattccttcacaattgccatctacattagaagaacttaaagtcaatgagaacaatcttcaggctatcgatgaagaaagtttatcaggtatttaatatttgtttttcaatgatatgcttccttataatctttcctatatagtcctgtagaaattttatttactgtattgccaaatgaataaatagtaaatatttttaggtcacttaaccatttgagttgataaaacttcttttaactattgactggtaaaacgtaaaatgaattttaaactgcctattgtctttgtaccttacccatgaataacattgtttctcaatgattccaggttcttattattcacaaggcaataaatttactacaaatccaaaatatctgaagaattacgctaaatattccctgcactgccatgtgttttgtgttatggatcgacaattttgtcggttctttgtagcgactaaccagtgccatgtttgttgattggatctcctttatcactctgatggtcaacagaccccacccacaactcttgctgcctccatacaccttgctattttcatttatcatgtgttggaacctaaaaacaaaactaagcacatgggaattatgcatggaatatgaataaatgggcactgcatatgcggctgagatgctgtcctacaaagaaagcacatgctcttcatggtattaactttgactttggcaattttctgcctgagagggcttgggctggaacttctgtactcatatgtcactgaagtcctgctaactccacaccccacggcatgtggatgcaaggctcccaccatggcctagctttctgacagcctttagtgagcgtgccccatgttctgtgcactcgacattgctggaaatggcccctcttctgcttgtttcgggactgtgctagacagctgaagttgtcatattgtgactctgtatagaagaggctttatcacattttacttttcatgaattctagctaatgcctttgattgtactgtgtacttttttgagacaaggactgcctaccttttctttttatcttcctaatagtctagcatagctcttgaggtacagtgctcaacactgtctgtttccttgctttgaaacatattatgtttttatttattatgttatttattaaacaaagcctttaaaggaataaaacaattcaattatttcctgtagctcccaaaaaacttcacaggaacaaaacacttctggtattgagaaaagaacaataataatgagaattgccaaatctgaggattagttatggaaatactcaatttccagatggatttcaggacacacagaaaaacattaataaacacaaattttgatgcagactgccaaatgggaaagacattagaaaattcagtttctaactgctgaagaccaaagggtgtcagcaatttagaacaactgtactaacaggctgtatatgaactataagtcagtcacacttttagttgggttatcaaaatgagatgttataaaacatgcactcctgattgtgaacgtgctttcacacacccctggaactgccttccagagtactcttctcctccctcactcacaaatgcttctagattcccagagtgttgacaggaagccagggtgaacgggctgtctgcctgcctttcttagcccacctttctccacagtccgagcacccgaggagcctcggccccatgccggcagtgcttctgtcctccggctcagatacccccggctgcactccctgggtgggctgagttctaagagctactgcagtactggcccctcgggtgctgggctccccctggctgggagtcctgatgctgtggatggtcaggctggctgccaggagtgctgtgagggcaccctgcttctgtgtggaagcaggtggcccactgctctcccgtcatctctcttggggtggctcctcactcatgacctttcagattatagctccagagagggggaaggagggcactccagggagagaaaacagcacaaagatgcaaataaatgagacaatttgggatactgtgggagctgcaagcaggcacggtgaaggtgaaaggcaagcaaagagcagcacaaggggctgcacacaccttgctgaagggcagggaatttacctgcaggaggagcagagtccacctgagatgtgcacacgtgttatggagaaagggaaggacttacaattgagagagaggtgtgaaaggtggagggagggacagctgaggaaaaccaggcacgctttaaaagcatttttgttgtcactaatgactgaaacaactaaatcaggagccctggaggctgctctagtggatgaccatgtgatgctgcctgccaggaacatcgaggcacctgccatgtccacagcctgtcatggtaccacccaccatggaagacttcctgtttcctgtccatgaatcctttcaacatccacctcaagtctcacctacaagaaacgttctctagctccatcctatttcctgttacctcctatttcctatatataccagagaataattgcaaaagaaaacacagtgtcctgaatttgcactgtttctctctttttctctcagtcatgtaatggccactagttcatttctgttatctatttttcaatgaaaaacttccactgcatttcaaaacttcacctatgtactagagaaagatgtcagattctcagtacctttagttttggaaatgaaagagaatatgaggaaatataaccacttatcccaatttactggctggcctggctacttcctgttgctcagcacttccattaatcctgagcaccaccaccaggttaacctttgtaaaatgtggcccttgtcctgccatccccatcttgctgcctagagaatgagagccagacgttgttgtccagggtgcaaaggccctcccagaattagctgagtgtggtggtgggggcctgcaatgccagatactcgggaggctgaggcaggagaattgcttgaacccgggaggcggaggttgcagtgagccaagaccacgctattgcactccagcctgggtgacagagcaagactctgtctctaaataaaataaaataaaatttaaaaaatgtaaaaaaaggccctcccagtgtacttctctctgagcaccaaccttcactccactgtgcacagccactccagggctagtctcctctctccctgagcaaacccacatggtctttcacctacatgtgctcagctggctatttcagcttggaagttcctcctacttctatctaaatctttctgtctgtaggagcctggcactttcataccactcacatctacactgctttttcttcttttaatcttccagcatttattatttctattcctgatgcaaccgtctttgctgttgcctaagagcagaacggagtcccacatggcattcggtgcaatgcccatgaagggggttgaatagaaaacatcccctaatctgggaattttggccacaccctgagcctctgactcagatgcctttgggtattatcattgctgagctgtccattttgcagcacagaacttccatttgacctggatcataccactcctgagactagtagaaacaaagtagaaaaaatttgtttgtataaaggcctttcttgctagttcaatctgaatgcatggagaatttttgatcatcattctttcaaagcttccatttggctgcactctgtgccaacaagtgagtaactatgatgggaattcactgttctggtttacttctgactcccttgttcagagactgagggtgagccagggaaagtgttcttttctgtgtcctagaaaaagaaatcattcattgcattaaacttctacccaccccattgcctattatgctgccacttcatacatctatgtctttgcaatgtttccaatgactgtccacaactttctattcctttcctacctgaattccaaatccctgttcagccaccacaatttctatggaaactcctctgcctctctttcctatctccctccctctcttctctcttgcttctgttccttacacatattgttagcacctagcatttcaatgatttttttcaggtctgcctcactactggaccatgcatttagttctggttgaattgagcatctgggatgtacaaagtacttaagaaaaggttttataggaggatacaaaggtttaaaaaaaactgtatttgccctccaaataaaccggccatttcacatgacatttcaaaaggctacaaaaatttgcatggtttttcaattatcctaatattctaatacttttattttttatagacttaaatcagttggtcaccttagaattggaaggaaacaatctcagtgaagccaatgtcaatcctttagctttcaaacctttgaagagcctagcctacttgcgtctgggaaaaaataaatttagaattataccgcagggtcttcctggttctattgaggtaacaatatatttttttagtgttttaaatgtattatatttgaaatatggtacactacaacaaaatatattttaagactattgtgatgtaaattaaactctagtttcatgctgtatacagaatttcctgtaatttaagcattgttttttcttcaagcaatacaaaattctgaatcgaaattataattactagtagagacacctgatacagtgaaaaatggtacttctgatagctcttgggggaaatgggagaaatgaattgagaatttaaatgaaaccacaacttccatgaggtactctgactctcaagacagtgtaaactgccccaatctagaaatgtgacgcttatcacagaagctcaaacaggtattaaccgtaacagagtgtccactcacaaattccaggcaaaaccacagacactctgacctaacagtaacttgcatggatacaagtgttgtacaaagaaggcctctgactgtttcagcaactctgtagcttacaagttttcacccagttcctaccaaaactgtcctgtgactaactccaggccccaaaccccagccttgcttcattatcctctagagatgccccacaggtccccagatgtgtggtctccttgctgcaggatgtgctcctgggggtctttggctgatgaatgtcaacacccctcatttcctgcgttaaaaacactgaggtggaccgtgcagtggctcacgccagtaatcccagcactctgggaggctgaggcaggaagatggcttgaggccaggagtttgagagtagcctgggcaacatagtgagaccttgtctctaaaagatatattaaaaaaaaatagccagtcatggtggtgcacacctgtagtcgtagctgctcaggaggctgaggtggaggatcacttgagcccaggagtttgaggctgcagtaagctaggatcgtaccactacactccagcctgggcaacacagagagaccctgtctctacaaaccacaccccaccctgcctgccaaaaagaacactgaggtccagagagtctatacatactggcagaccccgtgggaacccaggtttccttactaagctccgtttctcctagaccacatgatcatccagccagaagtcaggatggagcattctccggctgcagccccagcaagccagaaaagagggtcatctattgtgatcttatgtggctgtcatggctaccacccttcctcttcttcctatttccagattaagtgacagagttatgtaacactgacatttatcagtaggctggctttccatcagaatctcctgggttcttaagaaatacagactcttggacctaccccagatatgctaagtcagattctttgtgggacagggccagaaatgaataattaaaaaattaaaatttaaatagataatgcatacacatgttaaaacacatacatacacaatgaggataatacaaaagagcaatctgccccactgtgagcctgagcttcccatactgacttctctctctccagagggatccactcctaccagtctggaaagcactgggcatacaagcgcacaaatgcgtggcacatactacaaatccttctaaagccactgctgtacacctgcctcacttaaccatgcagcctcaaggctgtctcatgtcattctttcctacagctgcagagttttcaacatatggacaggtgtgccaggatttatttgactagtctcttactgatctagctcacctcctaaatacatatgcaggtaaaagcaaaaagttgaaaattgttttactaatttctaacaaataccaaaattaacaaagagggaaattctcacaggtggaatagaaggtgacactaaagatatatgccagttttacctctgaattctaacaagagaacaaggagaatttttataatgcagatcctttagtgaaaaactccctctaatgccaactaaacttaacttgaaggcagctagctattaaaaacttattaacagttctagaaaacttctccttggttgtaaattaaggctgttaattaactttaattaattataacaaaagcaaatctaaaaacatgagcctaaaatattatagaccacatgaaatagtaggaaacaggcagcctgggagctggaggctcggctaggacaagcccctctcagcattagtcatgtaaccacgggtgggcttccctgtctctccaggcccaacttaactccactggtaagtagagattaaaatatctgtctacttttcagagtttttaagcccaaatgagataatttatgtgaataagttttataaaatagagagccttgtataattattttggtatgccatttcttgcaacatattatagctaatacattttaaataaaattcatttgattccataaccatggcagtgtgttttattttactaattagttataaaatttgacaactttcctgtaattccagcactttgggaggccgaggcgggtagatcacttgagcttaggagttcgagaccagcctgagcaacatggtgagaccctgtctctacaaaaaatacaaaaattagccaggcttcatggcgcatacctgtagtctcagtcacttgtgggactgaggtggtaggatcacttgagcctgggaggtcaaggctgcagtgagccatgtttgtgccactgcactccatcctgcgtaacaaagtgagaccctgtctcaaaaaaaaaaaaaaaaaaaaagacaacttaaaaatatgagcttacttgaaagagcagtaagactctttagataatactaatgataatagtctatgtcactattttagtctccatgaaattgaacgtatcaactaacacaaaagaaaaataatagtcttctctcttaattataggaattatacctagaaaataaccaaattgaagaaataactgaaatttgtttcaatcataccagaaagatcaatgtcattgtactacgttataacaaaattgaagaaaataggattgctcctttagcctggataaatcaagagtaagtacatgctacaatttaaattttattgaactatttcttcctctcgctattattaaacagagtatggaaactgggaatgggataagtgagggaggtgacgatactgaagggctcggagacagaatcgtttcttagtgaacccttaccctatccccaaagtgggctacttcatgcagtttccaacctgtgcgctgcatgactggtgttaggattattgcagtaactactgttgttgtcaccatactgcatactggacaccctatcatatgccaagtgctgagctagcaagaactgagccccagctgtctgacttcgaggtctgcccactagtggtcaaatgccactctagctctgtctacctcacaggttgtcaggaggtttgaatgaaggattattcccctgcacacagtgagaaagaaatctgccatactccttctcctcatcatcattaggtggaagcaccaggctccagagcccaggcctgttctcctacactacacagccttcttttctccaaactatttcttcacctcaactcttacaaaatagactgaagaatgcttggcctaacagtgcaggccaaaagtagactctgtcttcctggacaagaatcagcagcctctggctatagctttcagtgaagggggagggagtcagaagcaagccctgcagcaaatccagcagacaactgggatctgggattgcgtgtcctggaactatgtgcctaagtagcacagcctgggacacgtgtcattcagaagcaggatggagaggccaattgggctcagcagcatgtggcactgagcccactgtaggcagagaagtcttcatcaggtgaaaagagggcgtggggcagaagccttaggagactcaggtggggttcctgaaacaagccagtgagttcaccacgttccccagatcttctagatgattaacagcattttctagattccctcaggctcgcctcaagtcccaggtgtgccaggtcatcaaatcaaatgtggaatgaaaatgtaggggaaggggaaccaaaacaagccaaaacaaaccaaacttccttgctggaaccagagacaactttacagataggcatttagatgcatgctgggattcacgggatttcattttggattcaacgcatcaaccgtacagatattttagtctttgggcctcagtattgcctctagggatatgagtttttccctcctagtctttgatgctcctctcgcatggactcacatagctgggaggcagtatggcaccctggtaaggacatgcagcttggtgcaagagactagggctggctatacctggaaaagttcctatttggaatcatcactacaaactgggtgcttataggaaaatggaccagcatcgagactggccttatcaaaatttagagctgatgatcaccatcctgatgtccctaccctgtttacttttttctttgctgcagaaatctagaatccattgatctctcctacaacaagctctatcacgtcccgtcctatctacccaagtccttgctgcacctagtactccttgggaaccagattgaacggatccctggctatgtgtttggccacatggaaccaggcctggaatacttgtacctgtcatttaacaaacttgctgatgatggcatggaccgtgtctccttctatggggcatatcattctctgagagaattatttctggatcacaatgacttaaaatctataccacctgggatacaagaaatgaaagcactacattttctgaggctgaacaacaacaagatacggtaaattttggctttttcaagtatctgtttaaattttggttggcaaaatatatgataaaacaaccatgacatgatctctgggatttacgttaagggaaaaaaaaatggtgctaaggggttggattaaacaagattggcaaatgttagtaattaccaaaggtggatgacaggtatgtgaggattcattataagcttttcctacttttgcacatgtttataaatttccatagttaaaacatcttttggtcaggtgcagtggctcacgcctgtaattccagcactttgggacgccaaggcgggcggatcacctgagttcaagagtctgaggccagcctggccaacatggtgaaacctcgtttctactaaaaatacaaaacttagcagggcgtggtggtgcgtgtctgtaatgccagctactcaggaggctgaggtgggagaattgtttgaacctgggaggcagaggttgcagtgagccgggatggtgccactgcactccagcctgggtgacagagtgagactccatctcaaaaaaaagattaacagattattatatataacacttagaactttagagagaggttcaaatgagtcttcaaagcaatagattatgttactactcctacctccatgtataaataaataaaactaatctataaagcataaaacgtaaatatatgctaaaattaaaactgcttctatctagttttttctgaagtcagatttctgaatacatttattaagactcactttccctacttttgggaacacatttttctgcatgtgttcagcttatatactgaatcatcactcctgcctagatggcatgagtgtcttgagaattaatccagaatattttgttagtaaggtctttatcattggcagtgagggagacaataaccttgttgttctgtccctgagaattatgcctcttagtctttccccttctctaaaagtccaaataaactaaatgcctacaaagacaaaacaaaaacacagaaaagttcgtgtttttaaaggtactggaggaagagatgggggtttgggaagactttgtaaaattcagtttcaaaattttttggcaaaaatacttcacaggttgtgccatatgcttcatactgcattgcatcagaaggcgtctaatgtttgtcccaccttttttgattctaaaattgatcactggattgaagtggtcacagcctggtatctcctaagacaaatttactcctccatcattgaaccaatggtttcactcacagatgaatgttgtttgaattcttatttcattagaggtaacaaaatgatgaatttctatttttgccatgcttctcatgctcattagctggaattcctctgtaaaaaattttttgctcatcaactagggctgctttgtcactttgaaaggaaagaaaaaagctcagttctttcctttaaaccaccagtgggagtaagaagttggagcctgaatgtttttgctttattttgttttagggttctctctttttctggtgaatcaatatatacttaggctttcatgtaagcagttatgtttcaatcaattgcagtcatctggacaatggtcgccattcaaactggctcttgtgtctgctcacttgcttttgggcacacgtgggcctcaggcttactttctgcattacctactgcagaccttcctccaaagagcttggcctctttctttggggaatagtattgagaagccccaagtgggaacgagacgtggtcctttcaattgtgttgctattgttttgaggcctttcagtggactgccaggaaattccgtattttgaaaagaaagtaagttcagactgacattcccaaatcaaatttaacataattgaatattaattccttttattaaaacttgtttctcttacactgaaaatctaggttcccaacaatattaacttggatgatcttacaatatgtaaacaattgtttcaaaatgacatcattattactgctcataataaaagcttgaagtttattattttttggtagctctatttgtctttaggataagttccactaaagaagtacagctgaaatacagtggtttcctctgtaatatgtcaacaacttaatattcagacatgttatttagtttatttttggtttttagaaattgctcttttctttttgaattaatattatttttgactgtgttaaatatttttaattccaaagtcaaaactgtgtaagaagttgaattaagagaagtcttacttctatgattgtctttttttaatatatatatattttctttttactatacttttagggtacatgtgcacaacgtgcaggtttgttacatatatatacatgtgccatgttggtgtgctgtacccattaactcttcatttaatattaggtatacctcctaatgctatccctcccccaacgtctatgattgtcttttatacactatatgatccttcccataggttaaatttttaaatttctagtttatccttccagtatttatttttgcaaacaaaagcctacatacatatacatatttccccatccccatccataattattatacaaattattacacaaaagggcagttttctctctatatatgtcttagtccaattctgatgctataaagtaatgcccaaggctgggtaatttataaagagaaaaggtttatttggctcatggttcttcaggctgtgcaagtagcacggcactggcatctgcatctggtgagggccttcaggctgcttccactcatggtggaaggggagatggagtgtgtagagattacatggcaagagaggaggcaaaaaagaatggggaggtgccagacttctttttttttttttttttttaaacaaccagctcttatgggaattaatagaacaagaacttactcactcccctgatcctagagaggatatcaatctattcatgagtgacttgccccccatgacccaaacacctcccattaagcaccacctccaacactggggatcaaatttcaacatgagatttggaggggtcaaaaaaaccaaaccttatggggtatgtgtattttttctaccctttttttcttttttctttctttctttttttttttttgagacagagttttgctcttgttgcccaggcagaagtgcaacggcgtgatctcagctcactgcaacctcgacctcccaggttcaagcaattctgttgcctcagcctcccaagtagctgggattacaaggatacgccaccatgcccagctaattttgtattttcagtagagacggggtttctccatgttggtcaggctggtcttgaactcctgacctcaggtgatccacccaccttggcctcccaaagtgctgggatgacaggtgtgagccaccacgcccagcctaccctttactttttaaaagtatcagtatatcactccccatcagtatgtagagaatttcttcattccttttcacaactgaatattatgcagatatactatattttattcaatcagttccgtattgatagacatgtgtttccactcttactactaaaaataatgccacaaaagataagtttgtataaatgtcattttgtttttttccagtttaactttgggataaaatcctaggagtgggaatgcagagtgcaaagggtaaagtgtgtatgtaattttactagatattgccaaattcctctccagaggtggcgcaccattttgcattctcttcagtggtatttgatcggtccaggctcactattagaatatgttaatgagcttctggatttttttttttttttgcaaaccttataaataaaaagtggtatgccagtaaagtttcaatttacatttctcttctgaatgaaactgagcattttccattttcctcctagattcttaggaagcctttgtatctgcgatataagttactttctccttctttgtcatgttgtttaactttgcactttctttttaaaacctgcagtaaattttaaatcttttcattcagtgcttctggttttcaaatcacatacagaaagaatctcccgagtcagagggtgtgaccacagtctgttctagtgcttctatggcttcatctttcacatttgaatctctgacgtagttggaatttattctggtctataaggatccaactttattttaagaacaaaatttttttaacaaatgttaaacttaactcctaaaggcagattattactgggaccatgtgtgacttgcatgtctatttttccttaggaacattcttccagaagaaatttgcaatgctgaagaggatgatgactcaaatctggaacatcttcatcttgaaaacaattatattaaaattagagaaataccatcttacacattttcatgcataagatcatactcaagtatcgttcttaaaccacaaaacatcaagtaattccaagttttcctttgctgtttataaactttactcatgtatttgtagtagctgcatttgtcattaataagagagacataatcctcctgttatactcagtatcattatatgctagtcaacctgattcactaacacacagatgaacaaccaaaatatacctaaaaggtatagtctctaggagttttattaatagtaaaggtaaaatctctcagtttcctacctctagaaagaggccatctcactagaataggatattatgcatactgagctagaccagaagagtctggaacaaaataaacacagcctttataatcaacttgaatactggtgttagctgagaactctgtaagtccctttaaaaattatgtatcttttggttcaagattaagaagcataatgacaacaaaaaaagcaggcagaatttatgaataagtgttgtttattattaaaacaataatttgttaatttcttataaggtcctgtgctataattactggtataaatataactgaatattggggtagctttcatttcttccattaattacatgtgtaaaattaaaacactactgtaatgttaatttcctggttttgaaaatcatattatggttatgtacattgttaacattaaggaaagctggcagaagggtgtgcataaattctatactctttttgaaacttttctataattctaaaattattttttaaagttaaacagtatattaagattaccttcactattcctcactcaagattaagacattttttgaaaagcagtagagtttgcttaaaatacaaattaattattcttgactataaccttgtaaaggtaaatctaatgtataaatttttgaaaaattttgcaccactggtcatagcatctatctcctttgccttaatttactgaaatacatcattttattcggttcaattgaaataaagctatgtctttactatgtattggccctaccaaaatcatatattaaaattttctaacataatgatttttatctttgtattgctaaagtaatttataagacacatatagaaactatgttgacttcttttgttactctcagttttatgtcttggctaggaacttaagtgccagtgttggcctcattgcataggtttctctaattttttaagctttagttatttaatcatttaatagttctttcaccactctaggaaccttccatccccacttcacaaagctattataagaactagaaaagaatgtaaagcattttggaaagtatggtgtggatgatgaatgcagttattatctcatataaaactgagaggaaccagcatagccaaccacaattgacaatttcatgggtgactttcagtttcatgagtgtgaaaagtttgacttattccataatgttattattattatttttttagacggagtgtcactctgtcgccaggctggagtgcagtggtgcaatctcggctcactgcaacctctgcctcctgggttcaagcgattctcctgcttcagcctcctgagtagctgggactataggcatgcgtcaccactccccgctaatgtttgtatttttaatagagatggggttttaccatgttggccaggatggtctcaatctcttgaccttgtgataagaccgcctcggcctcccaaagtgctgggattatagacatgaatcactgcaccaggcaagacttattccataatgttacttctaagcctactttcttaataggtaggattcagagattataacatgaacaacaataataatatgaagataactgttagactcaagagtcaaagacttatagcaggttgttaggaagaaaactagaattttatggaacaaaagttgagcttcataatcagtttaggaatgaaggtgcattactaattttaaagtggccaggttgactttaagagacaggtaaaaacaagaagatagggttacacatccatttaacaacccttgtgcaacacttattgatgtatgaatataaacacattgacataaatggtttaaggcaatctaagctgtaaacaaaattagtattaaagggggctcaaactgaataaggtgagtcagcagaactagcatcttgggatgacacagagacagatactaaacgattcattcattcatttcttactctgactttattcagctgtgtttcagatgctgttctagagacagtgacaaacagatcagatgtggcctttcctctctggtag

SEQ ID NO: 60 - DNA, 260637 bp, Homo sapiens
cgtggctcctcggggtcacccaggaagacaagcaactttctcccatacttctcggtctgtctgccttccccactcagctttgaatgagacgcagggagagggggcgcgagggggctcggggctaggggaggagccgcgaaagctgcccccgggggtgggcctggacccgcgcggacagcggggcacccccccactcccttcccggcgctccaggaacgtccccggtgcgtcctgggtctgtctgcgcggagttccccggggcgcgaggggaggggactggagaaagaggagggccgggcagcggaggggaggaggcggtgcgtgcctcgcctgccaaagggagatccgctcctctgcgtgcgatccccggcgcccgcgcgcgcccacagcgctccgccagagctgccgccgcggactcgccgggagtgggggtctccgctggtgccagcccgcttctggagaccctccgcctcctgccaacccctgctcttccaggtcgggccccggggttctgcggctgttagggacagaggcaaagaagggcaggacggtccggtttcccgtggatgttcccgcccgagaaagacagcaagttgtgtgtgcgcccgggacgcgggagggaaggtggccgccgcccgccagccatgtaagtaaatcactcggctgccccgtgggcgtgggctccgctgctttctcccgggctccctctctgccccggagccggagttgggctgctcccgggctccggacttcctgagctcggcggatccgtcggctctgcctgccagccgcgtccgctcttggcgtctgcctccggggggtgctgccttcccatccttatcccctcccttcgtccagagccggctggaaaatgcctcttgcccccttttagaatggagggatcattgtgtgtctccatgggtggagtggctcggtgaggcaatggcagggggctaaatatgggcttgtcttggcgagggcgcctcaccgcagttggagatgggggccccctgcccgcaggccaccccctgctggtcttccccagcctcgtggcccagatagatcaacttcagccctgactgcagttgacaagattagaaaaaaaagtagtagccgacctcccgtttgagtgacatccagaactgaaaatgggcggtggttagagaaaaaaacgggtaggggcgaggtgaagaaagggggaaatttgctatggaccctgaaagctggagttaggggtcctgggggtggaattctagggtggatgggctctgtgcttctgtattcatttctttatggaaagtgtgagaaatggttaaggaactctttttgaaaggctggggtggaagtagatgcccctggaaccatttggatgactggggtttgatgtagcatactgggaagtatggattgctgttcaaattagacaatcattcagtgggagaaatgattgcaatagaactgttggaatcaatgaatcaaaactgcagactcaaaataagtcatacacaggcattcttttacactagaagatgttaagactaaagaaattctgaaatgctgctgaatgagtacaaagagtgtctggtaatagttctgtactgtgggtgcctccgcagaccataatgcttgttaaatttatggtactctgcaattgtgaaaaattatcctaattagtttgtttggctcatgcagagagttaatgcacccttaaagggacatagaaaagttgcaacaaactatgagcatgaacttgcaagccaaaaaatggaaatcatggcatggttcattttattttaattgtttattgcccagtgaaagtgctacattacttttaatgtgagtatataatatatagaatgaattcattggcctgtcaaataaaaatcgggcgtttctttaagtaaatagctgtcagagttaatttggaaatatttacggaagataaagacatgaaaaagctttgagctggtttgacaaaaatcgagttatgaagctcatagagagaattagttcttcccacttttaaagtgttgaggcaagtctcaatgtttattaattgaaaattgtagactagctgaaacagtgttatcacttcttttaatgcctttaatttttaatgtttcctgttgttttaccagggaccatcatctttagtgcagaggatggaaagttgatgcccagtaagactgaagatccattctgcattacggaactgtggattatctgtgggtccctggtgatttcacaccttcattcactcctgcagtccctgaacacttacttggggtcctcattgccctatctggtgaaagatggcatccagcctgacttgtactggagtaatctgggctttgctgtcttttctttgtgctgccacctcctgcgtggggttctttatgccttactggctctggggatcacagctgggcaagcctgtgtccttcggtaccttccggaggtgctcatatcctgtgcatgatgagagtcggcagatgatggtgatggtggaggaatgtgggcgctatgcctccttccagggcatccccagcgcagaatggaggatctgcaccatagtgaccggcctgggttgtggcctcctcctcctggtggcgctcactgccctcatgggttgctgtgtttccgacctcatctccaggacagtgggaagagtggctggaggaattcagtttcttgggggtaagtgacttgctgagcttgagttgtttactggaatcccaaagcagtattaaaagttatgtttcagttgtctactgagattattataaatgacacctggaatgcataagagaaatagatttggaatggctttgatgataggttgccaaagtcaagattattgtcagaattgctgctttacaacttcaagagttcttaatttctgtacatatacatcactggcctgctaagtgccacctatgtgaaacagtaacatctaggttgtttgaggtgtagtaggggcgacagtttggattttatagcttcttgttcgttatgttaaacaatagacaattagattatctttgtcttcatggaatcctcgggtctttaaaggtaaagatttcacagaaaagtggaaaaggtttttgattcaacattgttatcatgaacctctaatacactttggtggatgcaaaatttactcttgcccaatcttaaactctatttctaaataaatgttaactattttaaatgagagatcagttttatataacaactatgaacttaactattctacagagatagctatccacttaattaccttgttaggtcttaactttcctgggtgctcttgctgtggaaaaaaagaaaagggatatttagcaaatgatgtgtgcttgtcccagatggactggatagtttcactaacgccagaaaaggtttgatttttacttggattccctccagcaagtattgcttcaatatctttggtcatatggttttaattgtactttatgtattttccactgtgcttttcacctccattcttcaacctgactggctgaacttgtctgatttacagtccaccctggtgaaatatgacaacctccatagatagtgcagagtgaagggaaataggaagcctggaaaacttatacaatgtatttggaacttcattacaaagtaaaggtctgttactccctcatttggtgttttcttacagtcttttgtgaagaatccagaagaagaaaaatgaattaaaaatgagtagttgtgagacagtctccccatattagagaaccccaatggattatttcagagtatttaatataaaactttcaagtaacattttcagtaaagtttaattcttgtgctgaaaatgcaagtggcaaagttttgtgttttgaaatgagatagaaagttttgttttaaagtgagatagaattgtccattctttccttactgatgtaactttgttctcatttgggttttttcccattgggtttgcaccttagtccctcccgggaggcagtgtgggggacctacctgtcatctctttacagcttcaatgtttaacactgacaaaagtcttgcatgtgatatgtatatttacacaggtatgtacttaaaactattaggaaacctaaagaagttgtcattgaaagtggaaatgtaaattcagagtttgaaaacttacaaattttaagaatagattttaagaatagaattaatgccaagagtatttaaaatttttttctgtaagaataaagttggtctgctgtttgtgtttcacttggctcaggaaaaatgcttaagcagtttcattttctcctcttatggtaaatattgctttccatttttccttcattttagggcagggcctgctattatttctggcagaacaggaaaatgcttacaaagagaaatcagtttttattgattatctttaaacgtgtaatgaaggaaggcaacaggaagtgaatctgagacccatgagatttatggttccttccctaagctatgtatagattttttttgaattatatagagctaaatgttctactttacagaatacccaaggggacagacaattggggaaattatatatatttttaaagaaccatgtttttttctttgtgagtacttttcatgaactctggcttggtaagagttactgacattaagctaagagtatagtttgttagtagcagctggccgggtgcggtggctcacgcctgcaatcccagcactttgggaggccaaggcaggtggatcacgaggtcaggagatcgagaccatcctggctaacacggtgaaacccggtctccactaaaaaatacaaaaaaattagccaggcgtggtggtgggcgcctgtagtccctgctacttcggaggctgaggcaggagaatggcgtgaacccaggaggtggagcttgcagtgagctgagattgggccactacactccagcctgggcgacagagcaagactctgtctcaaaataaataaataaaataaataaagataaataaaatttgttagtagcagctgatattctctaatttctcaaaaatatttctcatactggcaaaaataattctggatgtaaaatctaagagggttttacagaatctcacctctcgagggcacaagtaaacatacccattaccaaagataacagtaaatttagaattaaaaaataacttgaaatatggaaaaagttttaaagaatctgctgtttatcactgttacttaatggagaccagatgaccaaaaaaaaaaaagtttcaaaaagaattccctaggtagcttgttcatttcataattgtttgggtttttattcacaaaaacttatgcagtaagtaattttatttcaataaatttttcctatgatgagttgggtttcataaagactcggcagaatgccaaaccagtgagttctatgaatctcatagactgccatgcttcagaaatgtaatcaacatacagggaactttgctatgaggcagattctcctgctaaaaatgatatgcccaggagggttatgtttagctaaagttaggctgctccaaaaacaacaggaaacaggagaatggcaaaatacagaggcatcctgcttaaccccgcctgctgtgtctagagtttgtacatatggtataacatcaggcagtaaaacccctgcagtactttggaacaagttaaaggacaaattgtcaaacttaattctgaatcttcttgctatggttggttagaggttaaaatgtcagctgtcaactgatagagcaatgtaaaatggggctgccatacatggatattttctacctatagtaggaatacctcaaggagtcagtgactatcacttttcctgtggtaatctgtacagaaactttaattgccaccatctccatttcatattataaggtatgtttatgtctaactttaaagaaccagtgtgggttgagttaccctcaactgagtttttaaaaggcatgtagaaaggctgtggggaaatacaatgtaaaataaaaatgttaacatgtatatagtgtggtaaggatgctaggagaaaatagaggctttaatgtttttgattggtgaatataaaattgtgtgctttcaaataccgttttagtcattaaggactttaacagaattttaaaaaattaatatcaaactttttggtgcacgtattagtaagatttacatgccctgcaaatgatacacgtaagaatgttgtaaagacatattaagcgtatttgttaagttctgtcaggtggtgcttgcaaatgtcagaatctgaatgtgtacatttcatcttaagaaactgctggtgcagtaatgaggaagtaccaaagagagtcccatatttatattattccatgtttagtttgatcgttagtcatatatacatatgaaatgcgtgtggaatgctaatcagcagtaaaccattacctttcctgcttagacactgttctgttctaagaagccggagatcatctcaactaatagacagttaagtgctgctgaagacagtaatgatgtcagaatgtttctttgagcatcccttgctctatgttatgaaagcgtcattgccttttcagagtctccttactgtagagttccacctgggcctgtctttcatgacttgagggagactgcttgggactcttgttcccttgctttactgtaaacctgacctgtcatatgatatgccacgttatgcttttctttatatccaagctctctgccaagtgacagctgagtaataagctaaataatgagtgttggcatattaatgggcatagtggctttctgtgacagtgtcttaactgaaaacagttgctctaatttaaagaaatgtagagacttcttcttaggtcacttggggaagcaggcagggctctttttttttttttaaattatgccttatagattactataataactactcttgttttatttggctcactctaacctatgatagaaggtccaggtgagttgtcttgagtttttagccagcagtttttaaactctagtatgcatcagaatcacctgtgggaccttttaaaacacggattgcagaatttctgtcagtagatttggtggagtacctgatagtttgcacgtctaacatgttttcaggtgatgctgctgctgctggttcagagatgacaccttgaaaaccatgttctgagttaaccatttcctatttaagaagatgagacttctggtagatggcttactttcagaactgagttaaagtgtagttgtgtcataatctgctataaacctctctaaaattgagctataaagggggtctgctgctgtagtttggtattgatttagcacattcttgttccatttctcttagttcttgtcacaacaaattgtctgcagttctctctcagtgcatattatatatagatacatacatatatatgttataatatatgaattatatataacatttccttttatttatcattttttataccagacacaagattttggatatgaagtattcaaaataagaccttaatacaacttctgaagtttgcatgcagtggattttcagtaagaaattgttaattgaaagataggaagaccgtactatagatcacagggatggtcctggacgtcccttggccaactctgtacagtcatgtacatcttggaaacatagaatgattaggccagaagggcacactaggagccagtccttctgaatttctcctgcaaggtagaatggcacttaaatcagctttgactaatgaaaagatctcctggtcttcagcacctttggggaagaagatgagaaactcttgctcagtggtcatactttttagggccacagaccatgcctttcatcacaaccacgaacactgataatataaaggagcaagcttcagatggaggcctacatggtgaaacagtgggagtggggctttgccagccaggaaggaatgaaagggagatgcatgctgggcgcggtggctcacacccataatcccagcactttgggaggccaaggcaggccgatcacctgaggccaggagctcgagaccagcctgcccaacatgacaaaaccctggctccactaaaaatacgaaaattagtcagatgtggtggcgtgtgcctgtagttccagctaatctggaggctgaggcatgagaatcgcttgaacccaggaggctgagattgcagtgagccgagattgtgccactgcagcctgggtgacagagcaagactctgtctcaaaaaaaaggaaagaaaggaagatacactacaggcggctgacagtgagcaccagtgagagcatgcactctaagctcaggatttattaaaagcaaggatgttgaggaattaataaatcttttataatatagagaacacaaaattttatatgtttgtatctaataatgtttttatttttatttatttatttatttattttattatactttaagttttagggtacatgtgcacaacgtgcaggtttgttacctatgtatacatgtgccatgttggtgtgctgcacccattaactcgtcatttaacattaggtatatctcctaatgctatccctcctccctccacccaccccacaataggccccggtatgtgatgttccccttcctgtgtccgtgtgttctcattgttcaattcccacctatgagtgagaacatgcggtgtttggttttttgtccttgcgatcgtttgctgagaatgatggtttccagcttcatccatgtccctacaaaggacaggaactcatcattttttatggctgcatagtattccatggtgtatatgtgccacattttcttaatccagtctatcattgttggacatttgggttggttccaagtctttgcttttgtgaatagtgctgtgataaacatatgtgtgcatgtgtctttatagcagcatgttttataatcctttgggtatatacccagtaatgggatggctgggtcaaatggtatttctagttctagatccctgaggaatcgccacaccgacgtccacaatggttgaactagtttacagtcccaccaacagtgtaaaactgttcctatttctccacatcctctccagcacctgttgtttcctgactttttaatgattgccattctaactggtatgagatgatatctcattgtggttttgatttgcatttctctgatggccagtgatggtgagcatttttccttgtgttttttggctgcataaatgtcttcttttgagaagtgtctgttcatgtccttcgcccactttttgatggggttgtgtggttttttcttgtaaatttgtttgagttcactgtagattctggatattagccctttgtcagatgagtaggttgcgaaaattttctcccattttgtagattgcctgttcactctgatggtagtttctttggctgtgcagaagttctttagtttaattagatcccgtttgtcaattttggcttttgttgccattgcttttggtgttttagacatgaagtccttgcccatgcctatgtcctgaatggtaatgcctaagttttcttctagggtttttatggttttaggtctaacgtttaagtctttaatccatcttgaattgatttttgtataaggtgtaaggaagggatccagtttcagctttttacatatggctagccagtcttcctagcaccatttattaaatagcgaatcctttccccatttctcatttttgtcaggtttgtcaaagatcagatagttgtagatatgcggcgttatttctgagggctctgttctgttccattgatctatatctctgttttggtaccagtaccatgctgttttggttactgtagccttgtagtatagtttgaagtcaggtagtgtgatgcctccagctttgttcttttggcttgggattgacttggcaatgtgggctctttttttggttccatatgaactttaaagtagttttttccaattctgtgaagaaagtcattggtagcttgatggggatggcattgaatctataaattaccttgggcagtatggccattttcacgatattgattcttcctacccatgagcatggaatgttcttccatttgtttgtatcctcttttatttcattgagcagtggtttgtagttctccttgaagaggtccttcacgtcccttgtgagttggattcctaggtattttattctctttgaagcaattgtgaatgggagttcactcatgatttggctctctgttattggtgtataagaatgcttgtgatttttgcacattgattttgtatcctgacactttgctgaagttgcctatcagcttaaggagattttgggctgagacaatgggcttttctagatatacaatcatatcatctgcaaacagggacaatttgacttcctcttttcctaattgaataccctttatttccttctcctgcctgattgtcctggccagaacttccaacactatgttgattaggagtggtaagagagggcatccctgtcttgtgccagttttcaaagggaatgcttccagtttttgcccattcagtatgatataggctgtgggtttgtcatagatagctcttattattttgagatacgtccatcaatacctaatttattgagagtttttagcatgaagggttgttgaattttttcaaaggcctttcctgcatctatggagataatcatacggtttttgtctttggttctgtttatatgctggattacgtttattgatttgcatatgttgaaccagccttgcatcccagggatgaagcccacttgatcatggtggataagctttttgatgtgctgctggattcagcttgccagtattttgttgaggaattttgcatctatgttcatcagggatattggtctaaaattctctttttttgtcgtgtctctgccaggctttgatatcaggatgatgctggcctcataaaatgagttagggaggattccctctttttctattgattggaatagtttcagaaggaatggtaccagctcctccttgtacctctggtagaattcggctgtgcatccatctggtcctggactttttttggttggtaagctattaattattgcctcaatttcagagcctgttattggtctattcagggattcaacttcttcctggtttcatcttgggagggtgtatgtgttgaggaatttatccatttcttctagattttctagtttatttgtgtggaggtgtttacagtattctctgatggtagtttgtatttctgtgggatcggtggtgatatctaataatgtttttaaatgatgtttccaaattgtcatggtcaccagtttagttttttacatactttttttttctaaaaagcttgttttctaagccttaacgtgggaaagatttttattgttttgatgctttcctgtgaagtttctaagttctccatatcaggattcaatggaatattctttttttttttttgagacggagttttgcttttgtcgtccaggctggagtgcaatggtgtgatctcggctcactgcaaactctgcctcgtaggttcaagcgattctcccgccttggcctccttagtaactgggattacaggcgcctgccatcatgcctggctaatttttgtatttttagtagagacggtgtttcaccttgttggccaggctggtcttgaactcctgactttaggtaatccacccgcctcagtctcccaaagtgctgggatgacaggtgtcagccactgcacccaacctcaatacaatattcttttagctttctagtaggcttaaaaatcaccagagagcttattccatgtaaacagtccaaggcctagccccagagagactgctgggaaggtctgggtggggcccagggagcactttgaacaaactccccacgtgttctagacacagatggtccacagaccatatttggagaaatacaaaccaattttatttgcctaaaacctcatattgtactagtattggcatgtagacttacaccactgttaagcttagagtgaatcattgttacctctgcagtggtcattttgggggtgatgtgatttgagctgcagaacatcagaactggtgtaggaacagatgcatttattgttggttttgcttttatattgcttgctgaccttaggtgatggttagccttgtatatacactcataaaaaagaatgaaatattttccatgctatacttagatgaggaccatattttgatgtatgactccagctacaaattgcaaaccccaccatcattcccaatgctgtgtttttcctccttcgtcctgcaacaatgtgatgttgctgctacatgttctggtagagtaggctcagatctagtttcttttttgccaaatttatcagtttttccccgttttgagttactattttttactttttaactttgtatttttgaagtaaaaataataatcatagtaagtcttaaaatagtgggatatagagttttccattatacttggacttattagcagctatgcaacactttttcgctagaattatttatttttgacctggttcagttctccatttactttaggcagagtagagtctttctaagagagttgtttgatttttaacttacttcccttagtttcaccagcaaacacagccgtagccagatacccctgaggccatggtcagtatggattagttaacctcactaacagactgaaatgcaaattgttgacctatcttgtgaaaacaaattgttagtcacaaaggaaaccaactgaggaatgtaaattcataaacatttccatagaaagaactcaaaaaccacactcaagagatctttacatcattctgtgtatcatatcatacttacatatcaatgatacttacatgattcaatgtaaatatcgtgagatgcatacaatttgcactccacacaaagtcatcactgttacacactctgtatttgaactctccaggttggcaagggtgtcttattgtgggtgttggttataatcagaaagaataaaagcagcaactcaaaacttttattcttggatgtcacaagaattgatcttgttgctcccttgaagcatcagccttaagtgagttctgaggaacattaattcctgggtgtaccaataggtgctaccaggaaaaagaaaaacaagttttagggacaagtatgtttgagaagcacttggttttggaaagttaatagattcattgcggcagaacttcacagagcttttggtgtgttgatgcatattgccaatctcccagataaaatggggaggaatataggattcaatattttcctaatttatttgggtcctgcaccctgaagggacccttgatctgtagaacttattcagttttcatttcacctcagtgaagcaggtgattaatttttttttaacagctgagaacactgaattttagagcatgaaaaccaaagttatcccattagttactgattaggctatgaatactatcaccataatattaaaagtgttgattaaacttctactttatattatatttagaaatcagaatttttgttcaccatgaataagtctcaacataagggaatattcttattgtctctttggccctcagtttatgcttctggtatgatagaaatattggtaatatgatatagtaactttttgccaatattcaaaaattgtattacatgttaatattaataatgtaatatgtaatagagaggccatttggggagaatgccaaaatatctgaccaaagcaagcatactgtcttttaaaaattatttaacagacgatcgtgtgctggctaaattttctagtgtagacacccattgttggaagcctttgtaataatcctttattaaggttaatgataatattaattccaaaggacatatttcttaaataacaaaaccaaaggctttgtgtctgtctttaaaaatgaaggataatgtcctactttatcaatctggatcaataaaatgtagaaacaaatggaaattttagctatatcataataaaaaaaagtccaggaatttctcagagatttttaaatggtcatttttagaggttcgtcgggttggatacaacattgctcagttctggtcattaatattggttaagttattattggggatctagtttttaaaaaattttctttatctgggctgggtgcggtgactcacatctgtaattaatcccagcactttgggaggccgaggtgggcagatcgtgaggtcaggagttcgagaccagcctgaccaacatggtgaaaccccatctttactaaaaatacaaaaattagccaggtgtggtggcatgcgcctgtaatctcggctactcaggaggctgaggcaggagaatcgcttaaacccgggaggcagaggctgcagtgaaccgaggtggcgccactgcactccaccctgggcaagactctatctcaaaaaaataaaaaaaaatttatctggtagatgtcattccagttagtgatttgctgttagaattcatgaaattgaaattgtaagctccagagctgacctgcttatcacttcagtaaataattaccctccatgggtctcagatttttaataatcaaatagcaccatgtatcttgatgtacaaagcatgtataaaaatattgttggataaaaaagaaagtttcattttatggttctctgtttttcttatctcttcaaatagggtaggaacgatgacttatatttttattctaatgctgcagtgactagaatagtaaatgacactttatatatccaattaatacttgatgtattctttagatttaattatttattagcaacacttctatctacaagatgtgaccttattcttctgtacctcatgggaatatttcaaagataaaaggaagtaatgctaccaatgtgaagatatttaagcaatgtccccttagaactgaggttcctgcataatgttagttctttggaaaaagtatttagtcgtcatgcatgttgaaacgatggtgtgtcatactacagttccctcttcaagcacattttaaaagctctgaataattctgcaataaacaaaccagcttaagtttatttaacactttgtttcacaaacttatttgggaatggcagggccctatttacttgtaatatgcattaacatctctttgaattaatggtcaacagaacaaactttgggaaataccaagttcaagtatgttgtaaatccaggggattggtggttaagggcatttacttatcgagtgcccactgtatgtcaaataatgtgctacgtgttgggataaaaattgggttcctgctgttgctgagctcacagtcttatagaggaaaccaacatgcaaggtataattacagtccaaggactcatgatatgtagcacacacacttctgtgttttgctcagacggtgatcagctggtgaggctcactcggcagccacgtgaggggctcagcagcctcacacactgtgtgccactcattttccatcccgacctttccctgcttggctgtaaatcacaaggactacgtttcctggaagacttagcatctggcatctggatatccagccagtgggaggcacttttagaagacagaaggagactgggagaatccaggttatttctccttctcttgcttttccttgtgcagtttcgtgggcatggttcctcctcctagaaagccctgcccttcatgatcccagctctcatcagaaaatcacaacatgatcctaccctagtcaggaagcccagtcctctcatcactagtaatgccatcttctgtcaatatcactcctatctaatggacagcaatagttttctgttgatgctactttctgggttgcctctttagctcctgtttggccttttagctcttcgtcatctgtagaaccaatttcttgtacaaaattctctgtgtttgaaatatctaggatggtttcggcttccctggatggatcctgggtgaaacacaatacataattcaaattcatactgctgccaaggcagtatggaggattgtgtcttgctatgaacttataggatttttggtgactagaccaaaatcacagatgtttaatctaggaatgtccagggtccactagagtatgaacaaaatgctgcaggtgtgcagggcaggagtgacattgtgactggcaaggcgtcacagcagaggtgctagttgacctgggtctggtgagcagacagcctcctcagccttcagacaggggaacatcaagtcctcaaagccaaggaattgtaaagagatctgatgggagttcagggaatggtaatagatttactacaaggtatgaggtgagagtgatgtgatagggactaacgtggagaggacagatggagtcaggttatgaaggccctgatttatgttccaagctgaggattcttttttttttttgagacggagtttcactcttattgcccaggctggagtgaggtgatgcaatctcggctcactgcaacctctgccacctgggttaaagcaattctcctgctgcagcctcctgagtagctgggattacaggcgcatgccaccatgcctagctaatttttgtatttttaggagagacagggtttcactatgctggtcaggctggtcttgaactcctgacctcaggcgatctacccacctcggcctcccaaagtgctaggattacaggcgtgagccaccgtgcctggccccaagctgaggattatgtacttaactaaattgaagcttttcagtggctatgggtgcacctgacttaggaactatatagtctagtagcagtgaggattggcttggggaacaccaaaagcaggaaaggcagttacaggcctgttatagcaatgttggccagcgatggtgagaatctcagtgaagctgtgggaatagaaagaaaaggattttgaagaattttctgaagtagagtcaagacctgctgtcacaatgaatatttttagatgaatagatgaatgaatgaatatctcagtaattttatatctctgtttatataagtagccagcattttctttttttctttctagttcctcaaaagttaatgaaaagggggaaagaaaatacaataaattacaactgttttggctttcagtgggttattttttaaagtagtaaatattgtcgttaccatggtatgtagatgtggtttatcatacagtgttacaatgtgcatatctctgattttagaatcatttgcatattggtctgcatgtaagcatgtgttactaactgtccagcacacctgggggcttaaaaggggaatactgatgacaactaaagcagctgacagtgtcactgaacttcactgcttcacacaaaaagacactctttttttcttcctaaaaatgcaggaaatgctgtgtatgtgtatatatatatatatacacacaataattagatgtaagagtgattttatacatctcattttcataaacaatttggcgttttctttttttccctccatgttttaatgaatctattcttattttattagtctagagatctgatgggagttcagggaatggaaacagatttaccacaaggtatggggtgagggtgccccatatatttttttgagaaaaatctagtagattttaatcatagctaaagttaaaatgtcctaaattttattaggttaagcatcctgcaataaccattaatggcttcctttttgcccaagaaggatgtctcataacacgtgatacataatactatgaaaagaaaaacttttgacaaattgaattgaatagcttatttgagcaaagaatgattctctaatcaggcagccctcagaaccaaaggaggctaagagagtcccattgggcaaacaggtgggcagggagcattcatagacagaaacggaagtgaggtacagaaacagcttgatcaataatttgatattttaaattatacttatattttacttataaagaaataaatgaatgttatttatcaacctgtttaccattgaaaattgctgtcagtcacctgtagtaaattgatcttttagtctggagacctaatagattgctttcacagcttatgttatttgtgttacagctacgtattagagtaaagcaaataaactagctatcccttgattgttgtctatgagttaatgctcatggtatgtcccaagagccaattgcattgaaggccgtgacacacaaaacgtactcttgtcaatctagtgtaatttatagttctcatatatttgccatatcacatttttgggaaaagcaatgtgcctgcaagctgtaaatgttatgattctgtgataaaatataatcctcatttgatattgtgctccttagcaagactcactatgtatgaggcatggatttcctagttgtttctgtgtattccctcaagctctagaagttgaattaaagcacatgcctctaatgccatcttatgatgagattatcctgtttgccctctcagtaatctactaatgcaccttccatatgggtgtattggggtgctgtggggtgcaattgggcacacacataaagcagtggactccttacaggactatgtcatttcaacatgtgtgtggctagaaagtgggaatctaggtacatggtcagagtcaccatagacttctcgttcttggcaagatttggctccccataacaatccaagctccctgtattatttcttcttcctggctgtgtgtgcacagttgtcttgggtaaaagtatgaggttttccatgttctcttcatgtctagaagggaactacaatggagtcattattttctgcagtttggtatatgttggaatgttgtttttgttgttttgcccttcttacttgggtttgcattacccaatctaaagggaaaattataatcctagacattaagcctgttcctttatagactctatagtcaggtctacgtaagaatattactaccataaaattactccaaagaagaatattaactctagtcttaaaggaagttaccctggtacacactagatataaaaacataaagaaaaaaattaatggtttttttttttttttttttgagacagagtttcactgttgttgcccaggctggagtgcaatggcgctctcagctcaccgcaacttccgcctcccaggttcaagtgattctcctgcctcagcctcctgagtagctgggattacaggcatgtgccaccacgcccagctaatttttgtatttttggtagagacggggtttctccatgttcatcaggccacctcaggtgatctgcctgcctcagcctcccaaagtgctgggattacaggtgtgagccaccgtgcccggccattggttctttgtttttattcacttattcaacaaatgtattttaggtgtcaggctctgctctaggccttggagatacattgctgctcagaaaagtctggatcttgcctactaataatctaaatctagcaagagagacaaacattaatcaaattctccccaaaatgaaagtaaaattacagacatgataaacattagaaagagaaaatatgtcacaggcaggcatgacctagaagggtgccaaggaagacattcctaaggaagtcaggctggagtcgaggcctgacacggaggaggaggggagggagcctctcagagagggaacagcagggacaagacgaggcgcttgggtgtgagggagcaagttgccttcgaggcacactagaccggaggacacgagggaggatgggtcaggtgaagctggagagggaggcagtggccagaaggacttgcattgaggatttgttcaggatattgatgagattaaaagccaatgaagaggtgaagaggtatgaaccaggagttgctgtttatccctatacttgcttgcatgagaaatttgttcatttaggcaaaccgtggaagagttaacttgaaggtttgttggctggaaggcacctggattctttcacttatgctagtccttgtgaggtagaggtaaccattattgtaatttggaaagagaaaatgtcattctggaatttctctacatattatttgaatgtgtaagttaacactggtgtctaggtatttgattgggaggtacaactgttagagttttgcacccagccgtatgtggtagctcacacctgtaatcctaccactttggaaggctgaggccagtgaattgcttgagcccaggagttcaagaccagcctgggcaacatggcaaaaccctgtttctacaaaaaatacataaaaattatccaggcatggtggcatgtgcctgtgatcccagctactcagggggctgaggggggaggatcacttgagcctgggaggcagaggttgcagtgagctgagattgtgcactgcactccagcctgggtgacagagcaggaccctgtcttaaaaaaaaaaaaaaaaaaaaaagaatttggcatcctgtacattttcttcataaaatattgtatgcttgtgataacttaatttttgcaattaggtgtataatatctttcttctctgattgtaactccccaaggtcagaggtctgttttaatcaccgcactatttccagagcctaccaaagtgcctgacagagaatgcaataatagtttgctctccacctgagacttaatataatatggcctccttgaaaagctgttgtatatatacttttaacccagttcaattttgcagcttttgatccaatttctactttgcagaatggcagatgctaggccttgtgttgaataatgacttaaatatgacgatgtctgtcttcaggaggctcaaaatctggtgtgtggaattgtacagatgaatgatgcagctgctaagatgattgctgtttggttgatatcctcaagatcctgtaagatacacatattgggtaagctatggaacaaggtcatcgtctgtctgtcttagccaaactcagctgcagaccctgaatcctttctcctgaattttcagcattgccattaaaaccacacccccacaaaagggccaggcaagggtacgttcagatctcttgaatattttgctactgatcaaattcctgcattgtgaaatgccttcccattggttgcgggttagctgtggtagccacatgatcattacatttccatcctctcccctgatcctgctttgtaggattggctctgcattgatttccttaatggccttaccctccaaataccccagtttgataaaagtctcactggactacaattcacatggttgggtcttgttaccctcttcttagcgatttgcagaatgagaccctggactctgggacatgtaagacagaaagagagcgagatgaaagatgggatgagaaatgcagtcgacgtgacttggcaactgattgtcatgtgagattatgcatcagtagcagctctctcttttcaagtccatgagcctcgtagaatgaggccgctgcttttggagactgatgtgtctacaggaggcctgatttaggaagcaaggggatgagttgagttctggacagcttttggttcaagttctgcagggactttaaggtggaaggccaaatggacagttggaaacactgggcatagagctcatgagaaagatcagggtaaaatacatagatttatgaaaacagtgttttgaaaaccttcacgtgggtagatactacttcatttactcttaaaaacacatggcttttgaattttgacattttcttttacatttgattgtgctggttgaaaggcaagctcctagctgtgtctactttaatcataattttaagcctcccctcagatagtgccagctgcttaacagttactacgctggtggaccaggatgatggagaagtttgtactttataggaatagcacttttttttggtttgtttttggtctggaatagattgcaataaaaatcaaagtaggaaaacaattatgatgttcattaacaaaagataccttgggggaaagcagaatctagaagtgaccatgtagttagaaaaaaaaaaaagagagagagagattgtgaaagctgaatattttaatttcttcttcttcttctttttttttttttttgtctcatgcataaagatggtattctattttgatcgcctggtggaagaaagtcagttcgtttatctcatccacccactggtggctatcctgattatagcctcctggtaggaaacatttaaaattcaatttggctgtctgtgcccttggtgctcagtaggtttcattaaattacacagcggtgagctcttcttccctgtgtggcaccttttgatgtacatttgacttcagtgtaatttcagacaattgtactttgtgtggagtggttttaccataataatcttgcagtccagatgaggcagatctggaactctgaatctgatgggattctaagatggtggaaaatattggaccagggaaatattttcatttctctatactttccttatttagcttgttaggcttgtagggtttggcagattgtttctgtagcattacttacagcatgggattagaataacattttccccccatgtgggatgctttaggattttacatgcagtcagattccagaaaaaactgtttcctcaagtctgtaagtaaaatgaagtgttagtacttttttcttgtattagcaagtcttaaagtaccacctttattcgtgtgttcacattactctatggccatgtgttgtcgtgcaaagcaaatgaacagaggatctggacagacagggttaaattctgctgttcatcagtttcctggttctggacaagttacagactcttggcctcaggtcctttgtttacaggatgtaatagtaatattaggtcctaatagtaatattaactctttgaatttttgtgaagtttaaaaacatgtaagttacctaatatcaggcatgataaagtagattcccaataaatggtcgctattaccaacagttggttacataaatatttattgaatcctgctctgtgccaggaaacattctagatattgggggtaacgtaatgaacagaagcagactaagaaagaacagtaaagaattataaagaactgtaaaggaagaactacaaagaaaggactttggttctattttcatctacttttagttttctattgctttcccactgcatttccttagctagctgatttttggacttgtaatattcttattagtaggtgacttcttattcaggacgtggtaaatatactgtgttactagatatatttgacctccacagatcataatttgagatgccatgcagatatccttatgcatgttctcagtgtctggacaagttttttttttaacacctgtcaccacataatgggttttcttacttctgatggcattttaaatatcatctgtcccttctgtgagaccccatctttaattccccatctctcttcccatatgctttcatgtgtttatagtctgattactacctgttcataaatttgtatttttatctcttttgcataaccactgagaccaattaaaagtacaattagttctttagagttctaagtcaactaatgccagctgcttttaatatggcacttcgtaatatacaataaatgtttatatacattttctcatttaatcttaagattctgctgcagctttgtgcttgaaactgtgataggtactatgggaacaaagaagtaaatgtactacagggctgtgaccctgaggagtttataaattcattgctttggtcagtagactcttttcctcagaaagatgccattgttattctaccaacagcaagcttcagtatcatgttatattgctagatcgttattctatcttcacaaaatgaaacttgccagtgatatttgcaggtgtatgttgaagtgatattttctaagattagggctcaattgaggggtttcggagctttcatttctgatcctcgggggaattgagcaaaataaaaagaaaataatatctttgatggttgtatataattctttaaaaactgtaacaagtatattattagaaaaagataaaaaaatttttgaaattgatgtcagaaatgggacagaagaatgtgctgtaaaactgaattaatctgaaactagaagctgaatctgatagaatgacaagaaatttcattgtcttgaatttactataagagagttacttaatgtagtatatacctctatgtcatggaagcatgctgttacaagagtcatgtcctgctgggtcatgacctgctgggtgaccatttaaaaagccttctggcattaaatattgttctcgtttagtgtcctgatgcactatcacatttgtttcaaaatggctcagaagacttgtggtgggtggagagtatctgcccttggcctgggctcccttcctgcatgcctgcctcactcctatgcagcctcatgttgctgccagagtaatcctcttgggtgtgagcatggccctttcatgctcaaaataccttggctgctccctgtaagataaagacctcctacagtgttaccccaggcactactggacatattaccatccattcaccccggtcttgtttattctactttagccacactgaatcttctgatgtttcttgtgcactagttacacgagaggttacataagattagaataacattgttgtgcctttgctgaacgctgttcccttcacctttctctcctctcttcacagaccccaaacctatttgccttttaaggcctggtttgaatgttgacttatccatgaagtctcctctgattgcccagctggagggaatcttctctttcctgagctcctgggaaactttatgagcaatgtttttggtggggatttgggagagcaccatctaccacagatgactgtcagctcccctggcccccgactgtggcctcttagcataacctgtacctgtcacaatttttatatgcatttgaatgatgacttgttgaaacgtattctggaaacttttgaattcaggtgtttacctgagcaagatactgatttggggttcatgacttgcttgccccgtgtcctctgtgttgtgctggtaatttccttccttcctttggctaagtcacttcttgtgtccatcactctcacacctcatggcacaatgcagattctatgcagttttctgtcttggatgccaatgactgaatgcttaaaataaaattctgtttaaatgtatatatctctggtcaagttaatttcaaaagacgattttcttatatctgttcctactttagttgcactcatacagacagcacagaaatgcccaacagttgaacatgttactgtgaggtagtccgcggctgttgctttatgctgatttaatcatttctgtcaggggtctttagtagggtgcttttgtcctatcactccatgatgattgattcaaccatttactttagataacaactaacttggttgctcttttcctggaaaggaaaagagaaatttccagtgatatgggttgagacatgctgcccgtgtgtattttaaaggtggtgaatgcactgagaacacttctcttcaattcagtcttggttgatggataacgtgtcttttctggcaagctgccaggacatgcttgtttgtgtgctaccagacatttctattttaaaatattatcaaatgtcagcattaatattgagttgttggggctgggctcatgggattacaggcttatgcttgtaatcccagcactttgggtggctgaggtgggcagattgctagaggtcaggagtttgagaccagcctggccaacatggtgaaactccgtctctactaaaaaaaaaaagtacagaaattagctggatatggtggcatgcacctgtagctagtcccacccttgggaggctgaagcaggagaatcacttgaacctgggaggcggaggttgcagcgagccaagatagcgccactacattctagcgtgggcgacagagtgagactctgtcttaaaaaaaaaaattgagttgttggaaagatactcataagccaccaattaatgcagatgttgtgtttttcattaagaccatcacaccagactgcctctcatagatgatccaaatacatctaatgggataatagctcactggggtgcttagagcttgatacttagagacaagtggagctcttgaatgtgtgtgcacattgagtttcattcttttaacttgtacttggaagcacatatgctcctttctaaaatgctaacctttccaaatttgaaaagcagtttcctgaaatgcgtacacttggccctcaagtacttgctacttcaattttccttggaggaacactgctttctcacttagggtgtagcctgttggagagaaggcgggggtgctctggaagaccaggaggagcagcaaaatcaggtatatttgttcaatttaggaatactgtaaccttcttaactgcccagtgaaatttttgttaaagttttaaaggtcacattagcacttaagtatttttctaagtgttatcatttttcactgttttgttttttcttttcatttttaactccatgaagatcgtgagtttatctgtcttattggagcgttttgcatctttagcacacagtaggtctcaacagattaggacattgggtgaatgaatgaataaacacattctgttggtaagaaggtaagggtaatagaataataatgttcatatatctaatgcaggactggtgatataatttgggagactgaatacaaaatgaaaatgcagggctccttgttcaaaaattattaagagcccaagcaacgtaatgagacattgtctctagaaaaaaaatttgtttaaattggctgggcatgatggtgcatgcctgtagtcctagctactcaggaggccgagttgtgaggatcacttgaacctaggaagtcgaggctgcagtgagccatgatcaccccactgcactccagcctgggcaatggagtgagaccctgtctcaaaaaaaattattaagaatttcaagatgatgacagcagaacaagtgtgaccctctggagctgcacgggtcagaaatcatgaagccactcttttgtaatgcagaaaaaagccagagatttgaattcccattttttatttttgcttgtgaagtaagcatactttattctttgttttccagttaatagtatgaaagctttgcttctttgcttcctagtgaaatagggagaacagctatttaatactagtacctgtcacaccacaaattggaactaatgcttaatttaccatctttgatgtcagcctccaccagttttcttagcacaaaatttaaagcagtaaactctaccaacctaagcaatctattctcattcatggccccagtatttttactgactttaactgtgctgtactagtaaatcattttgacccaaacctagtctgtatgaactctgttaaaatgattttaaattagagcagtgaaaaatgggcttatttcctctacttttggagacataggaacaagtcccaaatggaattgccaaagagccactggtcccaggaagaggtaagcgaaaccttcacatttaagaaatcccctggggtaggtttcgtttacaagtaaaattgaattgtaataaagcagaaggaagagatgcctcctctagggctccttgcaaggtagataaacctgaatagaaagtaaatgttggcccctctgtggtctccacacatttgaaagtaaactggtaatttctaatcagacgtgtcagcacagataatccttcagctgctgaacgtcaatctgaagataggagcaggctagagtctgcaccagggctgtcctgtggttagaagtgagacataaggagaaaccgtgcacacccgggcagaagcgaaccggaccccacagcggaaggagctccccactccacagctgtccccatgtccttcccacttcggaattttgaactttttgaccggcaaattgctaccccagttctttgctgcttcttttcctttagttgactgcctgattcacagcgttatcacttgttactaaaagctagggcttttagaattaaaatgaagctaaaaataaatctggccacttggacttcttaattttgaaacatagagatgtcatagtaaattagcaaggagttgtgactaaaatgatatcttatgactatttgtggattttcatgatactagtttttaattttaacactaatctttaattttaatatagataaagaaatgctagtagtctggaggaaaatgtattaaaaatcgttccttaactgtgcgctaaagtctgaaatacaagtaagggtacaaatagtttcagaaatgattgtcctgggggtattagcagaatcacaaaccaaaatataacacgtcatctttcagtctttacatctgtgctctgctattcccaggaaaggtagtatagctctggttacccgtgtatgtggtcatcattgtgttttcatttgatgaggtatcctgtaacaaagacagagagggacaggcggggaatagaatggaaatttcttagacccacctgtatttttttttttcttgagatggagtttgctctgtcgcgaggccaaagtgcagtagcgctatctcggctcactgcaacctctgcctcccagattcaagtgattctcatgcctcagccacctgagtagctgggattaccggcgtgcaccaccacacccagctgatttttgatttttagtagagacagggtttcaccatgatggccagactggtctccaactcctgacctcgggtaatccacccatctcggcctcccaaagtgctaagattataggcgtgagccaccactcctggccccacctgttttttgatgaaggaatcacactgcctcattcttgctggtacacttgccagtacacttgccttgcacatccagcctcttgtacatccatatcaatttgcagaaatctcagtatgtcatcatccagctaactatggatgcgagaccttgctctgcagtgcagctaggagaacaagattttaacacgcaaaaatcgttgaataatcaattaatgaatagtccaaataatatgaaatatgacctattatttacacaccatgggtggaacatgtttatttgtaatcttttttttttttttttttgagacggagtcttgatctgtcacccaggctggagtgcagtggcacgatctcagctcactgcaagctccgcctcttggggttcacgccattctgctgcctcagcctcctgagtagctgggactacaggtgcccaccaccacatctggctaattttttgtatttttagtagagacggggtttcaccatgttagccaggatgatcttgttctcctgaccttgtgatccgcccgcctcggcctcccaaagtgctgggattacaggcgtgagccaccgcgcccggccttgtttgtaatctttactatatctttctaagatagtgtgggccctgtttcacagatgtgaaagccgaggtttagagaagtcaggagtatgcagcaggctactggctgagctggaattcaaatatggatcaggtgcgtcaaaatctgttccttcccattataatatgccccttccctgtctcgcacacagatgaattatagtgaagctatatactttctgttgggagatacttcatttttctctggaatgatgagagaaggtgccttggacccgtatgtaaacctggcgatatatggtttgcaaaaatgatagaggaaaaatatttcaaaaataataaacagaggaaaaatatttcaagcttcctttttatgttttataattatttcctataaagtttcaaagtgattaactattagcctactcataaatattaatattggaaggaatttactagatgcaatattatttctttttttttctttagttatttttcctagatgcaagattatttccagtcccttttgtgtggggcaaagtagaataaagataacactgtaattaaaaaacttgtgatgttaaaccgaaagtattttgtaaaaagttataccatgtaaaagaagggcatttaaagttctaaccttcaagctcagaaaattttctatttacaactatggctgcttttccttaggtggagatatgcattcataaattttaatctattttgatgattattgttctattaaaatagttttctttattctatattttcattaagatcttccaattatttttctggtcccagaacaaactccatgtgaacggttctttttaaaaacatacattaaaaaaagatgccttcctttcgaaggctaagacctattgatacatactcatttaaattgtaaaatctatttcaggagttaatttgtttcacctagttttttttgcttagtagaaataggagtatttaggcaagaatgaatctctattccacattttcacctattttgataggggaaaatctctatcaaatgtgttttgtacctaaaatactgttgtatctggagtcctataccatacatttttacaaatcttcaaaacacaatagaagttacggcattggctaggttaaaaaacagtatgcggtacatttagtttcaatcctggttgtttcttctttacgtggaaataagctaggaaatttgccatcatcagatattagattgcgtatctcacctttaacctcaataacattattcattactttcctatgaattctgatccccttgccctcagccttgtgacccaaagaccatgtgactggctgacttggaggagaagctaatggtcattgactggtatttcacaaatccagaatccttccacttaggagaaagatggctttttctaccagtttttgatggcttgggtatgcaaactcagaaggttaagatctggctatttgtgcaacagctgagtcttaaagtggaaggtgacgattaaaggaaatagaggacaggagaggcaggcagcaagagtggaggagacacagaaccgccaacacattttagttatgagcagaaggaagataggtggccaagcctactttgcgtagaaaattggactgtggtgtgttttccttttcaaaagctgtaacaattagggataaagcttttacttcttaaagagaggtttttgagtaataggagatggatgtactgtataataccctttattgagaatcggactggaacctctgaattatggctttatacatatattcatagaagatctatgtctgggccctgcatttgtgtacgtgtatatgtttctggaaagaggtctcagactgattctcactggggactgtcacacacacacacacacacacacacacacacacacacacacagagtttaaaaaatatactaccacggctctgagccataaatgactaactctttagatttttctatcttaaatgctttattttatatttgattgtatgcaatattaggtgtctttatttttatgaaagcttactacgttgctatctgattgctacttatgtaggacacaagtacaattctaggagattcttgtcctgtgatacagtatccttggccagttcatgtcctttgcccctgatttaattgtcacatttataaccttggacatattgatgcaggatttttctcagccccttcaccaactcacggcaggggagccccctctacttggctcgtcacactcaaccccttgcaggaggcagcacatgagcaagcgagcgtaggatccggccagccactctgggtgctgacacagaagcaagctccatgcagggcccgtggccagaccaggcatgtcaccttgaggggaatgtggtggcgcccctgtgagggtgcccatgaccccaaagccccagagaggatgttacagtgctccttaaattccactgtccacggacagcggtgtgttagcagctcagttggcctcttgccttgttgtgtggggtggctgccctccgccgtcaagggcaaagggccggtgtgacagccttactggatacccgcaatcagtgggtcccgagctcttgtccggcatccaggaagaatgaggtcacacagatagttgaaggatggtgaaggtgggtagttttattgagtgatgaaaacagttctcagctggagaggggaagagaagggcaggtcatcttccctgatgtcaggctgtcacctccctgaagtcaggtcgtctcctcctctactgactgagtctggggtctttataggcaaaaggttgaggcaaagacaccactcaaagttggatatgacggtgtagaagaccaattaggaaagggtagggatatgtaaaataggtgaagggtggggatcaataagaggaaagcgcatcgaacaggaagacaagttctcaatctggtcggaggatttaacttgtagcttggctttcaggctttaaactgtctttggcttggaggtggggtttcaccagggacctgccctatctgtctaggcatttggctgcctcctatcattatcaatatgtggtcacaaacatttattgaaataaagcctgatttgtggtttgaggcatctttcagcatttcctaaaaagaataagcttgcctaaaatctgaactacatgaagtggttagtttattgttgtttttcacactttcaatctagtagtggttagattaatggaaattaaggattctcgcttactgaatctgactggatggggagataaagaatgttatccatgggtaaaagaaattacagggttcttcttactttgaacattcatcttcaagaaatagcctcatttgctttaggcttttgccttaaatatttaggagaaaaacacacacgtggcatgcccatgcacacacacacattcactcacacgcactcacatgcacacactgttgccccatactgaccgttgatagtgttaatacttaaagtacaactattttatatctaccagagctataatcatgattaaatcattgttgctgcaaatggtaattgcatggcaatcttcttacttagttctttgattatcattctatatatcattctaatatatacattatatattgtattatataagattatcattttattttatattattattctattatatattactctattattttactcccacatcctcttttcttgccatgtttttaatgaatccttctggatatttaaaaattacataaattagccaggcgtggtggcttatgcctgtaatctcagcactttgggacagcaaggctggaagatgcttgagcccaggagtttgagaccaacctggccaacatagtgagaccctgtctctactaaagatgtaaagattttaaaatttaaagtgatggctcacttctatagtcctggctattcaggaggctgagatgagagattgcctgaatccaggagttccaggttacagtgactatggttgtgccactgaactccagcctgggtgacagagcaagaccctgtttctaaaaataaataaatacaataaaataaatttaaaaagagtaaagaaagattaagcttgaaaagctaacttggagtcagaacctgcccatatgacttttcctcaggccattgtttcccttgtatatagatatttcatagactctcagaattttgaagtgaaaagaatgtaagaatttccttttcttccaccattctaaatcattccttctggacagtcagagtcaccatgtgcttgaacaggtgcttaaagactccaaaagttgtttcatccattttaaaacgtttcgaattgttagcattttcataattttccaaatgagcttgtgcctcctgctcatttctgctagttctagttgggcactctgtatatgtaagaaagtgaagatattaatttattaatagcaccctttagtgataatttttcaatagtttgaatacaccttactgtcctgtcatccaaacttgacttttccattttgatcataaagaatattaattcatcaaatatcttacaaaaatcaagacactttatacctgtagtattttctcgtcaaaaccaaagttgaggtaaatttaacaccgtttattcttggtgatatagtattgcttgctggtaatctactttttcttgagtaagttttttaggacatctggttaataataccatttgcaattttttcaggttctcaacataaaattattgacctgtatttccaaaaactaacattttctccttttgaaaatgagaccaatagattgatgggttccaagacctggctatctagcctatttatgcttgctgaagtccttgtcatcattaattgctaatagatcccttacatttatgaactccagaaccactatgtttcaactattcaaataggtttgcaaagacatttgcggataagctctgtatggtttagaaaccaataacaattctgatgtttgcagtttatatctgtccatcaatccatccatccatccatccatccatccatccatccgtccgtccatccatccatccatccatccgtgtttactaagcctctattgtgtgccagaaactgagctaaggccaaagatacattgatgagcagggctgacatgatcgctgccctcacgggtcttattctgctaggattttcaatttccaagcagtaatgcaaaccaatatgggaaatggttttaagcaccaatgaaaagggttaactgctcaggttgaaggatggatgattgaggagtgtgggtgaaagttcaatagaaatccctctgtgtttgtcgaatcctgaactctagggttgaggtcactggatatgatcaactcaaattctggtctgctgctggaaagcaaagcaagagtccatctctggaggtagcactggcctccacctaaactggacagtgtgaacattagaggatgtaggggtgaaaggagccagagcctggagcttctgagatgggcaggaaggagtttttgagttatgcatcatgcagagaaaaagtgaaatgtaaatacatataaaaacaatttcacagtgctttccaagtttaatttctagaatgaatattctgcttacagaattgagagaaagctaattgagaaatatgacttttggaaatgattttatttgggttaggtttttttatttatataggcagatatatatggtgttttgctctgtttacatagctttatacctttttatatactaaattgaaatggataggtagaagcaatattttcagaattggtcattgtcctgaataaaatgagccactgtgttctctcaggcaccatgcaagctcacccaatattcatataccacaaaagggtgtttttcctgcttaagtttatattctatatcatattctgttttttttttctggatatttccactttatattgttctctttcaacattttgtaagaagtagtatttcctattctctgctgttacaaagactatgaaaatacatgcaactcatttaaagaaacaggtggatgtctggaagttttctctacctaacactttcacatataaaatttatgatgtttggtttctatggtatttaacattggcaagaaaaaataactcccaatgaagtaactaagaccacttgttctagttcttcctgtagtggaaagagatagagaagagtgatagtaacaaagtattctcattactctagaacagagattggcaaacatttttctgtaaagggccagatggtatatacttttggcttcgtgggccatagggtctctgttaaaactgctcaactctgtctttggggtgggaaagcagcagtagacactttgtaaatgaatgggaatggctgtgttccaataaaactttatttacaaaaataggctgtgggcagcatttagcctgtgttctgtagtttgcccatccctgctctataaaaagagtaggaaactatgccccagggccaaatccagcctgaagcctgtttttgtttggccacagagctaggaatggtttatgtgttttcaaagagttgttaaaggaggagagggaagaggagaggaaggaaaaggtagaagaggagaggaagggagagaaataggaagaggaagaagaggaagaaaaccttatgtggcccacaaagcgtaaaagttgaccatttggacctctatggaaaaagtctgttagatcttgctctgagagattgtttacttgtaacttccttgataatttcaacttacggatttgattttgtgctcattttctattttcctatgcttatagtcttcgtaatatgaagcaagtaagtttattagtcagataaaatacagaatttaaaattttggtaatgtattggctatcagaaaaaatactgattgctttctgtgtcactttattcttttgaaatttgagattttataagaaattttgaaaatgtatattattctcttgtcttgaaaatgtttttaagtgggaatataagaaacaaggatgtgttcctgcttaattctgtgcctgaactttggagtcttctgatctgtgtttgggacagagaatgctctagctatgctaaaaccttttcaataattgtaacgttgtttgatgttagcaaaaaacaaaaacaaaaatgaaaaaaaaaaaaaaaccctggctaacatttattcagtgcttaactatgtgaaaggcaccatgctaaatgcttttaacattattttctcactattctgggaggcatgtgtgattataaacctggttttaaggctgaagagatcaagacacagagaaattaagtattattatttgtccaggattaacagccagatagtggtagaaatggggtttaacctaggttttagaggagttccgccaagtagaggtcactttcaattttcctacaatgccctttaaagcaaatttttttttttttttttttttttttttttagacagggtcttgctctgttgcccaggttggaatgcagtagtgcaatctcagctcactgcagcctggacttcctgggctcaggtgatcctctcacctcagcctcctgagtacctgggactacaggtacacgccaccatgcccagctaattttttgtagagaccgcgtctccctgtgttgcctaggctcgtctcaaactcctaggctctagtgatccacctgtctcagcctcccagagtgttaggattacaggtgagagccacagcgcccagctgaactcatcatttattacttcgtcaatctcagtaaccttttgtaagtgatgccacaacggacaatgtatactgagtcattcagacatggtttctgctttctaaggatttattaatatttcaaaatgatgcttgatgcctagcaagtagaaaaatccagttgccttattagaacttaacaaaaatgaatgagttagaaaattagcagtcatgtattcctctgttctgtacagctaaatacaatttccaacttcttaatgaggggctgagagttctgtatgaagacttctacctcctttttctgtttttgttccaacaggataaaatcatgtgtttgacatgttgaacttgagaggcacatacttgccataataagtatacatggtttttcaagttcctaaaagtcctttcttcatttgtttgagtctatgtttcagatagatcctagggcataataatttaaaaatccaattaaaccataaaacaaaatgtccttactgtttttctgttgatttggtctctttttatttggcagcaaagtttcttcctgttgttatttctcatgtgactcccgtgaactggtgggtcctggaatccccacgtacagtgggttggaacccattctgcctgggagccccagtgtaggtggctgaggcagtgagtcaacagcactggaatttgcttgcttcagagtgataattctcatgcaaatagttctcagtttttcaaaagaagggcttgtcagcctcatactttcaaagtgactctgccaggaatttacagttttacgagattatacatagaatgttctgttataataatcaaatgttcattcagaaataacccaattaatgcagactgtacaacagatcgccaccatttgcaccaaaattccattcaaactacaattcccttctccactgtttctttggttctttcctcctcattcagcagcttgttttctgctgtctgatagttatgccaacattccatcttattttaacaactacacaaatataaaaaccacagcaccaaaattgaagttggagcttcattttgtactatttaagaactgtattgtcgtatgtaatttgcagtaaacttgaacacaaaatgaaatttaaaaaacctttctttttgcctgtaatgtttagaaatgatgttctctttgaactgtactggatttttttttttaagggtacactatcattctatgatgaaatatactgtaattcaactaattcaactgctttttctctgttttatctttcttggcttattgtcctcctggatataagatgatatagatggcaagcttatttcaggacagtttgttttttattctaagcaaatggtagtttttaaacaacaatggtcattttgatctttggagatcggtcttccattcttagagcattggaatgtagaagagatgtttatgccttgggattgccactcatccagagccactcctctgtgagaatacaatctttgatttgttgccctttatatttactttacttcttattgaacgatgtccactatacaatagcaagatataataaggtatagagacagagtttacagaaccttgccccattagcattttcaaattttgtcacatcagagttagtatactgctccaattttcagaagaacatagctcattggcagaaggtggaagtagtgttcttaacccttttacataaaaggctacttaaataagcaaacttaattcttccatcagcttttctattttcttaagtgcaaactgactttatttacccatggttagatacttttgacttacatatttcccaaaggcaaccaaaatggtataatagcgtagtgcaattttatgggagtctctttggcaccatagtaattctttttgatctacagttcacctctgggtatggtggctacgggtggtgcatcacaagcagagtcaaaggccatttttaatgctcttgggttttgtactgcatgggccattttttgaagtttagaaatatgaagatgcacatatttgttgctctggcccagtattgatatcataggccagatgggtttgagatagagagcacatacatatttaatgttcatttttattctttattgcctctagtggaaggactccaaagaggtcatctcatttaatcttggcaatagattttaccattttttaaatcaaatactccccattaagcactctatatttataattgtgtgttaggtgctatattcagagtgtactaaacagactttattcctggccttgacaatttgtctgcggatttggccaaatctgtgctgtatttcttttgaacaaaaataaaatgctccagaggaaaacagctcccaatctcctggatttaatgactctcgatggtgggaagccttccagtgcaatgataatagcagtccatgtttactgagtgttcaccatgggctcaacgtgatacggggagacttacaccatttttatcacctttgggggatatacaacaagtgtctattctctcacataaccgccctaggggatagtgtctattagcctcattttcaggggaaaaagccgaggctctgagaagaaaaggaacgtgccatacctcattcttaattttgttttcagtcccctgagttagctggtacactttatgacctgaaagcatgaatagaatctgttaccctggcaggaataataaaacacagagacatgacaatggattaataaagatctgatgaggagcaaaaacctcccaatcaccctaagaaatgctgctcccagggaagtagaaattatgttctgagtcccatatttccactttgcctgcctgttttattcttattagccaagaaggcgttaaaatatgcaatgattctgctcttgagaatgcctctatactgctgacttgtgagcttttaccctctaagaatatttttgctcccttgcctcattatctaacacctatttgatctgtataagtcacttatcaacccaccagactcatgtattctagtcacttaggaatatgcttgcttttttcctgtgcacaagatgtatctctctattttgtttctgtcatctgcagatttagtgacttggggcagcatggactgtcacagaggggttttcttgtttgatccattcttctacttttctgcttttatatgatctatataatttaaagttattggaattccagctcccttttatttttagtttaatcctgatttttatttttaatttaattagctctaatttttttaaaaagacatttttaacattgttgctttgctggataattcagagatgctgtgtgtgtgtgtgtgtgtgtgtgtgtgtgtgtgtgtgtgtgtgtgtgtttctagtattgccccatgacctttatgactcatttaatgaggaatttaaacaaattactattactcctactgcattcattatcaactagcaggcatcagctttctgcataaaatattttttttctttgaataccctctatttcccctctgtgaggaatttattctccccttggtgcatggggacagattatgttcataatagccattaatgataataggaagagtgtgtaaatctttgaagcattgaaaactgaatggcgctctggtgggtctttttctgtgtcttaccttactagattttgttttgcagcaggtgctattggttgggtaaagtgccgttcctcatgtttttctctttattctatacacgtagtgtgtgtgtgtatatatatatatgtgtgtgtgtgtgtgtatatatgtgtgtatatatgtgtatatgtgtgtatatatgtgtatatatatgtgtgtatatatgtgtatatatgtatatgtgtatatatgtatatatgtgtatatatgtatgtgtatatgtatgtgtatatatgtatatgtgtatatatgtgtatatgtgtatatatgtatatatgtatatatgtatatgtgtatatatgtatatgtgtatatgtgtatatatgtatatatgtgtatatatgtatatatgtatatatgtatatgtgtatatgtgtatatatgtatatatatgtatatgtatatatgtatatatgtatatgtatatatatgtatatatatacacacacacacactcagaacatggttcttctcacactggaagaggattactctttatttgttggtgtctccatgagggcaggagctgattcgattcattttcctctccatgtttagtactgcacacaatgcaccattcatgctggatagatattcctacctagaggaatgaaagggtacattcacttcctgaacatgaaagcagagtggctgctaatcctgcctggggcaatattcttatgctaaaatgcatattgtaggagttattgcataaatatttgttcttatttataactcatgggaaatagtttagagaaatgaaaagaatacagaacttgaaattagaagatttggccctcatcctgctaattattgactatgtatgagttttaggaaattttttaaaaagtctctagcttcagttttctcatctattacatagagataatagtttctaactcagaggattgttgtgagaatcaagtgaaagcccatattcactctgattcaacaaacatttacagagtagtcactcagtgttaggccctggggtaagttctgagaataaataagatgccactcctggcctggtgccatggttcacacctgtaatccccagcactttgggaggcctaggtgggaggatcacttacggccaagagttcaagaccagcctgggcatcatagcaagatcctgtttttaccaaacaaacaaagcagacatggcggcttgtgcctatgattccagctacttgggaggctgaggcaggaggatcacttgagcccaggagtttgaggctgcaaaattgcaccactgcactccagcctgggtgacagaacaagaccccatctcttaaaaatattcagaactaacaaaccaaatgccacttctctcttcccaaaactcagacactgagagaggttctcgtcaaagtccaaaatgcacattaagttgtggggatcttattaacaatgatgattctgatgctgtaggtttgaagacgactcaagattccctggagacatcaatgctgctggtccatgggccacggcttggatagaaagggtttagggagaggttgacaagtaataatgcagggtgggtgagtactgctctactggcattctaaaagcagagtgagacagagaggggtatggggagtggggaggaggcaggcaaagcctcctagaagtgagtgacttgggccctgaataggtgagtcaatttaccaagcagaaaagtaggaaaggcctttggtcagagggagcaccatggatgtggaccccggctggctcctgcatagagtgaagaatgcagaggaaggtgatgggacgatggccagagaggaggctggaaagctcaccagggtctggatggtgaagggtcagctctgtttgccatggtaagacctaagactccagtcagcagggagtcttgaggtttcatagaggtctggttatagtggacatgacaaactgctttgaaaatagccaatactacatcatgttagagaatttgcataacccagcagggcgcggtggctcacgcctgtaatcctagcactttgggaggccgaggtgggcggatcatgaggtcaggagatagagaccatcctggctaacacggtgaaaccgtctctactaaaaatacaaaaagaaattagccgggcgtgggggcgggcacctgtagttccagctacacgggaggctgaggtaggagaatggcgtgaacccgggaggcggggcttgcagtgagccgagatcgcgccactgcactccagcctgggcgacagagggagacgccgtctcaaaaaaagaaaaaaaaaaaaaaaaaaaagagaatttgcataacccaaaggagattgtgcttgaacactcccaggcagtgaataatctgcaaaggagtaagactgtagttgagaggcaggtttttagacttccacaggcttgggagacaaacagaacagaaattgatttctggttccctgctttctagctatataacctcaagaaaattaattaactttctgaatcttagttttctcacctgtagaaaggatgcaataaatcctgtctcatcaaagaattgtgaagaggaagtcattcatttaattcattgaagcactacattttggcaaagcatgcagtttgttgataacaggaggtatttgttaacttattattaatgttgatttggagctcccatgaatttttgcctaggaaatgacctggtagatcggatagttaccatgttgatagattgccaagtgccttttctcatgtgtggggttctgatgccatcatcagctggaagctcagttggtcttgtgggtggcatgctgcaccagttgtctgattcagcaatgctgtgagagaattgagagggcgttcattcagtaaagggtgggaaggattttcttaaatgtttaaaaataaaaaaagacaaataaatgttttctctttagaggagggaaaatgggggactgccgtagtactccccaaggatttaattcaataaaacacattattaataatatagttgagaagattttcctgacataaccacatgtaggttaggtggccttctctgtgctacagcatgcagtggccatttgcagcctggcactcctcacatttaatataatccgtacttttcacccgttcttctagatttgagcttcttgaggcagacagttgtctttttatctttggtttcccactgcctggagcagaggcacatcgttggctttcactaaatgcttttatctacacacttattctctgagctatgttatccttggtagaaaggaatggcactggaggaagtggggcttacggagctccgcgtcatcactctggggatctgcagtgtccttgttaattagtcaattctgactctgtgccctactttggatattatttttgagatcgaagtgcccctctttaaccctgtctgcctccgcatcatgcttcctgttcattaggtcagtcacatgagaataaacactttgtctcctctgatcaactcccatcctttgacactagccgctgcctctgaatcccagcctaaagaatggagcctgtgggcctctcccatgtctgctgaatgtggcctttgggtgaggacatctctacctgtccctggaggagaggcactgagtcctcccttggcctcaaaactggtatcttccctgactcttggcggtcagtgagacttccgccagctgtctgctgttgtctccttggatgttgcctttggtctgatagactgggcttatttcagtgcctgcaacagaacctgtctctcagcacctctccatcggggaggctctagcccctcctactctgctttgttcatttaaacttgaatgggccaagaccaaaggcgtgatttcatgaaatgaacaagaatttcatagaatggaattttctaacgatattcatcatttccagtaaggattttaaaaaggtcagctttacttaaatatatgcaaacagagtggtatttaaagattggaaagcattatttaagaaaatgatagatttcccttcctaaaatagggtatcctgcctggtgctggggagagagtaggcaggtcaagggcttctcctctctatagcatttctgcttcccaaagtcattgtcagatatccctgattttattttatacgccagcatacaacttaggccaaaacttgtgtcagaactgctttaatgaatatatttgtagtggccttttaaaaatgatatcatcatcgtgtcatctggtaagcagaggaagtaagtgactttgaagcaagttctattggtgaaaaaatatttcatcattatgagagaacattgaatgatgaaaaataaagaagcgcattatacagttgagaggtaacttccaattatgtgttgtcaaaatgtcctattgaactttgctggagatggtggagaaagggtaattaacacctaatatttatttagtaactgctatattataggcattgcatgtatgttatctcattcaatctttataaccttatctgttccctaccgcgaggcaggaattattcctatttttcatgtaatgaattggaggttaggtgacctgtccaaggccccacagctcatctacaaagtctgttactattctacactctgtgagactagtgtaatattttaatattcacagtagtaccttgattaactgaacggtgtgatagtgtgttggtctgctcttgcattacattaagaaatgcctaaggctgggtagtttatgaagagaggtttaattggctcattgttctgcaggccgtacggaaagcatggtgccagcatctgctcagcttctggtgagggcctcaggaagcttccaatcatggcagaagacaaagggggagcaggtgtgtcatggccagagcaggaatgagagagcaaagggggagctccaagactcttaaacaaccacatcttgcataaactaactgggcaagaactcactcatcatcaaggggttggggctgagccgttcatgagggcttccaagcacgctgaggagcaacacctgtcagagagattactatgactaatagggtatcaagtgttactatccgacacctcccatgaggcctcatctccaacactggggatcacatctcaacatgagatatgcaggggtcagatatccaaacaatatctttctgcatgtggcccccacagatctcatgtccttctcacgttgtaaaacacaatcatccttttttagtagtagatctgccaccgtatctactgcaggtgggactagagggcggcagcccccttgccacagctccactaggtagtgccctggtggggactgtgtactggggttccaaccccacattttccctccacactgccctagtagaggctgtgcagcaggctctgtctggacgctcaggctttcccatacatcctctgaaatccgtgtggaagccaccaagcccccttcgctcttgcattccataggcctacaggcttaacaccacatggcggccaccaaggctgatggctcgccccgtctaaagtggtgtcctgagccagaatgtggggagcagtatcctaaggctgatcagggtggtggggccctgggcctggcccctgaaactgctttctccttctaggcttctgggtttgtgatgggagtggctgcctcaaagatttctgaaatgctttctaggcctttttcttgttgtcttggatagtaacacttggcacccttttagtcatagtaatctctctagcaggtggttgctccttagtgtgcttggaatccttctcgaccacagggccaggctgcaagttttccagacttttatgctctgctcctattatttatttattatttatttagggacaggatcttgccctgtcactcaggctggactgcagtggtgtgatcatggctcactgcagcttcaatcttctgggctcaagagatcctccagcctcagcctcttgagtagctgggactacagggatgtgccatcatggctggctgatttttatttttttgtagagatggagtgtcactatgttgccaggtctagtcccaaactcctgggttcaaacaatcttcccacctcagcttcccaaattgctgggtttatagcatgagccaccatgtccagtcactgctttctctttaaatataaattccaatttgaagtcatttctttggtcccgttatctgattataagctgttagaagccactaggccacttcttgaatgtcttactgcttagaaatttcttctgccagataccctaggtcatcactctgaagtgcaaacttccacacatccctagggcataaacacagtacagccaagttcttcgccagggtgtaacaggggtgaccattactctagttcccaataacttccttatttccatctgagatctcagtctggacttcactttccatatttctatcagcgttttggtcacaaccatttaaccagtctctaagaagttccaaactttccctcatcttcctgtcttcttctttgacctccaaactcctccaacctctggccattaccaagttccaaagctgctttcacattttcagcaccccactccttagtgccaattttctgtgttagtctgttcttgtatggctataaagaaatacctgcagctggatcattaataaagacgttttattgactcacggttctgctggctgtacaggaaacatggcgctgacatctgctcagcttctggtgtgggcttcaggaagctcctaatcttggtggaaggcaaagggggagcaggtgtgtcacatggcaagagtgggagtgagagagtgaagggggaggtcccagactcttttaaacaaccagatctcatgtgaactaattgagtgagaactcacttaccaccaaggggatggtactaagccattcatgagagacctgcccccatgatccagtacttcccactaggtcccacctgcaacatcttcaacatgagatttggaggggacagatatccaaaccatatcatgtatggatggaatgtccttattaattgaaatttcttgttgaaggccatgaaaatatttatcagttttgttaaaaatctttcaaaattatgttggcttcttttgctatctttataaacgtgttatatgctatgtataatttaatacttaaatttttgttactaaatatcttgccttcacttatgtttattattgtgaacaccagtttcaataaactgatgcttaataagctcactaaagtttagtgctaagttagcctcagccattcattttacagatgaggaaatagtgacccagagaaattgagagactttgctcagagtcaccgtgtttgttgttagaggcacagtgtgtgtgtgattacagaactttcatctgaatgctataatatgtgcctaaaagaaagcgctatcgcatgagttctggtagcaccttattttctttcttaatttcacagcagaatgcaaaaaaaaaaaaaaaagggcggggagagctctgtttttcaaagttttactgtattcagaagccacctttcacttatttgattctgcccaatatgtcagacagacaaggatgagaatacaaagggattggagcacctctgggtcctgattctaattgaatttaacatagtcatatttgtcagtttccgagtaggagtgaagtagctgatgctgtattgtaatattgttagaattttgaaggagccaaaagcttacttggccttgttcgtaatcttttatttttgataatggagcaagagtatttatttgcaccacatctggacttgacttctggctagaaaagaaaattttttctgaagagttcctcccacttctaagaccccagatccacaacacattgcatttagcctatcaagcattgtactgttgtatgagggatgcaaaggttcatatgccatgctgtcaaaaatttacaacctttagtacttgactaagtagaggttaaactttaatgaaaactttactataacaatggaggcatattcaaggtgttcagggaaaaggacagatctacccaagggcagtagatggggatgtgaatggctggggggacacacgcctattggagaagacagtcagaaagttgtcagtagttgaatcagcttgttgaaagttcagtgggtggggaggagggggaagacaacaacatttgaaaacacggagatgtgaaaaagtctggtctgtttgggcattgattctggtgtgatgtgactgtagaagtatgcagggatgcaggcgaaacaactagaaggaaaaattgggatcagataatgaaacatcttgaattccatgctcaactgttcagaacattctgtaggaaactgggggttgttaaagtgtctgacttgcatttatgggatgatatgtcctgacatgcattttaataaaacaatgattttgatttagtaagaaaattattcctctttagcgattaaagagtatattaaagaggcaaaagaatgaggaaaggagaccttttagaagacaaatgatgaagacttttacttgtggtatggcagaaaaaatggagactggtagataactttgagatctacatctgtatagaagctgccagattaagtgattgattataggaagtacaggagagggagaagtcaaagtagattgcttaatccagagtcataggacaagtaatggtgttattggtagctgagaaaacacaaggagagttaaaaagaaagttatagaatgaaatccaaggagcaactttgaaaggtagatgagcctttcataaggtataacaagccacctcaaaatttcatagcttaaaacgacaaccatatattaattaagcttgtgagctgatgggttggtggggtggttcatcaggtctgggctggcttaggttagtctgacctttttttcactgattgtctgccatcggcagggaaattggcaggtggctggctggtttaggatggcctcagctggaatgatgttccactatctgtttctgttcatccagcaggctaggtaaagtttgttttcatgacagtgggtcaggattccaacgtgcacctggccttttttatttattttattattttttgagacaaggtcttgctctgtcacccaggctgtagcgcagtggcgcaatcatagttcactgcagcctcacactgctgggctcaagtgccacctcagcttcctgagtagctgggactacaggcacagaccaccatgctggctaattaaaaaaaatatttttttttgtagagatgaagtctcactatgttgctcaggctggtcttgaactcctgagctcaagggatcctcatatcttcgcctccccaagtattgtgataagaggtgtgagcctgcatgcctggccgtgcctgaagttttgaaatccagtctcaagactgacatagtgtcacttccactgcattttctctggccaaaggaagtttcaaagcctgtccaaattcatggggtgaagctgcaaatttacattccagggagttgggtataggaaaggttgaagaatggggtttttgctgtaattagtctaccacagtgattcataattattagatgattatcaaaataatttctaaattgtattccattaattgtatttctgtgctttcccatgaagactaaaatgaatgattttctaatattagcttaaatgtattgacatatttcaattttctcattttgtgggatattattctggttgctctttgcagggttcctgatgctttacatttttaagtttaacttcatttaaaagcattaataaagtttttttctcttttattcagaattacctccagaataagtgtacaacaaatcctgcaagtaaggtatcccaaagcatcatcctcattcttggtcaccacctccagaataagtatacaacaaatcctgcaagtaaggtatcccaaagcatcatcctcattcttggtcaccacctccaaaaaggcacccattaaattaaaaaaactggctaaatatgtaactgtgccttcattgtctttgggtggagaccttcacttcagaagcttcatgggctgttttttcactgttgctggtgcattgcaagatgttgcccttggcaaggtgtgcttggtccctacagttcttctctatcattcttattaatgatgttttgctagtcccatgcagagcctttgaatatcattccaagaaaggaccacccacagtgaaaatattacgcctatccagtggtcttgaatgtgtcccttatgaagtggaatctttatgtaaaatagacacttgggaagcaattattattaattacggaccctttcatcacagcctttgatcccttgcatgcaccagtactcactcctgctgttcatgacagtgacagtgtgtcactgtcactgtccaacaatggtttatgtgccattaagaacaaagagactttttgaaaaatagtcagtttaccaattgctgtcacaatcatagtctttgaatatggttgtgtgtgttcttctcagttaatagattctccttatattaatgctgacccctgcctctgttacaggcttcaagggtatgtgtttaaactgacctgttgatactggggttagattatccatgtatgcaatttattttgaaccttgtgaatgagataatcacatacaatttctgatccatgaagggaatgctatctggcacagagggtgctgatttgttagattttatgttctcatgattattttctgatgtttgaaataattaccattgtttaataaaaaagaataggccagcagtatatagctaattcactcataattaaggaagttagccaagatattctgagtcattattcagtcgaaacttttagatacagagggctattaatatgttagtaactgaaaacctaaaaatataaaaatattacttttgtccctgttttaagcacattctttcagatgtcgaaacttgactttgaagaattgagtgagggataggcaggggtgaaaaagaagatgccagaaataaaaactaattttttccttagaaaaaaattaagtatctgaataagtggagagagatactgtgtccttgcatggaagtcgtcaatattgttaaaatcaattcttctctagtggatttatagattcaatgcattcccaatcagacttcagctggactttttgtagaggttgacaagatgactcagaaacttaaaagggaaggcagtggagctaggatagtaaaagcagttttgaaaaagaaggacaaagttggaaaaccatactacctgatttcaaaattgctatgttttgcatgtgttctccaaaagttcatgtgttggaaatttaatccccaatgcaacagtgttgggaggtggggccaaataaaaggtaattgggtcaggagagtagagccctcaggaatggattaatgccattaccacaggagtgggttagttaactcaagagtgggttgttataaagtgaatctggtccctggtgctttgccctgtctcactcacttctgccacccaccagtcccccatgggatgatgcttatcagatgccagcaccatgctcttggacttgccagcctccagagccatgagctgaataggcacctgttctctataaattacccactctgtggcattctgctagagcaacagaaaatggactaagacaaagatttatggactgttgcattaatcagggtcagttgctattagcaaaagaatagacaaaggatagatcaatggaacagactagaaagcacagaactagccccatacatataaaagagagcaaatgacaacatgtgggtaaaaggtcagtgaatctgggtaaatgttatttagaaattctttatactattctgattcttgcaaactttctgtatttcacaatttttctgatttaaaaaaatacaactttcctagtagaaaaacctaacatactctttaaaagcattcaagactgaaataattaaattttggaatgtttctcttaattaggcacatgctttttcagaatgtaaagcccattgttaacttaataataagcgtatgtaaactgaatttctcttattcataaagccaaaataaatggattcaggtctagttaatagctttataattgtgactggaaatgcacatgtctgcattacctcttatgtttattcaaaacaatttaaaaagtggaatggaactactttcatggtaaaaaatggaatgacatcatgaattcaaaggtattatgattgtgcactaatacagtattggtgggggagggttggtgaatagtcttatcactccaatatacaaattaaaaccataaagcaaaacacagtttttctgatggaaaatgtgtatacagatatttaaaagtcaagttcattgaggtattatttacttgcagtaaatttaatcctgtttataatagttgagttttgacaagcacgtacaaatgtgtaacccccaccacaaccaagatataacatggatccatcactcccagacagttccctcaagtcctttctagtcaacccttccacctgctctgacaatcagtgacctgttttctgtgcctatagttttcccttttccagaaagccatataaatggaatcatgcaatatgtaacttttttattaaaaagagctttcttgagataaaatttatgtatcatacaatttcccctttaaaatatataattcaatggtttttggtatattcacaaaatcatgcagtttttttcacaatttgagaacattttcatcacttcagaaagaaactcaacacccatttattggcattctcatttccccattttctcccaacctcccagcctcaggaagccactaatctactttctgtgtctaatgtagccttatgagtctggcctcttttactcaggatgatgcatttgagattcatccatgttgttgtgtatgacattattttgtttccttttattgctgagtagtataccattgcatggctatatcacatttttggtatcatatgtgtcagttgaaggacatttgttctattttcttttcagtttatagtgattatgaataaagctaccataaacattttgtttgaaagattcgggtgaacttaagttttcatttctcctgggtaaatgactaggattaagactgctgggttatatggtctatgtatgctgaactttataacccaaactgtgttccaaagtggctgtaccattttttgtttctaccagcagtatatgacaattgtagttgcttgacatccttgccaacattttgtatagtctgtctttttaattttagctattcttatctatgtataatggtatttcattgtggtttttgtgttgtatctaggaaatcgttatttcactcagggtcacaaagatttctagcatacttttttctagcagtttaattgctttagattttacatattggtctattttctgtatatgctagaagtcaaggttgttttttgtctgttttgttttctttgcatatggatgtacgattgttccaacattatttgttgtaaaaactgtcctttcaccatagaactgcctttgcactttcgttgaaaatcagttgaacatatatgtgatttcaattttttttttcctgatggtcagtgaacattatttcatatgcctgtttgccatccatccatcttctttgatgaagcatctcttcaaaatcttttgatcattttgtaatagggttgttttaatatgattaagttctgagagttccttaaatatcctggatatgttacttgataagacatgccttttgcaaatattttctcagtctgtaacttgttttttcatctttttctgaacagtgtctttcaaagagcagaagttttgattttgatcaagtctaagttatcaatatttacctttgtggattatgcttttgatgcttccagagtggctcctgcatttccatgacacaatcccatctttttattcaagtacttcctcattttctagaacaacaaggtgttccaggcctcactttacactttccctgccttaccctggaatcagccatttctatggacaaaccccggtttcttttactgaggcatggtattaaggagggagaattttgaaaaactttttctatctcttttctgccttaacatgcaccatagacttatgagtcattctgcattatgattttggacatgagtttgattctgaaggtaggtaatatgatttttttttaaaccaagaaataataagggaaaaagctcatcatcagtaactctgagttgtttgaagacagatctccatgtgtcccatgcctagtctacggcagctgctgaccatcgggagttatgttgttgcccaaatagtgagactacaacagaaaaggtcactagtcttttccacattttacagacatccaggtggttctttaatttgaattagaatctattgtttttaaaagattttctttcaccttgccagagtaacaacaaccataaggggacacagtctctgattcctaaatttgcctttggggaggaatgtctgctttgaattcccaatgcatattctattattaaatctttggaaggaggtaatttcccaggtattacctgggaaatattatgttttcataatattctgtttaacttagttttattacatatatgtattcttttggaagcagtcctttataatactttgtgaacatctcctagtctttcttatcttgccatggtaattattttgtctttgacgtagaacaatgtggtcccactgagttttacgacctttaaattttgttgattttccagggagtgggataaggtacataaatccattgtgttcctaaaagaaagtgacttaagtttgcatctaaggtataacattacctaacattcttcactttggggcatttcagctccacttaacttactgattctgatcatttaaatacataatatatatcagaataacacttcattccttacaatattatgaaaattattataaggaaaatcattccttacaatatgaaaaaaaggaataaattttttaaagagcttggaaacattaagtatggtctttgatttgtaaaaagtgtatgatttaaaattggctgagcccttctgtctgaggtttagcagcatgcagcacagaatcctcaattctcaggagctggtccagatcagatttgctgcaatatctcactgttttgcaaaatgttcagaatatagtgtctgcattctaatttagttaatttgagaataataatcatgaatttaagaccagttccttggaaagactcactacacagaaaattacctggctgcagaccacaaccctgatctcagccaacaacatagtaaatcttgttactggtggattaaaaggttcagcaaattgattttgatttctttctgtgacaaagccccttgctaggtattggggatacaagatgaatggagcaatgagtgggtgaaatagacataaggaagcaggcaaccagagatgaggcaatgtgttggaaaccactgaatgggctgtaactctatcttgggagaaaggtaaaaagggcttgggatttttttccccataaaataagtaaataaattaaaattagaactagtaaaatttagccagggcactggaatggggagagtgaaatgtggaaggaaaggagcagcaggagctaaagtttgcaggtgggaaatagaatttgtggaggaaaattctgagaggcttcatgctgttagggcagaaaattggaggcagggggtggttattagcgaaaccagcatactaggaagaggcagaggcagagtctgaaaggacttataagccatattaaggatctttagtcttcaaagcaatgggaatttgctgaagggtgctaagcaggagagtgatagtgtcagatttgcaatttaggtgcagcacgggatttgagagtgacatgactggaagcagagaaatttggtaggagtcctttgtggcagtaaaaaagcagtggacaaagacatggaatagagaaatagaggttgggatgcaaagaggacaaaataaaatagacaatacttggtggttgattggctgccataagtgaggaatagagatggggtggagtcaagggtgaccctgattgctggctctcgtgtctgggtctctggctgtatctgaatgggaaggtacagattagtgcagttgtaaaacccagctggagggttgtaaaacccagatggctggtttatcctaaagtttctgattcactaggtcaggtggacccaagaatttgcatttctaacaagatctcaagtgatgcagataccaaaacttgagaacaactggattattggttctcaaattaaaatgtctatcggaatctgctagagtgtttatttaagaaagtagattctcatgccctaaaactaattgagttccaatttgtaggcattgcccaggaatctacatttttataaaggatcagaagtggtttgtaatgctgatgagaacataggccacattttaagcaacatttagattaagggtcggtctatggcgtgagttaggtgtgtattactagctaggtcatctggccccaaatttcttatatctaatctcatcatgagatttcatagtctaatagctattatttattgggggcttaccatgggctaggcattctctaatcattttacaatatgcaattttatttaaagcttgccaaactttacaaaagagatagagttgccccttcatatccataggttccacatctgtggattcaaacaatcttggatagaaaatattagggaaaagaaaaacaataaaatataacaatacaacaataaaaataatacagttttaatttaattaattcatttgtttgtttgcagagaagcagcctcactatgttgatagggcagatctcaaactcctggcctcaagtgatcttcctgtctcagccttccaaagtgttgggattacaggtgtgagccaccttgcccagcctaaaaatactacaaatttttaaaatacagtataataactatttaggtagcatttacattatattacatattataagtaatgtagatatgatttaaagtatacaagaggatgtatgtagggtatattcaaatagtatgccatttcatatcaaggacttcaacatccccagattttggtatctgcaaggatcctgtaaccaatcccccatggatggggagggatgactgtactactattattatttccgttgtcaaggtgatgaaactgagagaggttagtaatttgcccaagatcccagagctagtaagtgggttcttatttatctgtgattgccttcagtggcttcagagccacttactgtctgtgtggtggacagcattcaagggtgtaaaagtgatgcattttaggaatggacacaatatggtatggctggagggaggtggtgagagagccaataccaactaggattccttccctctgcacttgttctgttagatttctgaccacttacccttagtcacttttttttttttttttttttttgagacggagtctcgctctgtcacccaggctggagtgcagtggtgtgatctcggctcactgcaagctccacctcctgggttcacaccattctcctgcctcggcctcccgagtagctgggactacaggcgcccgtccccacgcccagctaatttctttttgtatttttagtagagacaggggtttcaccatgttagccaggatggtctcgatctcctgacctcgtgatctgcctgcctcagcctcccaaagtgctgggattacaggtgtgagccactgtgcccggcccccttggtcactttttattcctttttagtaatcttggtttgaaaattaagttggatgtttgcctatttgtagtaagtttggtgttatttattaaataacctttatataattaattcaatgaacaatgcaaaattagccatgaaagaatacttgaaactttttgtactgtaacagtttttgccatccagttcattccttaggacttttcccattgatagttctattttagtatgtctacttttaccagattcttgtaggtttctttgtccttcgcatgtgaattattaatgtttcttactttataaggaaagaatcattcccattcaatgtagtctgagagggtttctgttcatttaagttgcattacttttgttggcaatgattatctcgttgtcatcacctactgaggagaacaagtgtactctcaggattgccacttggagctccttgggttaagggagagcttagtgaagacaagtggtagttctgtatcattgggaggctatcttctattcattagccttttgatttttgttccccactttcagatattctcagttcatatctgttgcctgcaaatagctgaaatagcattgtacgagctagaaaggtgtcaaatgagctaatttcctgctcatgaattcagagaagtttctagaactgcaaaaaattatatagcggcaaaatgtactagccaaagatgactgcaaaacaaattcttcctcagtgaacgagcccagacaattttctttcaaattgtacttgttatcaatttccccctctttttgccaaaagagaggtaatatcttcattccattctttaagtttttagacaaaatgaatattattttccttcattttcttctactcttcaatgataatagctaaatagcctagttccaactggaaattatacctctcttgcccattgaaataaaagtctatgatagttttccaactagtcgaaatataaaagaaaggacacagcagaattgctaaagaagctgtaggtaaactgttttcataatcgcaagactttttaggaatctttttggacattttccagatgtgtctgagacatgtcatcaagatactgctttgtctgctttacacaaattggcattatgcaattttataactgaacaggaccagttaacacctttattttaggctacagtcgtagattcctgagacctgaggagcttgtgacttggcatagttatgtcatagtaaagctgggactgaaattcacatctcttgactcccaatccagcactatttgtacttataatttcttgtagatactcttttctctgagctgaggagtttggtaaaaatttttgtctgcggggggccagatccattagtcttatgcagggaaaatgaatggcaggtcaaaagtaaggactatgacgaagtaaaagaaacttcagaaagatacttctcagaaaaccccagggaacgtccttcatgcactaataaacggctgttaattgggtgcttattatgtgccagcaccatgacagatggtgggataaaaagttggagagtcacatgtgttccctgcaaaaaccaaacacaaagaatgttggtggaaggttctaggtttgagaaaacagattctggactaaggtctgcaaactagtgggcaagaactggcatgctttcctttgctagacagtaaattcctccaaaataggaaagagtgaatggctaaggaaaatgtgatatatacatacagtggaatatttttcagccttaaaaagaaataaaattctgataagtgcttcaacatggatgcaccttgaaaacattaaatgaaataaaccagacactgaaggacaaatatcatatggtttcatttatatggggtccctagaataggtaaattcatagagacagaaaggagaatggtgcttaccaggggctggaggaagaggggaacttggagttcatgtttaactggtacagagtttccatttgggaagatgaaaaagttctggaaatggatagtggtgatggttgtacaccatcgtggacatacttaatgccactaaaatttatacttaaaatggtttaaatggtaaattttatgttacgtatattttgccacatacacacaaaaacttggagacacgtcctgttcatcattatgacccatgcgacttagcacataacgggctcgacaagtatttgttgaactctgaattgaaccaagtgccagaggacaaggaactgaagagaaagttgattaaatcatgttgggggttgcagagaattggggatttcagcttactcaggcagggtggattcccacaatggcaaaaagattctcccagaggtttggcatcctgacagtggagtggcttgttaaacagtcttacaaagtcagggctggagccttcttagatggtctgggctggtggcaggtgcagaagaggcacagtggagcgatgagccaaatgggaaagacattctatggtgtgtgtgtctgtgtgtgcatctgtgcttatattgtcattgtaacttgaatatttcattattactaaatggtgaagctggcattgtgctacctgaaacaacagtgagcgtgtggccacatttccaacgtttattagtttgggtaatttctgtcactagttcattctttcatttcttccacaatttttttccacagctcaatacattttaactatgcaaacacacacataactattattcaggtgaagatacagaatattgtcagcatcccaggagtctccctaatccttccttctgttcagcctccctcacatgcctttggtaacctgtcccatgcatttttattttattattattattattattattattattattattatatttttgagatagagtctctatctgttgcccaggctggagtgcagtggcatgatctcggctcactgcaagctctgcctcccgggttcacgccattctcctgcctcagcctcccgagtagctggggctacaggtgcctgccaccatgcctggctaattttttttgtatttttagtagagacggggtttcactgtgttagccaggatggtctcgatctcctgatctcgtgatccacccacctcggcctcccaaagtgctgggattacaggcgtgagccactgcacccagccaacctgtcccatgcattttaaatgagattctgctacgtgtcaggcaatgttctaggcattggatcagacacaaaaataaatacggtgatccctgctctgtagcatatcatagctcagagatggaatagacacatagaaaaagaaagggctaaatactccaacagatgtgtgtttaaggtcagtgagagtgaatagagacaatcctcatgagctggagtaattagtaaagtctgtgcactggactttagttgggtcctgaaggataataagatttacagaagcagagttagaggatgaggcctgcaggtagggagtgaaggctaatggcaagaacaatccctgcaccaggttatggagggtgcctggctgcatcatcaatgacataatgtcgcacagctaggggagggcctgtggagagctttgaacactaggatggggcagtatgtctgcagaattgagttttgcttatttttttgcctgaattttttcataaagagcaaacatggaaaaatggacttcattggtgttcaaactatgtctttaaagcaacccaaaccaagctcttctcctttggggtgtccatgagatccatttactcagtagtggcccagctggagtggagagatggaggatgttttcaggagcaatactgggcttcccagaggtggcttatgttcccatgctgtgtactctgatggttatcattaacaaaacactggctacatttctggagaaataaacctttactaatcttgtcaggcttacttctcttgtatagaaagtatatgtctagtataattgtttcttggtgacagtgtacttgttaagtattaactattcttgtttcattttaaacttctcttcaacactgaaatgtacattttatagttttctctctgttaacgtgttctaaatgtttgagagaaaaaatgtttctaaatgcatttgtttttgctctttggtaaactgttctttatccaagttaataaagaaagaggtattcccaatttagctaaacagaggtttggcaacttaaaatactttgaaaggagtgtgtttctattattttctcactaaaatagttgtttcaactcttagggaagtattgtccaatggaagcctattttacagaagcataagactattttataattataatattaattgttagccccccaaaacttacacagtgggttaaatacttgttatggtaagcagattacagatattcctaatattccatcagaaaatcctttctgctatgttagaggagagataaatttccccttctcttgtcaaattagcatacatttcatggcacaaattactgtagaaatacagtagtatatctagtaatatacatattgtgtcccgaggtggataagattcttaaaagcaggtaaaaatacataatgtttctgtaaacaactttctaacaagacttaaaattagcaattttttcttatatcatttctggtcaatttaaattaagactcctaactaatacataaataattagaagactctaatatggtattttttcgtgagtatcctactttactgcctagtttgaaccataaaatatattatcatgaaaattgtggctctttatatagctttatattctatttcaactgcttttatgaccttgaaacttggcaggagtttcacccctccacccttacccttcagttccaaagaatttataggctatcttaacactgtgggtttttaaaaaatctgaatcatgatttagctttctttttattaacagagaatctatataacatgaattttctctcagtttttacttatcatccgtgtgaaactcttttaagaactaagtctgtttgggtttcatgatatgccatattctataaaagtgtattacatgcagttttaatggcagagcacaaaactgaattgatgaaagctttctattataggtaaacttttaataggcagtctgaaccaaaggggcaacttaattaatcctctaaatatttaatactgacttctctatttctaatgtcatcttgaagagcagtctgggtttgtggaaatcattcttaaaggattgctcatttatgagcatccagacagacaaacacacattttaattgaatctgcacctgcttggtaagagatactgacctcacctatgccttacgctgattaattgagttcattttccccagtggcacctgtgtttattctcccagtcacgtgcatgtgcagcatattgttcaggaaaatactgatttgctgaatagccagtatccagaggacttgaaagaatgagctgggttgcagtggtaaaatgaggtgaagggcccaatcgtccacttatcgtcaaaagctgttcaagtactaatcagctccaggaccagagatcactggtgatttggttcattggatgaaagaggctttgaagagttccatttcctgctcatatggttatttcattttataagcatgttgctttttttttttaaaataaaatctgcaagtcacatgatagagaaaagactagctgtgcaagaaaacacttggcagataatatgaaaccatatgttcctgcttttcgaaatgcaaaagaaaaagaactaaaaggctaaggtaatgccatgctgttaactggggccaaggactgtatttgtcataagcccagcttctattttttaattgaaagggccgattaggggtgggaaaactatggcctgtgagtccctctgtgtttataaataaagcattactgaaacacagccatgcacattcatttctgtattgtctatggttgctttcatgccacaatggtaaagttgagtaattgcaatggaatccatatggcccgcgaagcctaaaatatttactcttaccctaaaaagtttgccatctggagtagatgaataactccatggtagatgaataaatcacattttatattaagatattttagtgtaaattgcaggtatccttacattttacttctaatttctttattgaatatctcaaaaataatgttgctgtataaccaaattgaaatcgttatacttaataaagtaatagtttttccttaatgaaatttgatatcaagtcatataaaaatttcaattgcctccaaaatattatttacaactggtttctccaagtcaggatctaattcaggattattccttgcatttggtgtctgtgtcaccaaagtctcctttaatcaagatatgtacctttcgtcatgacactgactcctgaaaaggccatgccatttgtcccatagaatatgtctgaaatatatttgattgcttttgagtggtgtcatctagtatgttgctctctgacccggatttacttaaactggaagttagatctcaattgaattcaggttaaacatggttggcaagaaatcgtgcaaagggatcctaaaatctgcatcagatctgaagatttgtgtcactattagtgacactaaatttgaccattagcttagtcaacaaattattttaaagataagaaaaatgggctgggcgtggtggctcacgtctgtaatctcagcactttgggatgccaaggtgggtagatcacctgaggtcaggagttcgagaccagcctgcccaacatggtgaaaccccgtctctactaaaaatacaaaaattagccagctgtggtggtgtgcacctgttgtcccatctacttgggggctgaggcaggagaatcgcttgaacctgggaggcggaggttgcagtgagctgagatcccgccactgcactccagcctgggcgacagagtaagactccgtctcaaaaaaaaaaaaaaaagaaagaaagaaagaaagaaaaatggcattcagggtatgagaagtaaagagctagaagttgaactagccacctgacgttgatttcttgctcccttttttgttccagggtgccctctagactgtgtggtaacctgatcttgactctccattgctttcttagtggttctgtgcctgaagtatattcttactccatgaaattttgtagcggcttagcagaatgggggtaggcctattttcctgataattgtgctttgtttgggttctgtgattgttgagggttttgtttttgttgcatttctttccttttaagtagaggaatatcagcaaaaagcaacaaaatgattaaagatggtaaagcttgataatgagacatgaaagaaatctgaaggacttgtaattattgagacttaaatagaaaaccccacgctgtaagttaacaagtacatttaggtaattatcaccattaaaaaatttgaatgcagttttaaagccctgaaatttcctagtgtggatggttgtagtctacttccctggcatgaaatattccggagctgtaaggataaatctgccagaggcagacacatgctgggacctgtgaccttctaaaatggacttttgttgtgttagtctaagtttcctcttttgctttatacctattatttccttggttcataaacttgtgttttatacccaaggtctaggttttgatgcatcatccataaagccacgtggacttgtgtggtgtgcgtgccgaggactgtgaacttagagctgccagtagcccaaccggttccattattctcaggcaggaatgtgtttaaggcctttgcaagaggagcgctagagtgaaaggcaggaagacactgcaaacagagaaccatgaatgaactttaaaaattcccacaaggcttgaagggttgccatcagtaggaagacagttaatcaaaatgacaggggcagaggaacaggccccatggagggaacgttctcaacagcttcgtaatacctcagggaaatgtctgagcttcttttggatatggatgtattagaataggtacagagaggagacagctaagggtcaggagttgaaaaataacaaatcatgcttcattgctttaggaaaaatgactgcttaaaaggaaactacctattatttgcccttgaggtcttaagtagacaagaggtaaatcagaactggattaattactgactgattcactattaaactagttcaagtagaattttaattgcattctgctggttagatgtgcaagacatttgggtgaggagagggaaatactgatgaaagataaagggggaaggatcggaaaagatagggagagctgctggactggacaatagtctgagacctgtggaaggagagaaggaaagaagaaagttgggcaggaagagctccagacttcagtgtggttctgaaaagatctcagccaggccaccaggagtccctgggcaggagctgcgcgttaggagagccatgagttgggcaggaaggctgaatctagtgacctcacagtgctcagtcattggctgggagcatcttggaagaggcacggctttggtaggagtgcagagagcctggagatgtagcaactgatgcccactctgttaactgctcccctctcgaagggagatctgagtggtacaactccgtggccatcaaaagcaagtggtatgactcctccttctctgcattctttttcccctaccttcatagcaatcacttgatgtgtaattaaattgaataagagtgtttgaatgtcaaagagtggtgccttgcaatgtacatttctttaaaattttagaacttgctctataggaaaaatattttgatactgaaagcttactacttgctgcttgtgaacttggagctgtgacctggcaaacagatattttaccaactagataatgaaaacacattgaatgtataagttgaatggggtgaggttagtgtgtctcatttttcctttcctatgtagtgtcaaatagaaagctgaagcaggtaatcaaataggcttcatgagtggttgattacatttattctgatctctccttgcttgagttatttatttagaatgctaatggtctctgccagaccccatgctcatttatgtcctgagcttgattgtttattcactataataactaggaacaggtgattatgactctcaaaagaagaggtaaaatcacagcagaagaatgatggttttgtctctaacaaatcttcaagttaatttcttatttgctttaatttagctataaaatgtaatagcacacatgtctatgtaggtcaacttcaaccaggtaaaaaatgatagctagtaaagcagaatgtgtacactgtccctgaattcatagaacatcctggatcagtgcctgaaattcctgtttggtgatatgtgatgaccttgatttcctacaaaaatagccactttctgttcttttgaatttttatctaagtttcttccaccaaaaaatgcattttaattttttttacaatgccagccattaatctttaaaattgttgtacttaataatgtaatagttattccttaatgaaatttggaataagataagtgatcattgggatcacccagccactctgctgtgttgagcttggagcaaaaagaggagacagagaaacaagttctataaaatgttgtgtgtgatgatgtgggttatgttagtgttataggttgaattgcctctcacaaaaacatgttaaagtcctaccttcaggtacctgtgaatttgaccttgtttagatgtaatcaagttaagataaagtcattagggtgggcccttctccaatatatgatggatgtccttataagaagaaggaaatttggacagagatacgcagagaaaatgctgcatgaaaacagaagtagagattgcagttatgctgctacaaatcaagaaaggcccgggggtgtgagaagctagtcaaggaaaggaaagatcatcctctagaggcttggctgagagcatggccctgccaacatcctgatttcagacttctagcctccaaagcagtgagggaacaaatttttgttgttttaaaacacccagtttatggtactttgttatagaagccctaggaaaataaaatgggtagtgagagggtgatggttgcacaggtggcaatgagaagaaaatgcttataattattaatttcaatttatgtaaattggtaatgcatagatatggtccacaattataaaggcataaaagggtatatagtaaaagcatctctgttactacattttcccccacctccccaggtctccaccactcttagccattttcttgagtatcactcaaaaagtgtgcaatgcatttataagcatttaataatttccaccttcctttcccatctctccttaataagtagcaatgtgctatttacacattttggatcttgacttttcacttacaatatattttgagatttgggaatattaacacttacacagctattttgtaatagggaagatttaaatttgacctatatatgaagcccagtaattgccttcttctagtttccgttgttagtgtaccacacaatcatatatgggatgcttaacaccactgcattttgaaaactgccattgctaggtactatgcaaaatggcttacatattttatttaatctatcttgggtgagggcaggaggattaacaagaaagcttcaatttcctttgcctaaagaacataaaaagaaatgtttgctattggaacaggatcaagttccatttttgctgtaggctcctaaaaaacaaaaaagtaaatttatatatgtagttccaaatactgccaaattgcctcaaggttagtttcatggtaaaaaacttatctcttgttttttacttgtcatcattgaaaaacatcatttctttggtgttatagatctaatttttctttctacagaacttatgccaggaaagcagtctgtttttgatatttctgaacgttcctaactaggatggcaacaacaagagtacatatgtattttatactgaggatgtgagccaatcacatgtacaacccaatgttctaccctaaaattactatgactgtcaccccccacccaccattcaaatacgggttcttcactggcaacttgacagctgggaattagaaatgtgtggaatgttgtgtatggtggcaaaggagttggtaagtatctgtagcattattgtcttgcttcagacatggaaatatggaagaccacgtgtcttccaatctgccatagaaatagggtagatgagtccttctgaaagcacactagaagacctctgttcttggcatggactccagtggtggggaggactcccttccatttcacttggttatatgtttgccagagatgtggtagcagagatgagtggttttccatcagcatccaagctagggagtttatatcagcctcctttgcagctaagtgtagtagctaaccaagttctggtcaatgaggtttgggtgaaagcgatgtggggcacttcccggccatacctttagaagaaaggtgtgagttcctttgctgtttccttttctctattcagacatgcatgtgatggtagaaacaggagctgccatcttggattcaagagggaagccacatgttgaagatagctgagccatcctaccaccctggaatattccttgagagagaaataaactattgtctcatttaagcccctgtatattgggggtattctttgtttcagcagcttagattgtgtcctaacaaatatacccacatacccagatatgggtaaggacttgggccacccacatgttttaactatcttctggaatcaaatattggagatacaaatgactagttttagagcagtctagagtccaaggttgcaatgtattctcttgtttcctttatttaagtctgtgcttgagaaatgtctatggcttaaaatgggactggttagtgtaaagttggtgatagcagtattttccaaagtgcttttcagaaaacatatattaatgggaattcttccaaaaaaggtgtgggagatgatttgaagacagtatgtttgaaaaataacgggtcatataactttaactagtttcttcagagcctctagtgggaaatgaataccctaatcttccagtgggaggatacagcatgcaatgtggtccaatataatttggccatgaatctctttctttggaacacttagtaatgttttgtggaatcctagtgttcttctaaacataagttggaatgacagcattatagggttacaattatattgtattttactagtctagaaaacattctgtctctattaaggatgactatatctcatctattttgattgattcaaactttaactcatagaagacaccatgtttattttaaaggtctagaggaatatggcatatttggtcccatgggatatatacatggtacaagtaaaaaggactgatattttctttatgaaaataaaatgatataaatttgaatatatgaaataacattctaatagggaaccatttttatctgctttgaattatttggactatgggtaggattttactggaaaaaatagtgatacagccacaaaaataagtcaaaaaataagtcaaaaagttggtgtttgtcgaggagtggtggtggttgtgagatggaaaacatcagttggggctgttttgtggagggctgtgaatgtccactccatttggtaggcacttgggaaccactaagggtttttgagcagcagttagggcaggagtaggattagtgttgttctttcagaatgagattctgacagcaggacagaaaagggtttagggtaggtgaatgctggagggaagcaggattattaggcaggaggtcactaacacccagggagaggaacgaagggaagatgattcaggggtaatttccagactttctgttttacattcctgctgttggcattatagtttgcatacagctgaaatgtggcttttggaagcataaaccaataacagaaaatgaaaaattagaagcacatgaactatacttgaaaacacgaaagccaaacctgtctcgtggctgcttttgacaccctgaaatgcttttcagggtgttggcatatatcacgtgaccttttcccccatgactctcctttcttcagcttacttgtggcagaagggttgagttatgcaattatgttctgtaatatgatatttatccagcaaaaggtatttactctttagttgaattgtctatgctcttaatgcggtggtcacacttctgtcaggagatttttacagcatctgggccacccacatctagcgttcaggggctgatgggaagctgcggatcttagaaggaatctacctgaagtctgaggagcttttacaacctaatgctcaaccattggaattcccagtttaaatttggtacttctgtacccttttatttccaagcgtataggctttggtggccccagaatagtttggcttgcattgtctggaatctcatgagacccccaaagtacattttgttaatttaaaataacctcttcccttttatttaagcacaccctaatttttttattgtctttaaaattttatgtgtccaaagggtaacaaaatgtaagcatggctatctacagggagacaatgaggctcattaattctcatctgcataaaagccatttccaccagcacagccgatttttctgttacaatgacatgcaatatattcagaaaaggatgtttcctaatagtcatgtcactagggtatggtctacattcagattgcttttaatacttactcttaagttctgccaaaaaacttttgtcataggaacgaatcattggaaaaagctgaagtttgtttattagctgtaattcatgaccttggcatgagttaacttgcaaataattactctgtgaaaagtagagccagttaagtgtgtattgcttgtattagtgtagacacctcatgaatgtcacctttgttacaattcttaaccaaatatctcccctatctgtagcaagctggaggtagtgatctcggtggagtttctgcttgattctgtaaccagcattgtagctttgacaatgaacatcctctggggaatttttttttgtccatgatgttatgtagttgggagtttggaatctcatggctaattttaggtccttttccatatgctgcttccccaggttcagtcacggatatgcaatatcattcatttgccttatcacaggtgaaataagcaaccacagcacaatgcaaaagaaaaaaagtgataatgtaaaagacattttgtacaaagtgtcaagaaggaaaaggttttatgaaacacgtagttttattctgaggttcatccaatggttattttatccaatccaagtttttaggacttacgagttgtgcagttccagggtgacactattcatttagaatataaagaggctggtgccctttgaatttgtgcagtgtgatgacactgatcttgtttacctgcactggaaactctccggtaacagaacgtctcctcatacccagtggaattaagttcaagcccttaagtagaggcagatatggtgctccagtttgcccccgctcatacctccaggcacctctcttcctactcccctccgcactctgtttcagttcatggaatgggatctgggcatcttggatgtccccatgtctttacatatgctactcttttctttttttttttaatacttttttttttttttgaaacaaggtctcactttgtcgcccaggctggcttgtccctgggctcaagggatcctcttttttaagcctcctgagtagctggaattacaggtgtgcaccactgcacccagctagttactctcttctttagtattccttttcccactttatgttcactcaaagaaccctacacattcatccaatattcagcagttatttactgagtacctactatgcacaatgcattgaactaagcacacagtgcccatttgtagttttggattggataaattaatcattggatgaacttcagaataaaattttctctttcataaaacctttttcttcttgacacttcgtgcaaaacttcttttacattatcacttttttctttcgcattgtgttgttgttgattactttatccgtgtgtttcctccttttggattataaatgcaagtccaaaacctttttatttgcttcccaacaaacagctcagtaaattggaaacagcaaaagtgcaagtagaatagactttgaagcatctcctcctactagtgggcaagttaattaatttttctaaatcccagattccccatttgtgtgttggaggtaagaatatccaacaaaatcagcccaacaaagtttattctttgctcttactgtgtctgtagactttaaatgagaacatatttgtatatttgcagtacagtgtcttacacactaagtatgaacctactaaggtgttcatccattagtagccttctttatatcccctgcctaggactttgaacatagtaggaactcatgaatatctattaaataaatgcactcaagatctctgtcattaaatatatttagatagaaataagggaattgggccaggtgtgatggctcatgcctgtaatcccagcactttgggaggccaaggtgggtggatcacctgagatcaggagttcgagaccagcctggccaccatggagaaaccctgtctctattaaaaatacaaaaattagccaggcatggtggcgggtgcctgtaatcccagctactcagaagactgaagcaggagaatcacttgaacctgggaggtggaggttacagtgagccaagatcatgccactgcactccagcctgggcaacagagtgggactctgcctcaagaagaaggaaaaaaaaaagaaataagggaattggcatgaattttgtacattattttttggcagtggtatctctgcacagtgggtcctgggaaagagtaaacttgccctccagctgtcttaaacagaagctgacttgcactgccttaaccatctttctgtcttttgacaagatagagtaattcttcgaaaatcaagccatatacatttttttccttcgaaagtgtctaagcaacaaaataaataaatgtattattcattctgggttgtgttaatttttcctgccagaggggaaaaatgaatttacagggaattcctggaagaatatcttgggacctaaaaataaaaatcatggttttattttaagcttgtcaacaggggtgacaagtgtaagaattgtagcccagatgtgcgggaagcaactcataaattctattttccactatgttttatcttgcctgccactttccctaaaatggaaatcatttttagtatcatagagcgagatgggaaacgtggaagtttatttgtaaaagtggcactatggtgagcaagcattcacagggacactggcctattttagcagctggcctctgggagagagggatgccctacagcttggcactggagctctttgggatgctgctgagcttgtcattgctgttcctctttggggtctccaggctgcttttaaattctctaggaggtgaccatgggaccttattagatgagctttaatttctctttctaagttggcttgtgcaaatacagatatctagttttttttcagtcagaggggagaggaaggatagagttgaggagtggacagtaagcatccccattcagaggcagatgcagcctggtttggggagacggtagaggactagaacatattagtgtgtatggagctggcctgggcgctgagatccagagtgaggaatgtgccagagattccatctgtttgagctggcatgaatcatagtgtgaatcagtagatctcttttcttagcaaaaaccagcaaaagcccttcttgtgagggtcatatgaagcggaaggagatgagattctatattgatttagtactagttcatgagctaccaaatctaaaaactaggagtcaggtcagataaaatagcatatttctagcttaaagttttatgatcatgaatcttatagaaacatagttaacttagaaattaaagatttaagattaagttagaaatagaagttgctagaagttctcaaatgtatacttctgacaacttggttaaatccctggcatatgcagaaaagtttctgtgattaaaaaataacagaagtatgagagtttttccttgtccagccaattttgtagtctatttgagaaggttaaaaacaactgtaaaagctaagtaacaaggaaacaaaaaaatgatgagtatataaccagaaggagcccaggtactataaaagctaagtaacgaggaaacaaaaaaatgatgagtatataaccagaaggaacactcagtttgattcccatatcaggaagttcttgggttcagtgcaagacttgaaacctgacatggtttcattagattgtagaaaacgctttttttttttttttctggacaacagatggaaccatgttgtcggttgttcaaagatggacaggagacagaaatctatcaacctgaagtcagctccaactgcagctgtctgttctcctgaggactgtgctagtggtccacagaggtcaccttgcttatcacatgatattttcttgatgttagttgaagcacatcaccttaggtgacacatgagggccaaaggcctctttctcagggatgtatgtgaaagtgtggtgggttggggaccagctaaggaaaaaaagacatgaaggagaatgcaagcatcttacagtcatcattcagtaagaaatctttatgactggacaaaggaaaacataaacgccctttaacctagaatgcaaatttctagtgatttttacttttttagtgtatcagaagtcactgagcaaggtaagtaccagcacttacagagacggagtcataaaggctgctctctaaaagtagaggatgtgcaaaacctgtagtaccatttaacagatttttgaccttgttaattatgtcattttgaaactggaataaatatgtaattcgaaggttgatttttctgaacaaaagtaagtcaagtcaaagttttctcagagtctactgtttgattcttgagggtattcagaattcaagattgatgtgcatttcaacatttcagtttctgcctaagtgaagcgtcacttaaagccttcgaaattacagatgtaaaatgaggttgcacgtgatgtcagtagctataattcctactctggaggtagctcgatgtgtctgaaggctgagtgagctgcggcaggatgaatgaatctttgacttcaggagatgctgttctagtctgtaaccttgtcgtgtggaatcagcccatctgatgctgaacactaacttgaaatggctggccgaatgcagagtaacacatcagagcactagaccggtggaaagaacctagattgcaagtccagtgaattatctgcatcttcattttgttaggtgtagatttacttttgttattggttgcaattgcaatattttaaaatcatgattatgcgttaactccatctatttctaaaacattggtatttgtgtcatttttagtgtagcttgatttttgttttcttctttctggtacaaaaacgagtttctccctccaacccctgccatgtatatctgtatcatgtatatctgtatctacattcctgtctactatcaatgcctactatttacaaggtagttcagttcgtttcagatcaactagaatttattgagtaccctgtatgctaatccctgtaccaggggcttgggatataacagtgaataagttcctggggcttacatcagtcaatatagggttactgtctattgaacaagattatttttgggtttctatctatttggggatatgataatgcatgtatttattcctaaccatcacacaataatattatgaaacaatgttagtaggaggaaggtgagagccttcattttaactgggaggacttggttctgtctaagatgttgcttttgttatgggttagtgcctattagataacattctgtttctgtgactgattatttctttttgaccttctgagttttagtttgtccactgagttttaggtaaaaaagaaaaaaaaaaggaaaaattatctgtaacctcaagactttttatgaggattatgattttactgtgtttgataataaatgccttttgcatgcactggttttcagcatacagttatgaacatttcctagtggatgagcttaaaaaagggaaaagctccttgaattcatgatatggcttttggccacatttctttggcttggccatccttagtatttttttttttattgtcactgttcctcaaggtcaaaaagaagatgcaaggctatgcaggtccttaagtgaatttactggtcaccttccatttccagtggcctcatgctatttacattaaccctttagcagttgatcttaaattagtgagtgacgttacatttattaccactcacatgaagtcttaaaataatattaaatgcagagagatttattgccaagttagataatatctttccagtaatacgatattacgacaaaagatatttttatgaaaattagttatttcattatctcttcagtataaactttaagtcagaaggagaactatgtcacaatgcttttcattattgaagcctgagtgttaaaaaagacaatagtctttctcaggcggagacctcagaaacaaaacccatgattagagtctgtaatgaaaatgactcttaaacgaatctgagagttaggaataggacatcgagattggaaagaaagcaattggcagcacctcttgccaccttctgcccgtggactgtgtgtgtcttctctggttcctttgtatcgaactcaaacgccctgagcatttatcataggtggccctcaaatacatttttctttttctgccagacatgttctcttccatttatgtcagatgagcttattttcttgccattttttcatcagcagcatgacaaagttgtcactcctggcagaaaatggaataattcagtaagttttatttcctttgctgattttatattctcatcatccctataccccagacttggttagaaccctcagttatatgcaattttagtgcaattttctatttcctcataacatttagcacaaaagtagttaattatttctgcacttagttttgttaaagtccatctcccctagtggcctgtaaattctgtaatagcaggaggcctatttgtctcatgttcccctaagtccactgctacatagttggtttggagcaaagcaatcaagcatggttgatattggtgccattctttcaaagtgctttcactaaaagaagacaggggttttataaatgaccggatacctcttccctttgcacaatatacctcctgcagatcaaaagatacctgcaaaatattatagagggttgaatcaagaccttgttcccttctctttcagtgagcctttgagccatacattcataccagcttcaaatagatctagttcctgcaagttatgtgatagaaattgtaattaatcttgaaaggtgtataaataaatgtggtttttatggacccacttagagacagctccgtttccctcatccttttttttttttctaggccttacctgtgagtgagtcacctctttcctaaaaacaaaaacaaaacccccaaaaccctgctgattaaaccatgcttacactgagtgtaatccagtctataggaaatgagtatagactggctttttctcaaaatacatactaaattgatatttgttgaatatttacttcttgagcgcagtggcattcctatgtcccttagcccctttcttccctttatctaggcttctatttcataatctttatcatctgtgctttctttacctctttaaagtatgacctatttgtattttaaccatgctggcattgggcattgcttttcattatcttttattggtactctgccatcttttcctattgctccataatacaaatcttcattttttttctttttaatgttaagataatgttaactttcctttgaagctcgccagcttatttatggaatctttctttagctcttaacgtctatgcaattaacctcttttccgtctttcttgtcttatttattctaataccagccttgattctggaagttttactcacttttaaatcttttgtaaaataaatgggtgttgtattgatatacctagttagagagcagagcagtagtggtggtaggcaatgataaaatagtaaattctgtacctaagatttctcaggctgttacatctcattgcaaagttctctggaactgccagtgaagagtccagttggatcattcttcttatgacctgggtcttcatatctgttgggcttaagcctacactaccattttttttttttttttttttccttttgagacggagtctcgctgtgatctcggctcactgcaggctccgccccacgggttcacgccattctcctgcctcagcctcccgagtagctgggactacaggcgcccgccacctcgcccggttaattttttgtatttttagtagagacggggtttcaccgtgttagccaggatggtctccatctcctgacctcgtgatccgcccgcctcggcctcccaaagtgctgggattacaggcgtgagccaccgcgcctggcctgcactaactttttagtagttgtgtcacattgtcggtgtttactgagttttcagaaatctaaccctccataatagggataataataagagttaacagagaccacatgctttctgcataaaccggcacattacatgtatcagtcgtaaagcataatattatataaaggatgaaataaaggcccaaagtggttatgtaaattgtctaaggtcatacaattagggagagttgaggcaaatggttctttttttcctacaaagacttttgagtagtatttccctcatcttacatttgaatattgctgatttcagatacctactcatatggtattccaaccatgttagtttcaacccattctttaaggttgatttaccagctatgaatccatctaatcatgtgctcattctgctcatatttctacactgtccatacgaatttaatgcaactgaaatcaagagcgagacactatattagatcctgtgcagatgacaagaagaacaaaacactttttttggtgtggtttcttcttgtggttgcctgtctgggaggagggaacaaacaaatatacagatcattatgtataaaccatgatgaattttctctccaatatatacagaccaagagaaatttgaactgggaagaaatagatcttgtttggggaaataggaagtctgtatcttaatggcagtgtgcaagctgaaccttaaaagggatgtggaaggctgtgcaggccatgagattgtcagctgagtgcgtggagcgggactggtgcaggctgtgtgtgtggaacagtaagttattggctatcaccacagcatggatgctttggagagtgcagtacacaataatattggagagttgggtttaaaacttggacttggccatgctaacaacagtgtactggttaggagcatggactctggagccagactacgcgagtttaaatcctgctgtgccacttactagctgtgtaatcttaggtaccttaggtaatttactaaaacctgtgcctcagcttatctgtctgcaaaatgaagttaaaatatcaactgcctcttaagatttttgtgagggtttactggattaatatttgttaagcacttgcacagtgcctggcatatggtaagtgctaagtgcttgttaaggagaagatagatttttgtctttgggagaggaaagtgatgtgacaaaagttggaaatcaaagcagtcatggcaggggtagtgcacatagtggattagtaagaggctgtgtgtgtactaggggtttggggtgaggcaagggttgtagtgaaagcaatcgggaagccaatggaatgggcaggatgtaaaagagaatagtgacagggccactttcattcgggattccattaactttcacgtcactaattggttttcctttttggctggtcacaagctctctttttgctcccttctgccttttgaaaaaagtaatctgcagagcaagccaataataatctgcaaagcaagccaaaaagtaatctgcaaagcaaggatctttcagatgctgtgcaataggcatggtaagacatgttgttgaaaatttggatagataatgactctttatcgtgactacattttacttctgtaatctgaggaaagcatacaattcattgctttctctgtaggtgtggttaataaacacacacacacatacacacaatgacaacaacaacaacaaacccaacccgttggatatcttatcagcagccctattgctatataaaaatttttagctgctactgaccaatcaatataaacctgataatcaagccagaagttctccaaatatgttagaggaaatctaattctaatcttaaaccactaatctccctttcagcacatgaaatgtacatgtaatgcacatacagcaaatgataggttaacagtagaacttggttatatataataatggctatttcaggacactgtgaagttctgcttgctaagattcaattcaagatgaaagatcacataggtattgtaacatgcaaccctggatagcgaggtagtttaaaaataggtagtctacttcaaacttggaagaagtactgattgaagctgtgaggaatggcctttatctccatttctgatttgtcggaatgatctgtcttaaaggctgcaggtaccttatgctacctcagacctatgaaggtaggacctatgttaaaagaaaggagaataattgttgtccaagtagtcataattttagaattatgtagaatttgacatggacctgtgttttcagatcatgcctggtgccagcatttccagttgccttcttcccagaactgaggctgtccatgacccatcagtagtcccttcccagtcctgtagtcattctcaaccttggttgcacaatgaaatcaccttgggcactggaaaaataccaacgtccagacccacacccagagattctgatctaattaaatggggaggggatccaggcatcagtgattctaatgtgcagtcagggttgaaagtctctgctctagagactgcttgtacctcaggcaggagagatttcaggagattgaggtgaatgctcttcagctcagcgatgccatcgctgttgttgtctggccgtgacatggctccactatttgatagctcatttctctaccagcgtcaaagactcaaatcccacctttgaccacagttctgataacaggagtcctgctttcttttcctgtggccaattccacaacttgttaatttgcccagttcgtcacagtctggaagacttggactcttttttattttttacatatggggattgaagccttgcttgatgaattgctactagaatgtcctgtgctaactgaaagttccatacagcactcttcctgaatgcctgctttcagtattcctcctcctaggacacactcttgtttgggttgtttgggttgggtgtccctgataggagggctggtcagagcaatcaccgagggccacattctcagggtagctttgtgctggttgacttgacctgctgcgtttctggctgggtcccgttctgtttttcccagtgtttgttccagtgtagaggctgggtgtggttcttgatacaggcccttcatgtctacatctgccctaactgtaggtcaccaaatcttacacagccttttacatgacaaaaggtgttgattcagatgaaccgattctgaagaccaggctgctgggcactgggctcccagatggagggtggatcagaaccttctgaggatcctgaaacatcccacttcctactgacatcactaatgtacacgtctaggaagcctttcttgtgtggaccaatcctatgaatccctacatctggtggctccggtggttagtgtgtgaaccaggggactatatgtctgcaaacagtggcttgaatgttaaagatttgctttgggtagatttaacctcattatttttttccccccttggttagtaatacccagagtgtttcatctattacctcatttgtcttctagaagtctgggaattaggatttgcaggtgcccactcttttattgatatggaaggagaaagcatggggcttacctaaaggtcagagagaaagaatagattgtaacttttattctcggcctggattacatatttcttgtgtgtcatatttagcttcacaattttagctgtcttaaaagaaaaagaaaaaaatctattagtgttcaataattgaagattttgtttgttgttaaaaccaggaaattagatcatttccctggtctaattgatctgaaataaattgcagactgagggagagatgaagagggagacaaactaatgcgtgtaacgtttttaacactcagtgatctgggacattaatgctgacctggtcagcatcagcattatttgaggaagatgtccctatgagctgccttgaaaaattatgttcaaaagtcaaatttaagtcaaataggtggatttactatagaatttctactgtaagcaaattcctcaagtgtatttatacaagttgtatctcacttacttggctctgattttttttttatttttattttttgagacagagttttgctcttgtcacccaggctggagtgcagtggcctggtctcggcccattgcagcctctacttcccgagttcaagcagttcttctgcctcagcctcccgagtagctgggattacaggcgctcaccaccacgccctgctaatttttgtatttttagtagagacgaggttttgccatgctggccaggctggtctcaaactcctgacctcaagtgatctaccacctcaacctcccaaagttctggaattacaggtgtgagccaccatgcctagccctgggctctgagttttgaagcagctactttgcttaatatctggcttattaactcattctcacttcgacgtgttccatcgtggactggatgctacccattaattgtccaacttcagggaacatcagtagacacgtgtttgggcctcatctctgaagtttttgattgattaaatcatggcagggggatggcgggggatgggagtaggggcctgagtgtctgcatttttcagaagctttccaggtggttctagtagatgcaaaagctgagaaatactattgtagaaggatacaaatacacaggtgtggcctttagagatgcttccaaccctgagtttccttataggttgattcagtgtgaagtgtcaaaaagttttggaaagatttagaaacttacaaacatatgaagttaacaaagaaaaaatatacattatagtagaattatttaccagtaagaaggattttctactgggctatttcaaatagagtctctagcacattctacatataagttgattaaaaaatataaggtgttaaaaaatacaagattgacatacagttttttgaaacacatctaactggggaaagtagccaggatgtctcagacctcttatattttcccagaaaagaagttgtttgagacctaaagtgttggtactttaatattttgggatctgggaaaactaactttaagtttgcattattattattaatagggaggtaccagtacagttgagttagacaaacatctaatgggagatttattggatgaagtgaaattatggaggtctctgaggtctttgagcgtcgctattcgaaagtgtttaaactttattctgaaagcaggggaagccatcgaagcagggggtgacctgatgagattttcacctgagaaagatcacctagcgggaatggatgaattagaggaagggaagggcagtgtggagattggaatcccagccagtagcttatttcagcagtctgagctagagaagatggcacaggcccacccatggctgggggtgggtggaacagagaaggtgggagttgtggaaatgatctccacataatttatcttctaaatctggactactgtgagagtaaagggaagtacaattaatagtaacagcaggctggacatggtggctcatgcctataatcccagtgccatgggaggctgaggcaaaaggatccttgagcccaggagttcaagaccagccttggcaacatagagagaccctatctcaatttttaaaaaattataataataaccccaggacaaaaggtgtacatggaaactgtctcagacaaacagggacatataatggtgctaaatgtggagagaacaaggacaacttctagggatttttcaaggagttgaggaaagctggacagaaatttgtatctggagctcaggaaaaatgggctgaagacatgtatttgggatcttcagtatagacaatagtgataaaggatgatgtctggattaattacattcatttaagaattgggataagaaggagagagccaaggatcctgtacctatttgtaaaaccagagcaaaaaagtattgttcatctgatcctcttgaaaatcatgaatgcttagaacgtgaacagacagggtttgtccttctttcttttctcccatactatgaaagttcactggcttaacgtgtggtgtcttcatttatcctctttgtacttcattatttcttttctttccaatcagcaaattgcattttaaatagtcttgggtactcaggaactaattatataattcagaagttctcattacccccctacggtccacagtatttttctttcaaacctttagagatttggcaaccctttccctttagtaccatggtgggtttctttaaagcaacttctagaaaaggtattatttttgggtcatgtggggagatcagaatttttgtttaacctcttcttctgaaactatatagcacattctgcttccaacgtggaagatttaatcaccatcatgtggcgtgcattaaattaatagaatgctacatgagctgatttaagaggctttgtataataagttgatcagctgcattggtacgactccctccactgttggcactttggatgtttgctttgtgttttgactgttgtctttgggactgtaaattactcaggaaagctcatcagagtaaatccacatctaattttcatcaagatttttattttattcagctttactgtttggctaattgaggcgtacagaggccaagtgccttggccaaggttatcgagcatgttaatatcttagctcagacgagttttctttcagtccctgttgattcctgcattatatattcatcagtctggtaattaacatccagtcatccttgttgctctccttatgaactggctgtgtttaagggttctccacaccagtgggatttatgggaagtctgcatgtccaggcattatcttttatctgaaaacgagaaacatatagagatcaattatgataatctcctgcatggcagatgcagctctcgagggatttgttaccccatgacagcaaaatcaagccaggggctgctcggctcaccacttggacgcttgagcggagtggaatgataagtcatagactggtatttgaagctggcatggtagaaggcaggatggcctgcaaataaattacttcattttaggggcatgaagcctttgccaggatagaaatgtttggcattcatttcctagaggctactggaagtgtggcatagctgttagatttttgttgcttgagggctttgtctgcccagatacagaatgtgaagcgtacagaaatccagctaggagactattccagaaggatcagacaataggaactcgtaattagcctccacagtcctgagtcttataggatatgctagaatgcaaaatactttgaaaaattcctgggttgaaatttaatttaaatatatcaagttgagtaccatgaataaagagaagggtatactgtaattatgtataactcttgaggtatgaattcatctaaaactacattcaagctatgtttttttctccctggtgaaactgtatttccatagtaattttcttttttaatgaaaacaaatagtttttattattggcctcctctcttagttaataatgctttttattttaagcaattcctgtaatttgtgtctcttttcttctgtctctcatcatcacgcacacatctgtatggcagggaagacaatgttaatgttaatataagggcaatcagcgagccagttaatcacctaccccagcacagatagctgggagctgctttgctgtcgggcagagataaattagaaagggagaatgatgatttaaaccaatgccttagaatgattatcaaacaaaggcaagcatttagcaagctgttaagccgaagagaaatccccaggaaggagaaaggcgacagcctttatctagcaataagggcaaatggtaagaataaagtgtcagcccaggcacactttatgtcaattcaagtgactaaaggccaatttggtgcagcgtgtttggatcatatgttgtaaaatgcatgaccttgtttcctgatgctgatttatagcttgatgtgcttcaagctttattttctttcatgaaaaaatcctcaacccttgatgggaaagtggcaaacctgaagtagctgcagaggtctgaaggcgcattgcttcttgaaggcagcgcagctcatccctggcttggattgctttgtgagtggaactaacaggcagggacagtgtcttgtcagaaataccataaagtgtaaaatagagtcaggttctttgccaggtgaagtgggcagagctgttagaggtacagccactccacttaaaggggattcaggtctcatcaggatccaatgaacgcagttcaatagcagtggctcggatggtcctcaaaggaatgtgtagggctgatttgggagttatttattgaattgatctattcctgcgaatgcctagaaaactcacatgttcatcttacacattcttggagcttgttttccaatatgtggcattacgtgggggatagagtccctgcctttagcacttcgctatttttcttctgggttttggctggctggaattaaagtttctacgtcaatcatgtccttggttggcttcttccactttgagaatattaaactctttcttttatatgtaagtgcagaaatgcattcacgttgaattcagtgttttgcttccctttccctgttcctgtttttggagctgtgctcaggttggggatgtaaccttgcccgcctctcatcccctggcactcagttaactttggctgggtaataatgcactgcccaggtggagtttggggctcacatttcttcagtgaattttgtgttcatgggtagcttggtgttcctgcctagattattgtggtgctcattcgtgactggatcagaatgataagctgcttttcagagcaggtacaatacctactgcctagggacctgtgttgatgccagagcacttttcctttattggtgtaaacagtgagtacactaatccctcatcatcaagagaacagacttccagtcattgcactgctgagctctggatgtggagaggggttggggctttcattgtgtgctttcggaagagacccttggacttagagctttgtcacttgtgaccccgcccttctctgcttgttaattcattcataaccagggaaataagaaggaattgtaaaattctgaagctctaagagactttagtcccttctgattatttagtttacatatgaagggagtgaacccagttactttagtttggccagtttaaatgatcagtagctgggactaaaccagaacatgggtctcgtgatcctcagctaaaaccttctttgactccatcactcaggttctccctgagatgagcacagtgaccaggagcagggattaggaataattgttgggtttccagagtcaagttgcagagtgggctgaggatgggctcatcaatttttttgactggttctcagagttagaagggactgaattgtgtgtattatttatctcataaaatatccagtacggtagggatcacactatacacactaataaatagaaagacattatgtgaactaatgagggtcatatacatgttgtaggatcataaaggcctgtgtttggatcttgaaaagatatataaccttggacaatgaaacttatcctctctgaagtgtagcttcccaactgtaaaaaggaaataatacctactttatagacttattgtgaggaataactatggtaacatataaaagctcctgatatagtaactggaatatagtaggtactcaataaaatgcagtttacttttcttattttgacatttctccatggcttagattagtaagcaccctctagaacatgtagacttatttctttactttctgaactttctatctttgtatagttttagccttcaagatttccagagaatattttgggaaaaaaattcaaataaaggccactggaaggcataggataggaaaagaagccaaaagtaagactgaatgtagaagataatacaaacttgggagtataagagatgaaggctgagaaaactttatcctgatgattagaacacaataattgttttaggtcagaatcccatgtaattttataagaagggccatgcccttcttattcagttaagcagctcttttaactgttttaaaagaacaactaaaacagttcttctaactagttatttgatttgctctaaaatgatcccatgtaacttaggacaaaacctctcacaacaactgtttccagttagtaaaattttaaggttatttgctattattcagaaaatgcccatttgatgcttccaaaggacaggaaatgggagttgggaaaaggtacagatacacagctagcaaatggagaggatgttcttctctaataacacccaggacagcgtggtcatcagtcatgacagtggccaatagcagaggaatgaaaggcagacagtgtcgcgcgtgcctgggcacgtctttcaagcctgccatctcacctctccaacggccaggaatgggccttagcacaaaactggcagagagagagactctcttaatagatacttatcttgtcttctcccagattccaagcatgccaggcctggtcaagctgtcctacctgcttttagaattgaagaattgtctgaatacatcatgaatattttccaaaacaactacacagcagaacaatttaagaagggaacagaactggctaatcattctgtaactgatggaagagaaatttggtctgatttctttttcttttcttttttttttttttgagacggaggctcgctctgttgcccaggctggagtgcagtggcgcaatctcggctcactgcaagctccgcctcccaggttcacgccattctcctgcctcagcctcccgagtagctgggactacaggggcccgccaccatgcccggctaattttttgtatttttagtagagacggggtttcaccgtgttagccaggatggtctcgatcacctgacctcgtgatccacacgcctccgcctcccaaagtgctgggattacaggcgtgagccaccgcacccagcctggtctgatttcttgtatgtttgacctgttttgaaaataaggaaggaaaggcattacttgggttttagtcaagaaaacgtttcacatagagctgcagaatgacggtgagatgagagagaacaggaaatcagtgttaagcaggaagaagaaggtaaggcttgggaagctgttgaaacagtaggcacatgtttaagacttgacattatctttataccttaaaagtctttaaattacaaataaagtattaaaaacccattttaaccatccatcccacttcagaaccagaaaattctaggtgttaataggtcgtctcatggatacttgtgaactgcctgtcagaaaatgtttcgaggcatttactgggatgggtaagaaatataactttcagaaggtgttggaaaatcctgagtgaatgataggaagctacaatggagggtgcctatgtgaggattattatcaagagcatttctcaaggatagctctgtacttgtttttgctccacaaagcagatacctaaaaacaggtgtaatcttactgtagagcaccagctacagaaaaatacatagcaggtatcttttcaggctaattcttgatcgagagaaaagtagactttaaattggtgattgattccaaaaagaaaattagtggcctggggttattcatttttcataaaggaaaacttctgtaattgttaatagtatattctagaatattctttgttcataaaatcaagctagttggcctggaatgcttaatttttacccctgactttagttgaatcctttgtttactgctgttaggtattcatcagaggtggcgaatgtatctcttttctgtcttttttttttttttttaagaatttaaatcaattgacaggggttaggaacaaagaatgctgtgattgattactgatgtcagccaaaatgggaggaaatatgttattttttatgccttctagttcatcctcatttgcaattttttagccaaaaatgactgtatgtataatattgtattactttaagaaataaacaaatttgacaaaatgttaagatttgaaaaattggaaagtggatacagaagtagccattacattaaatacccatgactttttttttgtccatttgaaagactgcgtaagaaaatattttggctaggtgcggtggctcacgcctgtaatctcagcactttgggaggctgaggtggacggatcacctgaggtcaggagtttgagaacagcctggccaacatggtgaaactccgtctctaccaaaaatacaaaaattagctgggcgtggtggtgggcacctgtaatttcacctactcgggaagctgatgcaggagaatcgcttgaacctgggaggcggaggttgcagtgagctgagatggtgccactgtactccagcctgggcaataagagcgaaactccctctcaaaagaaaaaaaaaaaatttaaagtaatgattacaaataccagtaatttaatttcaggtttaagttgtatatttcaaactgtagttttcctcttcaattattttttgttttattttgttttatataactttttcactcaggaagcaaagttgtccacttctgtaaatttctgtaatatttccatttagctagttctgtaactcctgactttctacctgcttctccattgtgtgtgtgtgtgttttctctttctagaaagatgtgttctgatctcttgattgacataaggtttgttgaagaactgaggttatagatccaatgatttcagacttatgtaaaacactatagtttctcaggcatctgctatccccaccccacaatgctaaaagtaaaacacctgcagcagctggagaaaattggttctggactttcagtttctaatgacctacccctggggagaaacaaacagctctcttggcagttactacagacatcgccacctcagtttgccccagggcaaaagttacactgctggaaaagtgtcaggtgaaaacaggttttataattaaggacaaaaaaataaaggaaacttggtgaatctttcttataaaccagtgctgctcagaatatataatttgacagatttaactctaccttcagtgggtggtgctgcaatgtttaattagtttttactctcacgtgaagtgctttgattgtataggactccagagcaatgcatatttatcattacgcctcattgttaccatctgcagagcagtcagtaaccatcagcagatgggcaattgagtgggattcagtcttcctgcaggattctctttgagcaccgtgagtttctgtcttagagcctattttatttcttgtaatctgtaaattgttacttttatatcgtctggttcatgccagttgtagtatttttattttatttttttgagaccaggtctcactctgtcacccaggctggagtgcagaggcacagtcatggctgactgcagcctcacccttcctctcagcctcccaagtagctgggactacaggcacatgccaccctgcctggctaattttttaaatttttgtacagatgaggtcttgctatattgctcaggctggtctcaaatttctggactcaagggatcctccctcctcagcctcctacagtgctgggattacaggcgtgagccactgtgcctggccccatctttattttaaagccccttctttattggtcattttggcattcctaaagaaaaagcattgataatactggaatagaagaaagctttaaaatagtccaaaaaattttttaaaagaaatataaaatagcaaaataaaaaaatcaaatttaaaaataggcatatacaaaaaaaaacttcagcgcataccttaaaccaacttcagcacataccttaatccagagttaatctgaaccgtagtatgttcctaaatctcaaaccccaactataaaacttctagaagaaaagagaaaaaggaaatatttatgacctcgtgttaggctaagatttcttagatatgacattaaaggtgtgatggataaaagaaaaaaaaatgaatgactatttgcaaatcacatacccgataaaggatttgtatccaaattatttaaaaatattcaaaacttgataataagaaaacaatgcaattaaaaatgggcaaaatgtttggacaaatatatggatggcaaatacccacatgagaagatgttcaccatcgtttcatggatggcaaataaccacataaaaagatgttcaccatcatttatcatttaggaaatgcaaattaaaaccaccgtgagataccattcagtgcttactagaatgactaaagttaaaaagactaaccatacgaagcataaatgagaatgtggatcaactgggagtttcatacactgctggtggcaatgtaaaatggtacaaccattttagaaaacaatttggcaacttctttaaaaagttaaatacatatatactgtattacccgagccagtccattcataggtatctactaaagagaaatgagagcatgtattcatataaagagttgtgtatgagttttgttagttgctatatttctaggaatgctattagccccaaactggaaacaatgaagatgtccatcagtaggtgaactgataaacaatattgggatatatccatacactggaatattatttaccagtgaaaaggaatgaatttataatacatgcaacaatgcagataaatctcaaaataattatgctgagtgaaagaagcaaaacaaaaagagtacatactgtatgattccattaatataaaattcttgaaaattcaaacagatcaattgtgaaagaaagcagatggatggttttctaggatggggagtatagaatggaatcggggaggaagaaattacaaagtagtatgaggaaatgtgatcaggtaatagatatacttattatcttaattgtggtgatggttttgccattgtatgtgcatcaaaatttatcaattgtgtacttcaggtatgttaatgtaattatatgtaaattatggcctggggcagtggctcatgcctataatcccagcactttgggaggcccaggcgggtggatcacctgaggtcaggagttcaagaccagcctggccaacatggtgaaaccccacctttactaaaaatacaaaaattagccaggcgtggttgtgcacacctgtaatcccagctactcgggaggctgaggcaggagaatcacttgaacctgggaggcggaaattgattgcagtgagccgagatggcgccattgcactctagcctgggcaacagagcgtgactctgcctcaaaaaaaaaaaagtaaattacaacttaataacactattaaaaagaaaaagagggaaaagaaaggggaggggagaaaaaaagggaaggaaggaaaagagaaagaaatgggagggagggagggaaggaaagaagggaggaaggaaggaagggaggggaggcaagataaagcctggacttgaaatcagagacaaatcttggatttatcatttacttgctgtgtacctgtggataaactgcatagcctctctgaactcagtttttcttttctgtaaaatgaagttaataatatctaccacatactcagatactgtaggtaaaactatttttctatatgcagattgctcaaaaaatatttggtattattatgaatattactgatggtatttgacaagcagatacaaactgcagcaatttcaatatttggcattattatgaatattactgatggtatttgacaagcagatacaaactgcagcaatttcaatatttggcattattatgaatattactgatggtatttgacaagcagatacaaactgcagcaatttggggcatttcccacatactttggggagaaatgcctgcagtcctttgagatgggagggggtgttaaagtggatgtgatgtagagagaagcagcaagaatgtttatctttttctgtgagagggaaaataaaaccccaaacttgctagacctctgacggcacaggaaatgcactgcagcttccctcctgtctggggtctacaggtcctagcatgcaatggcctgatttcatgtgggccacagagcactgcttgtaaggacgtgtagcttctgttggctacccgtgatggagaggaactgaagcagaaatgggcaataaattcttaatgcattgcacacattacgcatcatgttatttttaaacaaaaggcataccttgcattttcccagtaagctagaatgcatttatgtttaccaaaaggtggccaactattgcttggataacccgaacagcttttataagcacaaacgtgtttatacaaacttgtttagaaacatgcatgcactgttcaaaaaaatttgcagtttttctttccattaaacatctccttcttggctagctcagagtgtggaagtaaactcaaagcactaagccatttaaaatagaaatcagaatttaataagggaatgtcatgtttcatttaaaagcttatcttcacctccttttcttgtgctgtcaagtgaaagaaaagctagctttataattacatagctgcctcagctttagcttatatgtgagatctcacattatttttccacaccttcccccccacctccctatcccacctccttccttctctgccattcaaccctttcccaccctgacttgctttcttatgcttcttaaggagctgacagaatgatggagctctgttgattaagctgctgagtggcggtggcccttattaatttaggggtcacaagcaaaaaatgaaatgaaataaaataaaataaatgactttagtgtgaaatgtttctcactgtggatcatcatcctagcctggctggatagaaaattaggtgattttggtttccactgctcagaagagcgtgaaatcccatgggactcaactttgacaaatgtttactatcttctctgaggtcctttctcacagttggtcttcgtattcatcactgaacaccattaggatcctcaccccttgttaagaacttggccaaggaattagcagcgggaccctcaggtgctctttcacatacatttttatggtagcctcttcttgttttcctaatcacatctattaaccgcactgttgatcacagaatattacgtccacagaagccagagctgaatattggaaatcatattgttccctagaaactgttattgtaaggaagtaatgtaaaagatcatagtgtagtataaaaccatattattatacttggggctgttttgtctgtaaaaagagatagttcttgcttgatcacctgcatgacaaggtgatcagttttgaatgcaggctttatctgagttgagtggttagaggttaaaaggagagatgttccgcagatcctttataataaatgatgaggactgagaaattattgatagctcctctgtggcagtaagataatgcatccttgtttagaggataatattttcatttgtaatatagacaaaatgtcatttagaaaatgtataaaagtggataatacccttcactctatcactggaaatctgtagtgggtacagacctaatgaagtttctcagctttagaaggaaccaagagagtcagctattctctgtctcacctgtgaatccctccacagcacccccaaaccttgtttgacacattcggtgagaaggaacttgctacctcactgttactggatagttatatcagaaaattcatccttcttttagccaaaatcagcctctcaggaattgaactagttgattaaactctgccttctggagcctctgaggataaatcaaatctgtttctgccaggaagcccttcatgtgttttttttttttagacagttctcgtatctcctctgaagttctcttttcctccaccaagtaacataatcctcatttctttcagtagtttgtcactcaacctcctctggggtcttgcgcaattccttatgcatagtaggccttcagtgaatgtttgagttgacagattcctgacatcaattatgttctgagttccactgagattctactgacaactgtcttctactccgattccgctctctagaatgtggaaatagcagtgattctgaggatgttttcatgctgataacatctatacctgattgatgttaaaccattctcttgacctcacgtttcctcctggaatggttgactggtcctcccttcctttctcttttgcgtttgcatcaattcccagagaagaatgtttaagagaaaaaggtgtgtttgtgtaaatgaatctaaaatgaaagatctaggaaagaagcctaagctttgggggaacatacaagtcctttcatctttcctagttgatggaaaaaactagaaattgtagttgtagttaaattcattttaattcattcatttatgtaatgagccaggtcatttttatttatttcaggaaggtcatgtacattgaaaatgacattatacaatttcctctgcggttttggcagcatatatgacagcaggcaaagatgtaggggaatatgcttattcctgagcataagtactagaattagaagtgtggggtttcctccccagtttcatgtgtgacagcactaaccttcagtacctcagaatgtgactgtatttgcagatagtctttaaaaagttaattaagttaaaatgaagtcattagagagggccttaatccaatgtaactggtgtccttagtagaagaggagagtaggatacagacaagtacagagggaaggaccatgtaggatgagcaagaaggggaccacctgcaatgccagccaaggagagaggcctccggagaaaccaaacctgccagcatcttgatcttggacttccagcctccagaactgtgggaaaagaatgtttgttgtttaagccacccagtgtgtgatacttcatatgtgagctctagtaaactaatacagcgaggaaatcttctaatttaaattctgaaatatgcagtcgaattaagattaaagaaaagatttaagatcccataagatataactacaaatatttggtcattaatgataatgttggatctactaatcttattcatctggatttattaatctgaaataataccagtccttcccatttaagttttgaaaggaaaatttataaaacattgtgattaaactatatgctttaaaacattattctgtgctacagatatattaatataatttaaaacatgttagtgatccttccggtgactcactgatgccttgcctcaccacagtcatatatttattatttaggttggtgcaaaagcaatttttgccattaaaagtgatggcactatcaaagctaacatttttggcaatggaatgatataccaaaacttctaattttaccatgttatcatctttcttatttatacatggtctgccagcatgtttaattgttagactcttcaagaacttttggaggaagctttttgtatttgacttgtcaaaaggcacattctgggaaattgatctgggccctaaataggcattcagcaagttattggcaaaataagtctgcttgtcaaactgtgggtgacctactagtgagttgcagccaagacttaataaagtaaatttgaatagaattggatagagaatatcagtgtacagacatagtaaggttacgtattgtgtaaaatttctttcaattatattcattaattcaacaaatattgagcacctactgcataccaagcactgttctaggtgcttgggatacatcattagactgacaaaaatccttggcctcatggagctttctctgtagtgggaaagataaataataattagcacaataagtaaattgtgtggtatgttagaagctgattgtgctatggcaaaaagaaacaaagtggcaggaggggattgggagttatggtagtatgtgggggggatggttgcaattttagatattaataaaatggtcaggtaggccttattgagctgctgtttgatcagagacaggaggcaagagagttgaccatgtggatatctggaagaaacgtgttagaggcagagggaacagtcagtgcaaaggcacaaaggtgggaattcctagaatgtctgtagaatggctgggaggctagtgcctttgtgaggaatgagggagggagcgatgtgtccagtggttgagggtgccgggtcaggtagcatttataagtcactgtaagcattctggctgttctgagtgcagcttggaaccacccagagttctgggcataggactcacatatgtatggattgtaattgaaaatgcatttattggctaggtgtggtggcttgtggctgtaatcccagcactttggaaggccaaggtgggaggactgcttgaacccagtagtttgagtctgccataagctatgatcgcaccactgccctcaaacctgggtgacagagcaagaccttgtctctaaaataaataaataagatacaacaataataaatacaaatttaaaaaagaaaatgtatttattactctggaaaagactagaagagactgtcatgttaaggaatctgtaaaagtcccattaaatggagtttctgtgtttagtatgttgggagttccacaaatggtcttttaacttttgatactggtttaccaaacctgagggaaaatagaatcacttggggctttttaaagatcctgtgttccagcttcaccctcaccctggacttactagctcaaaacgtatgtgtgtgtgtgttttagagacaaggtcttgctctgactggagtgcagtggcttgatcatggctcactggagcctcaagctcctgagctcaagtgacccacccacctcagcctcctgagtagctggaaccacaggcgcgccaccatgcctatttttttttttttttaattttttgtagagacggagtctcaccatgtttcccaggctggtctcgaactcctgggctcaagcgatcctgccgcattggcctctcaaagtgctgcgattacaggtgtgagccattgtgcctggccaaaatgtgtatttttaatatgctgctgagttgactcttgtatgatcaggaggagcatttgcgaatcactgattttttgaaaaatctgagttcagtttctgccacttcctagcagtcaggcattggccaagctacttaacctctagcctcagagccttcctggcaaggccattttgaggtgtttgtgcaccatctgtgacacacacagcaaacactgtaaatgggagccatgtagggcctggggattttccccagtgtggcacttcagaatcagaacaagtgataaggaatccacaagagagtgatttacaagaaaacagagttctgcccatgaacaattagttgtactgcagacctcctgggcccttggctcactgtcctgcgagagtcatgtggcctggtgaaatctgtgagcccaggtcccctttgatctggctaattatagtgaagcatggaaaaaatgttaattgcttgactcttggctcctctttttcttagcctcatgcttctctgccctggttcgctctgggccagcctcttgtcaagcttttgaacacatggttgatgtctctttagaaactccatgaccacactaagagcaggggttccagcctgccctctccatggggtaaatggagagaaaacatttcaactcatgaatcttgtttctccatacctcacccacccccaacccctctttttttgtgaaatgccacaaataaccatcctcaacagtgtcaataaagttgagaatcccatagatagagcctggggggaagcctcaatatgttttgtaggaaaattgtaaataattgttaggggggaaggtaatggagcaagtttaagcccattgtctaatttcttttaaagcacagactctctaaacattgaattttaattgaattcgggaggcagaaggaaaaaatacattctatgatgtaaaaaaaaattctgggctgtttagagaaagataatttcaaacactgtagcgcaaagtaatagaataagatacgagaaaggatagcgtgagaggctggcactatactgaatggtgtatccacataggaggtattgtggcagagttcaaagaaccctggactgggaatcaaaaggcctgcttactagtccagctttagacaccgacttcctgttgctaacagcaaatataacaacaccgggaataacagaacagatcgggcacctatgatgtgggcttctgaatctagacctcaaaggtgcccacacttttctcaacaactaagatagaggaaaggatgagactccagggcagtggtccccaaaggagagcatcaacatcacttgggaatgtgttagaaattcacattgtcacgccccaccccagacttactgaaaaacaaattgtggaggtagagcccagcaatctgtgttttcctaagttttccaggtgattctcatgctcactcaaatctgaaaatcactggtctgagagacacaatccaaatttcttgtccaagtttaatttatgtttaatactatgtgaaatactgggtttgcttttggtcagaatacttaatttattttgaaattaaaagaggtgtcaaatttttatacttatcaagaggcgtagtatacattttaaaaggtttgagaacatttaatatacaattcatgggccttttcttaagaaatttatgatttaattgagggaatgacatccttgttaatctatcagcaggtgcataataaggaatacaggaaatgagctagtgccgatggaagtagaaagaagaattgagatgggggccgggcacggtggcttatgcctataatgccagaactttgggagtctgggaggtgggaggatcgcttgagcccaggaatttgagagcagtctgggccacatagagagacctcatctctacacaaaataaaaatttatccaggcatggtggcatgcacctatagtcccagacacaaaataaaaaattagccaggcatgatggcatgcacctatagtcccagctacttgggaggctgaagtggaaggatcttgagcccaggaggtcgaggctgcagtgagctgtgattgcaccaccactgcactccagcctgggcaacagagcaagaccctgtctcaaaataaaacaaacaaaaaaaataaacaaacaaccccaataaaataaaaaaagcaaaatgcaaagggcttatacctggaaagtgagatgatgaagggtttgaagaaacatactgaggcaggaccttgggggtcaagacagagagaaactggcttatctgggggtaaaaaggacccaactggtaagagagaggagtttgattaaaaaaaaaaagaataaactcatttggattttgcaggaaactttctagaatcctggacaaaatagcacaacagaaggattctcaagtaagagtgtcatgtcaacaatgtgtgtgattgtgtcaggcatgaccgtttcagctgcacgtgacaaaaacccaattcaaagtagttggatcaaaaaagaatttattggctcaagttactgaagaccaaagatagcctggctttcagcctgctggatccaggggctctggcaaagtcacgatttatgggtctcttcttaccatctctgtgccagctcctttctcagggaggtgcctttctccagcactaagctgatggctagaagctccaggcctacatccaattctcagaaacccaggtagtgtcctagaattgagcctctggtttcagacaggctagaccaggttcacgtctctcctgaaagggtggcgtatagggccatctacacctggacctcgtggactgagagtgggcatgggctggttctgttttaaataggaatgtggttatctgaaaagaggcgctgaggatgcctgggctgcaggtctgttctctcaagggatggtgaagggaggagaggactgaggaaggaagaccagcaaggaggctgctgccatgatccaggtacaaagtaatgaaggcctggcttggagtcatttctgtaaaacccaagaggacaaactttgaccatcactgtaaacaaataatcactatgacttctaacagggttaataaaagaaaaacagctcattgccatgccttgagtatagaaaagagattggttggtgctcttaatagtcatcatgaggttaagaagtttggggaaaaggcaggccgggtgcgtggtacacgcctgtaatcttagcactttgggaggcctaggcaggtggatcacctgaggtcaggagttcaagaccagcctggtcaacatggcaaaaccacgtctccacaaaaatacaaaaaaatttagccggacgtggtggtgcgctcctgtaatcccagctacctggggggctgagggaggagaatcagtcgaacctgggaggtggaggttgcagtgagctgagatcgcgtcactgcactccagcctggatggcagagcaaggctttgtctcacaaaagaaaagaaaaagaagtttggggaaaaggcaaagcctcacaatatcaccatgggaggtttttgtagttgctggtgggagatccaaggtgcatagttcatctctgtggacagagaggtagaactatggacttcactccttgcaccctttatccttgaattgttagcacagagagctggcagtgcctttttgttacctttgttaaattagatatttgggggcttgtttatctcttcctaatgtagctttacgctttgagagctgggctgtgttttggacttcccaaccacagctgcatacttgaattattcagactttcagtctctactgatcttctctccctgattttaaactttgtattaaataaatctgaacgagaaaaaggggccaatatgccttttagaattaaaaaggatcctgataccccctactgttctatgtgtagatagaaaacgtgcaaatcatttgaagtactttaacaaataggatgtgattagcttgtgtcagccaggtttagcacaaccctctacagagtaggtgcttggtaaatgctctttactttaatggagaaggtgactaggaaacaaaaaaggttttcagttgattctgagttgggcatggggtaagtccggtcttaggggaaagtcacttgttctctggaggtttaattagaaactggaccacttactttttgtggagtggtttgggagtaatcaccagaagcagagtaaaatacttggaaattaaagagatactaaaatgttaaatgtgccatatggtaataaagttttagagcaaaatggaaatgttcgatggtttttaatctcgtgactgatagggactctaggtggggttaatttatcatagttcgctgcagaggcttcagttgtagctaagaagagcaaagctttacaagtgtatactagcactaaaatcagtgtcttcattagagtattaatcgtgtagaagtgggaattaaacttggcaacatgacagagaagctgacatcagagttattaaattaaaaagattgctactgaaattaaatcagataatgctattactgtcatctctggcactctcaacagtataaagagagaggagaaaataaaccctaagttaaacagctgtgtgttcctcccccccatctttggaattgctatcataaacccagaagattaaatatgtaatcaaagcagaaaggcttatcagttattgactcctgtacacatattaccagttcattagttccaaattaattttgcccatatctatacaaaatgaaaagagaaaaatcttactgctagagaggaataaattatgctagtaaatgttagccgagtgtttttaaaaatgcacactttgttctaaggagtggcatcttcttccaagtgcctcttagcatgagggtagcaccagagatgacatgaaattcctactgggaattcggtagtccctataaataggagcgttctctctgcatttctctcccttaattatggcaaagttattaaatttgagctcatgtattgagaataaaatcagctctttcatgcctctctcaccttgacctttccctcatggtattcaaagtcaatgccggtaagtacagtgcttgtggctttgtgatagccgattttttactcactttttctaagcattaccataaaacctgacatcatgccttcagtctgcctgttgtggagattgtaataagtgggggttggcttaaagcgcattagtagattttgagtgtagtttacttgctcaagatgatgagcaaagtgatctatcattgaatccatactccttactgaaggtaatagttcaattttgtttttctagctccacaatttacagccagcagttagatctgggataagcttctgcatttttgattgcagagtgttatgattttagtacagaggtttcatggagccacctgcagcctgcacatcagagatgtggccaatactgtggtcatctctcctagtgactgagctatacccctgggtatcatggagaatgatgacagcacttcactcccagttggtcattggaaatgcctctggcacctgccacccctggatccctgtggtggccagtagagcaaacattctctaaaatgagatgtaattagccttttcactaataacagatttcctgccttcctgtggtgagtatttttggtctagccattcatgaagctgcatgctcttttatatctctctactgatgaattatccagcctgttttctccagaagggatgtttttctttgacactcagacatctggtcctttgcatttgggaagtataaatgtcattgcatgcctgcatttttgaagtaagtgctgggttttgaaagagccttctttagggtcttgttacatcacattttataaaactagtcttatggtctcaaggtgctgtcgtctggatgtttgtgcccctctccattcatatatagaaatcctactctgaaggtgatgatatttggagatggggcctttaagagctgattaagtcatgagggttgagcccttatgaatgggattagttcccttataaaagaggcctccaagagctaccttaccccttccaccatgggagaacacaaaaagaagacaggctctcaccacataccaaatccaccttcatgttggacttcccaggctctggaattgtgctaaataaatttctgttgtttataagttactcggggtatggtattttgtcacagcagcccagacaaagatgcaagggatcaagttggctgagctgtcttttttctttcttcttctctaatctcccttttccatagagttaccattgacagaatacctgccatgtgccagaccctttatatccactattttattttatccatatttcccttgactctagacaaactgaagctcagagaggtaaaataactgccttggtcacctagctggctagcagttgagccagatttaagcccaggcccttgaattcctgaagcctgaagtctttctacaacactgctggtcccaaccctggccatgcagcaggataatctggtgaattactaaaaaaaaaaaaaaaaaaaaaaaaattattgagttacatcccaagcttctcatatccccagcttcaaggttggtatctggcacttagtaggcatattatacatattgatttactacaacagttttgagagataataatacaatctaggaatctataatgtttcagttattacacgatcatatacttacaaaaaaaaaaaaagcctagtatggtcgttgaaaggaaagatatccagatggatcaactgagttgctccatgcagtaccacaacttatcttttcactgctagcctctaaaatgggcatgatttcttttgatgcctataactgaaatattgtgatcactcaatgaatgatttgagaactacaatgtacaatacaaatgaaaggtattatcataaaatgaattataagagaaattccatacatgattgactagactcactgaatcctattaaatgaaatcaaccggtcagcgtgagagaggctataaatggcaaatatagcctaataaagaggttctgaaagaccagtaccctgaaatctgaatagattcattaatttgaggcatattttcatgttaataaaatgtgttacaaggtctcaaagcaacacatagcgaatgtacttggaaaatagacttttccctgtttggttcacatctgttttcctaagcctggaagttgatcaagtttgcttgttttccacttgctaccttctacctatagatatgaatgtggtgagcacggagaaagtgagatgggagagtggggtgcagtcatttcatgttctaactcaaggcctgaggttggcgtatgcagtggtggggcagtataggcagctcacagtcacacagttaaatgactttccagctgccagctcatgtgatcggtagtataagcaatctgttaataaaaatggaaaattctgaactaattaatttgaaaaggaatgcccataatctcagtcagagaaacatttattttggcacggcacaattctattctcttgtgactatgtcagtatggtaagtgtggcacatttgattccaattaaatcttaaatgactatagagcttaattccagttaaataccctagtgaagctgtagttttgtgagctgtagctatagaaaggggcttctgtgaattattttccttttactttgacatgattaggataattttgcacattagctagaaactgtttgcataaaataaggatataaactccaacctgattttataaataacattcagagcagagtttatgagcatggtgggctgtatgggagtgagcggggtggccaggagtcaggctgtgtacctagtcaggctgccaaggtggaatcccatctctgatgctccttaagtgagggacctcagaccacttaccttctgtatccttcaatctcccatttatgaaatggggttattaacaagtccttaatgattatttccctatctaccacaggggaaatgaatggtaaaaaatgccacgaactgcttagcacagtgccttccttatgggcagcgctaagagctgcgactagcaatagtcctgcaaatgtaatgatggcatttgaggccagtgtgctttcacagtgcttcctgccttttcacaggggtaattgcttcagcacaatggtcatgactataaatgaacaccacctgcccaggacatttgaatggtattatggggtacccttggcagattcccctacatgaggcctgagactgacatggaaatgtaatgtttttctttctagtggggagctgatgagattaacattctttgactatggtctgaggtttaaagctaggtcaccttgcaccttctaagaagagggatgaaaacatgtagtgtgcaaacttcttgtgaagtgtttctttgcttagaaatcatgcttgtttgcttttctatataaaaatagagagaaacttgtctcttgatgtcctaaacaataagagagaaggtcttagatatcaccatgagccctgatgtctttcctgaggacattgatgatagggtcagagcaccctgtgttcttaaccaggacactcttgattcactaacagaaaattgcgtctattatagagcatttcatatgtgggaaggctggggtagaagcagataaaattactttacagttttttagtcaaggacaaccattgctagtattttgccattcccaggcttttgttctctgtctctatgcaacaggttttggttttgtcttaaaaagtggtgattatcctatctgtgtaagttggttctgtgtgtttttgttttataagtatttcctatctcatttcaattttttcataaacaacttttacatgtgttataaaattcacgtgacataatttatgattcttttattatttgatgttaaagccttttagcagtcttactgtattacgaataatgctttggtgcccattgaggattcttttcttttttttcttttcttttctttttccctattttttttttttttagtagagatggagtttcatcatgttggccaggctggtctcaaactcctgacttcaggtgatctgcccaccttgtcctcccaaagtgctgggattataggtgtgagccactgtgcctggcctattttcttataatatgttcctaaaagtgagatcctaggtcaatgctataagtattttaagtttcttaatataaatcaccaaatggcattctagaagattggcatgaacctgaatgaccaacagcaggagtatggttatagaaattagggcatattcacatgatggaacattatacagctattaaaattgttttagaagaatattgaggccgggcgcagtggctcacacctataatcccagcactttgggaggccgaggtgggaggatcacctgaggtcgggaattcaagacaagcctgaccagcatagagaaactccatctctactaaaaatacaaaattagctggacgtggtggtgcatgcctgtaatcccagctactcgggaggctgaggcaggagaatcacttgaacccaggaggcagaggttgaggtaagcggaggttgcagtgagctgagatcatgtcattgcactccagcctgggcgacaggagtgaaactccatctcaaaataaataaataaataaaaataaaaaagaatattgacattgcttataatataaaaatttacctttttttggaaaaaatatgtatattatacacacaggaaaaaaggcataaaggaaacacaataacaatgaatgtctttgatttaaaaactgtaggtaatttttatttgctcttttatttgaatacattccaaagtctctacaagaaatatgtattccttttataatcagaaaattgatttctaaaagcatttaactataaatgtatgttgatgttaaggttccagcattcgtataaattcttttggctattttaatgctcttgaacaaaaataacattacctattttactaagaaagtgaatgctaatcattcagcctgtttagttcatatgctctagagtttttattttggggtcactcagggaatgacattatggagacagcccacaattgctatcttcacctacaaacagatttccctaaatcagtaattctttaatggtgagttctagacttcatattcacaatgtactcattcattaactcattcatttagtcattcacagtattgagtacttatagcgcttggcactgtactagagataaggagatagaaagatgaatgaaaaccgttcccatctgccagaaggtcacagcttaatgtattttaagaggcccttggctcatgccaaacattttgagaaactatcaaaagtaatgtaaatttctgccatctcttgtttaaacatctttaatgtcattttgcctgattttcttgacttcttacctgtacatattttttacttgagaactgtatgtccaatatagtagtaactaaccacatgtagctatttaaattaaaattaatcaaagttaaataaaattaaaaatttactttctctgttgaactagccatacttcaagtgcttagtagctgcatgtggctggtggctcacattgcagaaatttgtattggacagccctactttagaaggagagattatctcctttccccttgtccccactccatgtccttaccgagtccttccgaggatttaattgtggcttcccaagtgaactccaggtatttcccttgaatttaatcttgcacatcctcatcagaaagataatcttgaaagaaccatcgtgaatttatggctttctaattaaaaactgttggtttatctcttggcttccaaataaaatgtagactcttgaggcaggccttcagagccctctaaaacctattttccactctctttcaggccttctctctgctgcttcagctagttgcaaccattccccatctttgaagctccctccgctctttcttgcctctgagttatcccttacgcgaacccagctgtcagaaatgctattttccctcatggcccagactaggaattacttcacatgtcacttctgccatgagtccttctttgatccccaatcataagttaccccttcctcctccttgtaaatggctccaaatttgtaaaccttatgtggcatcattgcttcacattttgccttgtacttcttgcaaatacgtttctcgttttctatactataaagtcttggagtagtgtatatgtgccatggtagactcacaaatctttgttgtctaaacttagaggcactttgcagtcactatctttattttaattacaccatttgagtgcattaaatagcagagtgaccctcattccagtggagtttgagttggtcatctgttgcagagagctaatgttttgcccacatgcttgaaataatcggaagtacttggatttaatactgctcgtttctataggacttccaggaaaatcagggttcattaaatgggaagagagtgacattaagaatagaaaaatcccaaagccaaataagtagcaatgagtaaagaaaaactgtgtccttagcagctgtcccctccagctttacttttcaaattaaatgaataattaaagcttcctttagactttgcgatgttattgttctaattgtggtgttaccagttcacatgtcatagtggcaattttgtggcagatgcttagcagtacagctgattacatggccacagatgtagcattagtagctactgacttactgtagccctgtctttttcctaaagactccagcaaacctgcattcattgcatccagcatgattttttccagagtggagatggagttaacacagagactgctgtacctgagagcgagcctaccggtggctaaaccaggactgttctcttttgggtgtcctctaaggctgatttatccatacacccacttagagactatgatttttatctaccctgctttgttcccctatcaggcttttagagacttacctccctcttggtttgcgcttgtattgtggctctattgtctctaagagagagattcctgcataagaaattcctgcaattcctgcatgttttggaattcttgtgtttcggaattccgtgttttagaatccaagcaattcctgcgtgttttgcactcagtgaagaggaagaagagaagcagaagttctgtataggatcttcttaattctgtgacgtttcctgtttttttttttgtttgtttgtttaatctgttattacttgttgtctccaggtttccaactgtaggcaaaagaatagcagtttggatttgatttgaattggtgcttgcttttaatttcatctgttaccttttcttgtttatggggactgttagttttgtggatctttaaacagaggtctaaactttactccagccctttagaaattgtgtagtaaatccaaaagttgtatagtaaattcaaattcaaaaagccaggccaggcatggtgacttacatctgtaatcccagcactttgggaggctgaggcggatggatcacttgtgctcaggagttcgagactgggctgggcaacatagtgaaacacgtcgtctctactaaaaatacaaaaattagccgggcatggtggtgcgtgcctgtagtcccagctatttggaaggctgaggtgaggatcccttgagcctgggaggtggaagttgcagtgagccgagatcatgcccctgcactccagcctgggtaacagagcgagaccctatcccccgctcccctccaaaaaaaaagccacagcatacttctccattcctttgatatacctttaacacaaacatgtgtatgaaaagccatggaatcatattattttctatatattttaagattaagaaggagctgagagatgatcaagactaacccttttgatgaagcattggtgtagacaactgatagaccttgtccaaggaagcactcctgatcaggaacagtgctgggactggaacctgggccccctgacttccaggttcgtgctccagcaaagagattctttcactctagaaaaagaagaaagtatcagctgtgcaaaacaattcctcaaggttcctagacctcccagtacggtcagtatttaggttctcataccattgttcagtgacttgcacaccagttttgatgtggacatcaaacacaactacttaatgagatgccacaaaactgtgtgtcaaagaacatgtcaggactgaacattttgctggtagatcttatgtaaaacaggagagatgggagtccttaaatgatattgttcagatcatttgtgaggtggagtaaagcgggaaagccaacagatgaaggaaaggagccacataaagcagacggttttctattggggcatttatgtccacaccctctgagttcatgatgaaggagatagaatctaaagctgtatctgcaaagtcccatggttgaatccaagaggtggttattgatgtattgataacaattgatttttgacgtcttatgctatctatgataaatatctaaagatgttttaaatctaattagcaccattcattgggtgaccatagaactgaagagcgatgtactttgcttcatgttttcaggaaggggagtcctgagcctggctactaggcgctgattataaaatacattataatgattaataattatgcattacatgatccaattaaacacaattatagcttcatttggtagtaagaatttcttcacgtggtgaggagagtgtgtctaatcagaaaagtctgccttagaagttgcatttttgataggagagaaggatgtgattcagtggagagtaagggaggaggcccttgtaaaggacaggaatggaaaaggaacagactgctggggtaaaagggagagtcacctcacttcacaagctatccatcacctgttcgcagagctcacatttaaactgtcaaggcctgaccttttacttagatacttttataattcttactaaactagatgtcttagtccatttggattgctataacaaaaatatcttaaactgggtggcttataaacaacaaacatttacttctgacagttctggaggctgggaattcccagatcaaggtgccagcaggttctgtgtctagtgaaggttatttccttgcagatggtgccttctcactgtgcccttacatgcgggtaatatgctccctggagcctcttttataagggcattaatcccgttcatgaaggtggggcccttatgacctaatcatctcccaaaggccccacttcttaataccatcttattgggtgttaggtttcaacatataaattttggggggacatcaacattcagaccatagcactggatgcaatttttaaaattaactttcttgttcctccctggggtaaatagcaaaagcaattagagaaccaccatgcccggctaattttatatttttagcagagatagggtttctccctgttggtcaggctggtctgaaactccggacctcaggtgctccacccatctcggcctcccaaagtgctgggattacaggtgtgaacctcagcctcccaaagtgctgggattacaggcgtgagccaccgcacccggcctagagaacatatttcttttaatgtcacctaaagtcttgtccacaaaataacctgaatgcactgtatcgtgcaaagtctctgacataatcctatggaccatatatagtacattaatgtgggaatttgctaactgttgtcaaatgcttttagagcataaaaccactttcaaagctcagtatgattaattcgtaagaacacttcagtgaggtatatagatgctgagccctattatttttgttgtcattatctttcttatttcacagttggccacactaaaatgcaggaaggttaactgctttagccaaggtcacttaggaatcccttgatgtggctagagcaggacaggagagctgtaggctgaagcacaaccctttatctattaaaaagggagagtttgctcttttgtctactaaaaattaagccaaaaaggcactataaaattttgggaattgaagaatttcttttttatctctatttgtttcttgaataatattggaggggtatgtaatattgcccaaattgactgatagtgcatttataatttttaacaatttttggaagaaattctttctagagtagctgattttgtctgttggatggtttccaaaagatttttaagattatatgtgtagtttgtgagaaacagctcacatttcatttatcagtgagtcaaatacatctttctttggatagaaagggtaaatttacatttctttgagttcagttttgacccttgtgcaagctgtggctgcctcagaagatagcagcatttgtgctgaagtctctgttgtgtgctgattaagtaccattgaatggattaacagggatatgcaaatgatttttagtaatttttcataagcaaagacacaatttcaatcctttctttagagctactcacttgttctaaattattgaggcagagtaatccagcaaggaactacactgtttttcttttgacattagatatcctgataggttagcattttcctttattctaaaaggaggctcaaagtgacccctgcttttcaagctggtgggattgaacttccctttgtaatgacaggttgcaatgcctcttctactggtaaatctgtctttagagtggaagaagacaccctgaccatcgtcatcatattggcggtaatagtaaccacttggggtgatacagtttacacccctgtgtctgctcccattggtgacctataagtaaccactatttgcctcaaatatttcaggtttgtggggctccctgggataggtgtgtatgtataccacccatttgtaagtgctaagacagggttgcaatacatttttttaaataccgtgttagctgacccagcctatactgttggtagcaaaaacattactatctctccacacagtaactgccttgctgcagctagcccttctgtggaaataaaaaaatgacatgaaaacaaacaaaaatctcctgatacaatggagactcactaagtactccactggaaatcagtgatgtagaaatatggaaattccaggtcttgtcccactagaaattccacttccactctccagtggatgcttacagtcttactaagaaagagagtgagacctgcaaatggttctatcagatgttggcaaaactgtgtggagtgggtttggggtcagccagtcttaggttcgacccttactggcccagcagactttgtggccctgagcaggttatttacccttgagccttggattccttctcagtaaaatgcgaatgataatacttatcttggaggttgctgaaaggattggaaaccttgtttgcaaggtgctttggatagtctagaacttagtaaaagatcagttaatacccattactattgttattactaacaataataatggcacaagtcagtgtgtgctaagtgcaaaatcgttggtacaagtataaatgttataggaggtcaaagcaaattaaatttctttcactacaatttctagatttgaaaaattgggctcattcatcctttcctttagttccaccctgatttcttttgttccctgaaaatgtacttattttcatagctgccttcatattggctagctcttgattattcatagtggtggaagccaagaagcacataaataattgaaattccaaggtagaatgctgggaaaccttattttactctgttttcttctctagtcttgcatttaccagaattctatcagggctctagtaagcaacaaactgaactgtcctttatcttccttctatttctttcccattgacccatagggttgctaatgacttgtgaaatgacttaaagatggctatcagataggagaagaagagatttctcttgaatcatgtatgaattacataattaattgtacaatactttcaaaatggctgaacccatttctctgaatctgagatacaagtagaagtttcagaaagtattacaatgcctctaaggcattgttttgttggaaaatagtgatgttgataatccaggctatgagatacagcccaaaacatttctccttgtcttttgtatgcagcatgatttttcccgctgatttatctctctttatagtttgcttaatctggtactaaatgtagtatttcctgagtggtcactgactcatgagggcaaagtgagcctgaaatttataaagcattagtagagacctttatagaattgaaactaggccatagaaaatccacaggataaatgagaatcttctatagatgaaaactgccctgttcaggcatttgttttcatcactgtaaataaaaaaaaagtttcttctggctattcaaggaaggggggaaaagtccatcagtccttctgaagattaggaagatggtaggcagtcacctacacaaatctctggggaactcatctgccacacacaggttcgcacctcctcattttgcacacatttctcacctcctcctcattcatccccctccgcaagtgagaatcactgcatataacaaaagatatttctcagagtggtttattacaaatgtagatgaggtgaaagcttaaaccaccaagtacttaaaattctcacaactgactacagcctcctgcgtagatgcttggtccttcctgagggatttctcattaatggaaaggatttcaaaagagaaaataaattattcctgtacataaaggagggtagataaaaagaaagggaggggagcaaaggaaagagagagggaagggctgtcaattttccatcagtggatgatttttcccaggagaattcacactgtttacaaatcaggatcatgtttattgaaaaaaagagtttctctgttcagccagggtttcctctcattaaattttctaacaacagcagcaaactaaagagacctcaagcatgactccaaagttgaggcaagcatgacatctattcactggagcagtggatagatggtggtgcctactctgatgactgctaagagaggaacacattttagggtgaaagatcatgggtatggggaatcaaaagttcattccggccacactttgttggatatgaagtgcttttgtaggcagttggctctgtgaatctgaaaccgggtggagaagataggattggggaaaaacttggaaatgattgtcacgtgaatggcattgaaagcacagatctggatggaatcacataggaagtgtaaatagagagtatttgagaagagccaatacttatgtagatgaggtgaattgtcctcttccaacagaatctttttaaattaagaaaaataacttattcaactaagaagaaaagtaatacttgtaatcctgatcagtaatatccttctccttatggaatgccaggttttaaaccttaaacatctgtctggtctcttatacatgttaaaagcaatatgagctcagtgagactaggccattccctccccatggaaggaagagggtggcagataatcacaagcaagtgctggctgaatattttagcctcttcctgttgctcagtcaataagctatttacattcatggccccatcttcttcctctctgcattgattttggtgcttctgtaaactcctaaattgcatccacttagcttctgaaaccaatgaagaaaactgccttagtatttcatcaaaaaatgaaaggaaaaggaatctatagcaaaacactgtgtgtttcatggtatcattagaatgccctttgcctgaggcagaattggatgaaaaagagcaggaaatggttttgtaaaaaaaaaaaaaaaaaaaattgtaatgaggaagacaggagtttggaatattctaggccaattgtttttgtatatatgacatttttatgttagacttgagatagggggcaaagaaaacttccattttctggttaagctccaaagttacaatattagtacagtttctcaagtccttgctccaagcacaagccttagaaagaaatagccaaggagggtacacattttgacagctagaaagctggaacagggcagagactgtgccacaaaaaaattttcctctttttaatgtaagttcaaataaatcacttgtataacattactagttttaaaatgtccacatgtgtttccagtgtggttttaagtttcattcaaaaagtagtgtttttaaaattatgattataatatatattcactgtagaatttcccaaagtgggaaatacaaaaaaagtattgcaacagtaaaataaaatttaccaacagcatctgagatcactgttaaaactgggaagataaaagatgaaagctcctttatccatcctttgcaatgtcttccattttacctgcatctgtactgtgtactctgccttaccttgtgctacaacagtgaagggcagcccctccacttgagtcctgtatctaatgccttttcttttcatcatcttttgtatcacccacctttaatgaaactctaccttcccttccaactattcttgctttggtagctttcatacagttgagttttcttatttgctgtctgtgcttccctcttactctcttcctccagtggtattccttctcatcattctcctaaaactgccattgttgaagttacctatgacctcagttttgccaaatccagtagttaattctctgtccactttactatatctctctgcagcatttgacacgattgattatttctccttcctcaacaatctttctgttcatcttctatgacattatgccaatcagtttcttgataaatcacaagctattcttatcttcctgtgcttgacctattaatttgggtaagactgttcttcttaattttttttttttttaagataaggtcttgctctatagcccaggcttgagtgcagtggcacgatcttggctcaccacaacctccacccctaggttcaaatgattctcctgcctcagcctcctgagtagtggggattacaggcatgtgccaccatgccaggccagtttttgtattttcagtagagatgaggttttgccatgttggccaggctggtctcaaactcctgacctcaaatgatctgcccatctcagcctcccaaagtgctgggattacaggcatgagccactgtgcccggtggctatttatactttttatatgattccatccagtgctttaaatgacatccatatgacaataattcgcaacttttgcaccaatcctatcctctttacccagcagcttcagattcatatagccagttgcctactaagcactttacatccaacaaaacatggccggaatgaacttttgattccccatatccatgttctttcaccctataatctgttccctcttagcagtcatcagagcaggcaccatcatctctctactgctccagctctcaactttcaatccatgcttgatgtctcttcttccctcaaacttcacttctactccatcagcaagtactcagatgatatcacactcctgttgaaaatcttgcaatgaatttttattaagtaaaataaaatgtcaactcattaccctggccttgcatgatcggatccttgccagttcctgcggatgcctcctgaatcagtctcccgcccccttcctttttgtgttacagtcccaatgagctcattgaatctaggaggtctttgtctttgtctttgctgttatttaaagtcctttatgtccttacatcttcatgtgctggccttcctgtgttatttaggctccatcccagatatctttgctcaaagaagcaatccctgattgtacagtgtcaagaagccccacctcacaatgactttccattacatatgcctatcgtattttcttcacagcacttagtagcatctgaaaaggtctttcttctttaattatttgatcattatatcttattaatttagagtgtaacctccaggaaagtggcaaccttgtctgttttaattaccacactgtactcagggaatataggtgcttcgtatgggttgagtgattatgaaataaacagtttgaagtattttcctctaatccttgtttactgtgaactaagtcattgtatttcagtcatatatagtattttattgcctgatgttttttcaattaccatcataaaattaaacattttcctgtgttgttaaggcattttaagcaatattttttattataaaactaatacaagttaattgggcaaactttaaaaatacagggagaaaaataagggggaaaaccaatccatgatattcattaataatttgccaaaaatccatcatctgtagacttataaatatataacacattaagtttgcatgctaatgaatataattttagtaacttgtgttttgttcttatgaatatgtcataattcacttagtatcttatgatcatttagttaactccagtttttcaatattaaatactgatgtagtatgtaccattttttgaccttaaaatgatttcaaattctatagatcaaagatttgttctttcaatactgttggtaaaagacaagcctgcagtcactgttgtgtctgtgccatggtaaaaattatggtataataatgtcatagttgcctgattctgccttgacttactacttccttttctacacaagtttttcttgagtaaaaaagggtggcctcttagaccaaggagtccccatgagagggagggacatgagcagcccacacaaagatgttaccattatggcattttctctaagacctattcacaagctaccaatcaagacacatgcttttggggtaacagtaaatggcctgtatctcagggggttctgccttggtatctccttcttacaatatcagaagagaacttttatcttgggacaacagtaaacaaatgacagggccagttgaggaggaatttagtaatagatgctctctatgaactatacatatttgtattaatatattcatatatagatgcttctgtatcaagatgctagtataaaattcaaattcaactatcttgttttgagtaataagtgctttcatttaaatatacattaacacttttatccaggaggttaacagtacctccctcatagtccaggtctaggttcagattgttttcttcttgttcttttctaacactttgtttttctcagacaagaccttcttcaaactggcacatggaagaatctgtgccaaaatattaatgggggttattcatgcttgtggtgttatgggtggtatgttttcatatatttttctacattttctagtttgttgaattgtttgcagagtttccaacaatatggaaaaatgccaattttataatgtggatcgaaaaaagaagtcgcgctatgaaatagtatgtaaacatgctcagactcaggttactggtttcttggctgttcgggggtacacccggccctggcacttgtaagtaggaatatggtcatgtcagttgttggagactgtcaatgttgatctgcctttaaactatgttttctgactcagctacacagagtttagctgatagtttgctattagtatgcagactatataaaaatgcttgtgtgtttatatgtctagctccctttctagtctgtgagttctttcaactgttattttactcattattatatttccagcatttagcacaatgtctggcaacccacaaagactcaaaacatgtttatagtgccgatttccaaaagaaaaatctggtaagtatcaatttagctatgatttctctgacattactgttgatgcttttctattccctattcctattttattcttctctttattcctgtctctgtgtttttgtttcacattgttatcactcagcagctttgcagtgatcccaagaccactctggaaagaactgcagggcctgcttacatcatggtgatggagctcctctgtagaagggtttcagagactgcctctgtgaatttagaaaaagttcttctcagccaacttctgcctagagttttcccagtactcaaaaggtgtttttggaattgttatttcctgtcacttactccaaaaaggcatttgtgccatcttgctgttactctgttcatgaccattataggtgggatcctctcaaaacctagtgtattagtcagagtgctccaaagaaagagaattgtatatatacagatagatagatagatagatagatagatagatagatagatggatggatagataggtagagatcaacctatgtctgtctatctatctatctatctatctatctatctatctatctatctatctatatctatctcccattggtgcttcattatatataataaagaaatctcattttatatatatgtatatattatatatagagacatatcgatatattatggataaagagattcattataaggagttggctcatgtgattatggaggctgagaagtcctgtgatctgctgtctgcaagctggacacccaggaaagctgatggtgtaatttcagtccaattcctaaggcctgagaaccaagggagttgatcatgtaaatcccaggcagttacaggaaaaggccaatattccagctcatgcaaatagaccaaaagcaagaggggtgaattacttatttctctgcctttttgctctatccaggtgcttatggattggatgatgcccatccaccctgggaagggccatctactttattttactgagttgactgattcaaatgctaatctcatccagaaacagccccatagatacacccagaaataatgttttatctgcgcacttcctggggcagtcaagttgacacaaaaaattagccatcacacctggataatggagctagatttaagagagacactatatccatacaaagtacatttaatgtgctatcaatatgcaaactatataggaatgtttgtgtgctcatgtctagcttcctttctagtttgtgagttctttcaactgttattttactcattattatatttccagtatttagcacagtgcctggcaacccacagagactcaaaacatgtttatagtgctggtttccaaaaggaaaatctgaaaatatctatttagatatcacttgtcatagcttccattaatctctaggtggaatgtattaactccttgaaggcagggatcctcacttcttagaaaattctctgccccctcgtctctagaacagtgctgcacacagtaagtgctcagtaaacactattcaggctttagcttgattttgtaaatgagaggactgtcttgattttggaacattttcttgatttaattcttctcaaaactggacattggtttccagatggatgctgttaaattagcagtaacttggcttgtaaccttctaattgtatcacattctttttggataagtttaaccatgattgtcatttgtggaaactgatatacagatatttcatactcagtgacaccatcattatttattagctatctgttgactctatgatatgcttctagatgcttgacataaaccatacgaagagctaaaactagaaccaaaaatttatgtggtattttattctcccaaaagttacattctcttctcacttgactagggagtagatacaggttattcactggcaaacaaaagacatcatgttttatctccttatgtagggaggagatacaggttattcactggcaaacaaaaggcattatgttttatcgaaggatgaattctcgcatgctctaaaagtgccccttggttaacacatagaactctcttctccttgacagtatctaaaggcaggcacccaggggattcagtaacagggtcacgttgctctttacagatattcctgggacaaagaatatgtttgcagatcaagttctactgaaaaaagatttcagtgcttagcatgatattctataattcttgtggtagagatgcaaatagaattctaaaaatacttgtgaataagtacctgctcccaagaaacttacacagagattcagaagtgcataaagtgctatcagccaaatagggtagctctgactgtatatgcagcagtggtttggggaaaggagagaacccgacaaagatggaatagttagaaaaggcttcagagtcacgaaggaggagtctgggcatgaagagcatcatcagctcagaaacagaggttgcagcagagggacctgggggaggtaaagtcactagagatgggggagggttggatctgtggcacagggagaagaccaggttcagaaatcacagaatgagtgctagggagtgaaggacagtgagtttgaatttataaaatgtcaaaacctctgttttactacccatcttcaatctgttactatttgcaaatattgtcaacagctgatcaaacattcgctttatgtaatcacacaaagaccatgcagaatatccccactttgcactggagcaatgggcctcccatttaatgaggccccaaaaacccacatattttgttaaactgggacactgcttttaagcttgtgagtctgtttgccatcatcttgaagggaggaggctcctcacaggttttagattattgagtacatacattcttaaatagtattgttggtgtcccttggtaaatatggtttacagattcttcagacctgcaatattttctttttaccagacttatgttccagagatgttgtagttgatataaattatattggaagcttgaggaaatgcaataagaatgcactttgcccttaattcagtttttattaacatttttacttaccttcagcagaatctctttaggctcagctaccttcccaaattgttactagatctttactaaaagaatttatgccaaggaccaaataattctttggcacatgttatgttattttaggtgccagcctttattcaaatagtatctgtgtaatttaatttagagtttagttttccttttagagttcaaatttttattttaaatttaattaacatgtgctgaaataaaaatagatgttttcaggctgggcgcggttgctcatgcctgtaatcccagcgctttgggaggccaaggcaggaggatcgcttgagcccaggagtttaagaccaacctgggtaacatagcgagacacagtctctattaaaaataagtaatacaaattaaaattaaacaaatagatgttttcatacaaactaaaagaaaaatgggatatgtgtttccttgggttaagtacaatattaatcatgtgtttttatagaaatagtaaatactcagtttatggaaaaggtaattaattcttttagttcacctgaaataacaaaaaaaattactgctaatatatagtcaggacacaaatatatgcacatactcattacctacattattttttattcccttcattgtggagctctttccttgggttggatgatcttcttggggatagggagacactccgcccttcactgccagctacagtgctacacatcattgcctgtgctttctctacggtggggagggatagagagtagtgatccttagactttttactggaaccgataactgatgtttctttgggtgtgctgtgatcacggcatcctgttactgctatttctcgtgtacactggcatctcccagcagtagtctctcctgggccgcagagctgtgatgacaaaactgtcatggtgctaatgagaatgtgggtgctgtctgggaagcccccttgtgtgtggctatgggtggtgtctgcagtatttatgggccacctggcatcgtctgttacaagatgtgctgctaccacagcatccttgcaattttggtgggcatgttaaatcattgtattctgacattagtgcctgcattaaaaacaacaacaaaaaggtgttttttgtttcttcatggcttccttccttccaaaaaaaaaaagatggagcagtaaatcaaatggaaagaatttgttacctcaattttttgttactaacattgaaagttattaagcacatctgatcttatttctcatttgttttaaatagttaaactgattaggatcatgtacaagcatctacacatgataagcaaggccttcatgatcagacatctgcctgcatgtctaagattgtcaccctccagtttctcgatccttctgtgcctgtgccttctgccctactctggtctcacagatggttcttctgcctgatgtgcccctcccagctccactactcagctctgtctgtcggctgtgtggttctctgagggtggtcctgggaccacttgaatcaagatcagatggaagcttattcaaaacacaggctctgggtcacatctgagatacgctgcttataattctctgggaaagcagtattggactctgtgtttaaaaagttcaatctaaaatgtgaaaaccactgatctaccaaacaacatccttctttgaagaatcagttccaccactgccacctagaaggccctcccctactccccatgggctgttagggtctctcctctctcctccccttcctgttcttccagcctcatgtgttgtgtgagatgcatcgctgtctgtggtactggcctgcccccaccatgggtccgtgagctccctgtggcctgggacatcttctgacagctccacttgtccagtacttatctcaaggccttattaaaaaaaaaagcagagtttaataaatgtttataatttgttcattgccaattcagaattagtgtgtcatggcattacattaacctaagagtatttttaaattaaagtcataatgacttcatagtttgactctacaagggtaagaaaaaaggtgaggaaacattttcttcttttgaaaaagagatcctgtttaaacagttgaaggggaaaacaatatcataatttttaaattatgaactaaaagctaaatatgaataaaagtaacttgttaccaatttgtcatgccaggttatttctcatgtgaaaagtgaacattgacacagatcaaagaaaatggaaaaataaaaacaagtgaaattctcttcatgaaactgaaaaataatttgtattgttatgttaaacaaacccataaaataggaaagctgtattattacaacaagtagacaatttgttccttttctttccaaagtgatattgcttaaacattttgtattacattttcacagaccagaagctacagaatatttaatacagggtcataaaaaaggcatacccataaaatatctgttagcagaggctttgtgtcagaattcttttggtgttgcaattgcaattttatttaggaagataaaccacccagcattggcctcgaatcaatgactgtattgaatagttaccctttccccaaactctgtcctaacatattgaggacattttatgtaattggaaatttactggatggtcatttatttctgggagctttttcctcctcatttctctttttgtttctctagaggagcagaagaagaaataaattagacttaatgtgtcctgtagtcatacaagaagaatccaaaggagattctgaagtagcattgatggttttattcagtcttaaagttgctctttgccagcacttcaagtgacacatctaattataaatttgtctctgtgagaccctgtcattggtaacgcaattggccaagggttatttgtggcagattcacataaagtgactcaggtaggacttctgtagaaactgagggggactgttgtcaatgtatccgaaagaaagaagatctgagtgtgctcaattatgtaaaaccttataatctagcagaataagtaaaattggacacatttatattggaagaaattaaactaagtctgaatagcactgtggaggaaaaaaaaaatgccacatccttcacctgaactaccgttggctttcagtctttcactctggagtccctaaggtacccagtgattccctgcatattttataaaatatatctcagcatggcatattggactagtaaacacaaaatgtatttgtgtttgtgtgtgtgtgtttgtgtgtgatctagtatcttctgttcttattctggaataaatgggcatttctctggagaactttggttcttaaagcacacctgttcaaaggagtcaagtaaggcggcatcaaaaggtggctggtgtagatagagaggacctggccatctttagaactctcacttaaaaggaggcctccatggaaacctgtttcccactctgcatctccaccctccaacccgagcttgcatagctatcacctagtggtttgagggttctgtgagtgctccattatccggagacacatgccccacctttgcttcagctgcctggtttactctgtaattgccactcacagtgcaaaattattgaagggctcatacattcaagggatttcagctgcagttttggaaaggactatactagtgaaggcctgttgttaataaagaagggggccgggcacggtggctcacgcctgtaatcccagcaatttgggaggccaaggcgggtggaccacctgaggtcaggagttcgagactagcctggccaacctggtgaaaccccatatctctaataaaaatacaaaagttagctgggcgtggtgtcgggtgtctgtaatcccagctactccggaggctggggcaggaaaatcacttgaacccaggaggcggaggttccagtgagccgagattgcatcattgcactccagcctgggcgacagagtgagactccatcacacacacaaaaaaattaattaaaatgataaaataaagaggggaagaaacctttcaaatacattaagagggaaagtccctgctctcacagctgaacccgggcatattccccaggaaataaaacaaatagaagctgtatgttgttcatcagacttcagagcacaagtcctgtaacaatgaagacaccaagagaatgagaaaggacgcagattcacttctgtggacctcacttggtggactcattatagttgtcttccttgaaaacatccaaggagaagagcctttaagagagtgaatggaagtgcgacttgtaagagtgctagtaagtgagaaggggaaggcatctcggattggatggaaaggaatcagtgatttttacttgttagtgtctgagtcctttctcctgtgcaatggccgggtagtatatatttgggaaatgatatgcacactcagccacaaggagaaggcatgtttctaaactactacgtctaggaccagggagatcagatggaaaaaaatgaatggagcgctagaggaggtgaaaatctcaggttctggtctctgctctgtcacagtttcctgtgtaattttgggaatacctgtctggagtatttatttctttcctgtgataacagatagaaaagaataaatgcattccatgtatcctatccacaccatcttctggagacaggataagaatcatttggtgattagttgttgaaaaaaatgttagggtgaattccttttttgtgaaaagtaactggatttttctaggataacaataaatgggaatgattatcatgtttacatgaggttaaagctttttcctacaagaataaattcaaatgccataaaaatgaattctagttccttggttaatttctctacaaggttgaacatcctggtctctaatgatacacatgatacatgtggtacaatacacgtgtaagtaccaatggataacataaagccagttacaattcaacttagcaacacagctgtatgtattcttggtaaatcagtatgtgggggttcagaaatgacactgggagacagagaggtatgcagagattccttgagggattgggacctaacggcaaccacttttacagaatgtcctggttgggctgtgtgtgattaaagaagctgcctgccacagcaaagggattaccctcttgtttctgctctcacttggcctccgcttatcatggtacctaaaacactctaggaaattaattgattaatatcttccaggagaaaatactgaaggtctgaaataaagcaatggcagtgaggatggaaaggaggggacagacttcagtgatgtgctcagggtggaaaggtggaaatgatagaaattcatgcctcctttgtctgatgtagctttctctcctcctctggccaacattcctgcatccttcagtctttctatattcagtgcaggcatcttctcctccaacaaaccttcctcagtctgctgggatgctgcagtagctagcatccagcttctatttctaccataactgcatgatggttgttgattttcttggctgtctccctggctggtctctaaatcctttcagacaaaacccgtcttcctcaactatgtagttcatggttttcctcaactatgtagttcatggtgcctagaagagagatttgttcactgtggatgtccactgaatattgattgagcaaatgcctgtatatctgaagtggagagagggagaaggaggtaaccacggtgatgatgggccgctaatggaaatgtttagtattctccataacattagataaatcgaaaagcattatctaaaacttgagttactattaaacttgttttgaaatcagtggggtttttttcactcaaattcttttaaaagttaacttccaaattcagaaatttgttggaccaagaatcaggcttttttctgtagttttacatgtttgtctatgttattaactatttattataaataactaatccatatattatggaagattaatttatgggagtactcattcctttgcttagtaagttagaagcagtgtgcatagatgaaatgcgatacattacatcccaaaataaaataatttaagtcatataaaagaaatcatcttgacttcttaaattttttgtctgtgtttataatttaaaaagttctctttttaatttagctcttagtagccagtgtttaattaccgtataaaaactggcatataataatgattagaaagttgataatgtgaaaaaaaatgaaccaagaatgaattgctaaatgttattaaattaaaattgaagctaattttgctcaaaatttggcaagagctttcttaacaaattaaacatattagatttgggggtttttgcacttctttgaatatatccagcacaaaatattatatttgatagagaagaaatattgaagaagagttcctcttgaccatttagtttagcaaaggttttaccaaaggaattttccattttagctagcctattttgactttctgtggcttatatatatatattttttaagcgagtggagagatgaaatggttagctggattattcaagccctctaagttctgcagatacatattgcttcttgcagtactttcctgatgttccttcacatcttcgtcttttccgagatgtaagtaattactggtaatttcagccctctagtgctttgcctgtgtctctagtgtagtagcgatgccatctcagtgtgattgtacctgtctgcctctgggactacaactggttgtaatagccttatagaaagagacagcatattgcattttcattttttgtttccctagtgccttgtacccagcagatgttcagcaaatgctttgagaaattactctaattatcctttgattttatgtttcacattgttgagaagctctatgtagcttacttggtcaatcaaaacccacaaacatctactacaagtttattccatgagcctgtctggccttctaaagacagagtttactgtatgctcttgatgacctttttttctgatttattttcagtcctgagcactaacccatttgttttccctcaaggtgagcaaggaaacagggctgtcatagggaggatttgggggtcatgcccaggtgtgggcagcctgatgtaaagcatcaggggagctgcctatattccacagtggatgtgagtgtaatgccatgaagaaagatatcagccaccttgaaggaggaaaggaaccagggctatttgaactacactggtaaagagggaaagtgcgtggtggtgggcagtttgccgatggcagaggagagggcggagatagagctatgaactgaatggccacaagaatcccaatctcagatgcattttgaacacaaagtggctggcagcacacagtgcctgtgttgcagggttacccgtgtgcgagagaggtggggaggaaaggaaaataacctactgggaggccaggagacaaaagtagagtgacttgaagtactttcagggcagctctactggcaagagagttaagaagtgtcttgctttggtgactggtgccttatagttaaaatccttgtgaataggattattttttcacctaaaacagttactgctatcctaggccttatacagttaggctagcctgaggcatactaacttagttaaaatatttctagcattagaaacaatgctttggggtttacttgatacagtgttgcaattcaaacctgatacaggtttttttttttttcttacatttggcatcttccagctgtataagtggtgaaatgaggatgctgaccataaccttaattcccctatgaaatcaagattgagttttcgatacattaaaaacagtccaagacttggcttcttctgagaattgtaatcatatgcagagaagtcataagtggttgttaatgagaatgtaaaagggtaatattagatgtttttgatcagaaaggtgtattcagaccatttcctggggatatgaataatcctgatggatttcagagtgcaaatcatgacattacttttaggacatggccaaggatgaagagatacatcatggaagcattatgccactgacagaaatgttaagatatttcatggctcttggcccagttcaaaaaatcagccagcattttttttttcaggaactgctcaataccaaattgttctccagctgattggagcaccaaggatatcaaagcacacagttcctgctgcccacacccagcttattctttgggatcaaatgattaaagccaggaaaaatgcatgattactccaaaacagctataaagggaactgtttaatgttcattttctattatagaaaaatgagaggataagtaagaataaagaagtaatgaattttcagaaaggaattaggagaaaaagattaaaggaatatcaaatacataggcttgcacagatcacaatgggtttacattatgtaaaataaatgtgaagacttgagtttatgtagatcggtgaaaaagatagcagtggagtggtaccattgagaaagattttattggcattgaatggaagaaatgtggaaccaagaggaacaagtatattaatttgacaggcatggggcaaaagaggaaggcttcccctctgttttttgaagcttccctgaaaatgatcttacaatgggcagataaatagaaaaggcacacaaacttattcaatgtgcacaggggaaaaatcacgggaaagtgatcactcaataacccaatggggtccagatgcttatttacccttcttcatagggaaaggtgagatggggagaatatggcaatttcaagagcagtaaataatttttagggggagtgaatgagccaaatgtccagacaatgattagtaaataattctttttgtgcattaaacagacaatacttggggacaaagttcacctgggccctaggtgtggtgtttaatttttagtctcttcctctatgatatgaatttaatcttctctgattaatgaaattttagggaggggatcaaagctaattgcatttctcattggtggatctagtttccaggtagataagggaacttcagagaacagctttatccagtgcttttggagagaaagagtcagcgacaggagcagggttggttagagagaccttgaggctgcttctttaattcagcatgtcagagggccatatttcagggtattgtttgctgagccccaacacaggcaagaggattccttaaccctgtggacttgcagacacctttcaaaaattatgaaagatgaatgttgaaaatagttgggaggagattgattcattcattcactcattcagcaaatgtgtatgaaatgctttccatatgtcaggcatggtaccaaaaacacaaataagacgtggcacccagactcaggagacttaggatttagaagaaagatgggaatcataggtgaataagggcagttaaggggaacagatgaataacggcagttaaggggaacagtaagatggggacacaaagaagatggaaaataataaactgaggttctctctgtgaattggaatcatatttgctgtagctccttgtctaattttatcagaacttgtctgtttttctattcgcgtggcacacccatgtgttttatcactttatcactaagtaacaaagatcaatgtatacaaaataatgtaagactttatagaacaaagcaaatagatgaataatgatggtgtagaatttctatgtttagctcttatatatttgacatatacttacctgaagttacttagaaaaacctacatcagaaaaacaaatgtaatttattctgcagtgtcattttatggtaaatgcttaggaaatctggttagaaaggtgtttgccgatgaagtgcaaagtcttctatattaatatatcctcatttattccttgttgtatatggggatgagaatgaagagcaggggctttaatttcttttgtaaatgctataaaatgagaaggtatttcaaattacctagagtcacataatttgtcattggctgattaatagttcagacctggccatctgattctaaagccagggccccaaactactaattggatctttctagtctgtgacctttgtaaagtcaagacctgtgtagtagccatactcttaaggtgcttcaaatcttctatataacatgacaaagtttcaatacagagacatattcatccctgattttctcacaacatgcagcagtctttgcattgcccagggcataatcaatatttttcaacttgaattcatgctgatgtcaagtggaggtgaatctaaattgggagatattcctcttcccctcttggctcattgtgccttagtgttccatttttctctacctgggagtatctagaattatgtggcaatattgagagaaccttagaaaaatcaatcaaacaaacaaactcagatccaaacatttaggctgaacgtttttaagatttactaaatcatgtccccaaatctcttctcctagtgaaagatagctgaagaatagaccgaagtggctgttctctcatgaagaggaacccactctactccaaaggctggcattcaagaagggagtgattttccaagagcgcagggctccagggaagaccatgaacgttctacccagtagtgccacacttaggatcccagtcacagtatggtggaggaagccgccacccatcctctctagttcagtcttctgagtggtgcaaggaaatcttccagacatacaccttgctaggtcattgctagctgctgctagactcttttgcagtgaaaggaactctctctcaccatgcagctgcctcctttcgttttcttcatgttcattcaaagccaggatccttataatgtgctacctctgttctgcgaggccaccctgaaattctacccctgtaaaccatgtgggatggacttgagacttctttttcctacagatgaacgtttcaaatattttcagacaagatgattaagtcattttccagtttgccttttccagacaagcagccctacttatatgacatgctcaactctgaacgcttcccctaggaattgggtgcccggcactgcgggtggcagtttggtgggatatgatctgaagacggtgggagtctaatttttaaacctaaaatttcattaattgaatagtcataatttgaaatgtctgaatatattggaaaagtagttcctaaattaggggaatgagttatttggaggtcacagagacaggcaagagcctagaattttttagctctaactcatattctgtccaggagtcaccttgctgaatgtcttgttaatgataggttggcatgccgctagcagtctcagtcactctagaaattagtattggtacagccactttaacatttcaaaagaaaagttattacagaatattattattttaagactacaatcgataagctggtgggcattttctctttgtggtttctgatttctctgaaatcccatgagaataaagaatctctcaggtgatcaaatcttcaattttttctttattgccatagcaagtaagtctgtttttactgctcaagttagttaatcaattgtggtctctgatttatgctgtttgacagctgccatccctgaagattactggctctttgttcttctttggctaataagtgcccctattagaagacagtactcccagatataatatacactgaattatctgaaggacttcttcagtatgtgagtctgagatttcattgcagtataattaacctgaataacagttaaggccatattttcccccattgtatgttattgattaagaagtgaaacaagtacacaattcccagttctctggaataggtcatatactttatttctatagtaaccaaatattcaaaatgcaagtcaagacgttaggtcagacaaaaaaaaaaaaaaaagactgtgctttttcccccaatagttaaatttatctacattgagtctttcaaatgttataaaaataaaagtatatttagctacactgttagttaatagacttcatggaatagaataaaagaagtgcggatttgagcttctctacattttttgtagtggactggtattaaaatatgttttttacatgtgttctctcatggagagttaactactgtggttcattccaaattccatcttaattgtctttagtaactattcattttatgggtttatcttcagtttcatttgatttccttctctgtttagctgttttcactttgttggtctgggtcaaatatgaaatgattatcctttgctgttttatataggatctatttccatcagcacctcaatttattggtttgtatcaaaattatcattggaaagatttaattggcccccaaatatcacttctagtattatataatccacccatcctcatggagtttctatgctgtactgaagacttttttaactcatcactcttttgagtcctaattcatggactgtttaattgctgagcttatgaaaaagaaatgtaagtcacagacctacttgaaaactcacctttttgagtacctccttagtttacaatgccctctgtgccttgcatattttacttatgtagaatgtatgagttatggctccaaatttcaattctggcatagccttgtcaacagcaacacaagggctacctctgtataataagggctttcatttctaatcagcatcaatatgttaggtttgctcaatttgcatatctagaaacctgtagtgaggtgggcaggaatagcagactgtctgcagtgtgtcatatttgcagtctacaaatcagggcttgttaacttgcgtgcaaccaattatagcatgagtgtgctgcaacataatcctcagtaaatcaattactgcaagagaattccccactataaagaatgaaaactatgagatttcatacctccctgcccttttctctcctcacttgcctaattgaaagtctgtggctgaaatattcagacttttctcatccaactgtagagcctctacacctacagtgggactcatggactttcggaggcacctacctggagattaaggtactatgaccttcgcccctacctcaaataaatctttgtatgcaagatatacattaataggaaagtttgaatagattattttatattggatattcttttgttatgctgaatagttttataatcaatattattcttctaagactaccactgatcagtttttaataattatataaaaactagtagaataaacacaataagattcactatagattttggctgtacctttctccacctccgttttcacagtgtataaattaacaatgaacaaaatggtttcatgattggggagaagttgtagggttgatggtaggggaaattgagtcatacagggttgaaataatttgaccagactcataccaaacatataaatgaagggagggccatgagcatttgctagttgattctgtactcttgccatagcccggaatctttccaactgtctttcaatctgggctggcaatagcgatgaagcccatttcctgtctctgccagagatcgccttatgggtgaggtagaggaagactacagccatgcggttccctcaggatgctggtttttcttgggagctacttttctttcctgaacatgttcatggcaccctttttggagaactggagagcatgagtttgtatgattacagcctggtttgactaagccttttccttgaagttaaccatgccagcacccccagccccatcccgaagaatgaatccaagcttctcaggggcaattttcaccttgttcccacaaaacttaaatgcgtgaggctttttgagggtcacaataacataggaaagcacatcactggaacttggaatcacgcagacttgaatttgattcttgcctctgccatctactgctttggacttgcctggctttgttttcttatctgtaaaacagagacaggaatgtccactgcccacttcacagagtgagagggtaatgaatagcacatagcctggtctgtggcatttatttgttgcttaatacaggtttgtgtactttccttaaaagcccttgaatgatatataactttatagggataggataacagagtttggacatatttgtagaaggaaatgactttaaacatcttgacaattatgtgagtgagagattatttgcagtttgctaacatttcctaaagctgtggtgtgtgagatacagtaacacacacatttttttttaaaagcaaccaaagcaaaggaattttaactaactgtagtctatcaaggcagcatggttttgaaggagcaaggctggctgtaacaattattgtggtgacattttgataaataaatccttagaggggagtgtttctgagggttgagctgcctcttcttctaaaggtggtgttagcagtgtcatctccagcctttctgaagagagacctaataagagaaagggagttagttgccaagtgtctgctctgtccataaagagttagaaaatttgtagttcagtgagaggagactggaacctgtcggaggcaggagacccagtatagtcagccccacctctgctaagcactgccccaagatgagagctgactttgaaacattcccaggtgacagactcagccacagggcattttttttttaaagtgaatcctagtctacttttttgtctttgttgtgagagatttctaaccctaaagaattcaggaatttaaaaaaatagtgatagttgatgacatggcaaatgcctgaagtaggctcatatttagagaagaagaaattccaatgggatgtaccaatgtatgctgggctgagactgtttaatgcaaatacttcagcagcaggtttctgggtagatttttattttgactttcccagctgtcccttcaccttcaccctttttggttcccttccccaggtataactagttaaaggtcatgtttttttttccttttgggcatagactagccttagcatctctgaatataaatcatctttgataatgtctcagctgtcaggagaaacttgcttaaggggtgatgatttgtgatgatgttaaagttctccggtttgtctgtggactgtggaactagattcctcccctacctgcccttgtgaatgtagcagtaaacattatacagatagtgcttatacattgctggtgggaatggagattagttcagccactgtggaaagcagtttggagatttctcaaagagcttgaaagagaattaccatttgacccagcaatcccattactgcgtatatacccaaaggaatataaatcattctactaaaaagacacatgcacacgtgtgttcatcacagtactattcgcaatagcaaagacatggaatcaacctaaatgcccatcagtggtaccctagataaagaaagtgtggtacatatacaccatggactcctatgcagccataaaaacgacaagatcatgttctttgcagcaacatggatggacctggaggccatcatcctaagcgaattaatgcaagaacagaaaaaccaaatactgcatgttctcccctctaaatgagagctaaacattgagtaaacatggacacaaagaggggaacaatagacacttaggcctacttgagggtggagggtagtaggagggtgaggattgaaaaactacctatcaggtattatgcttatcacctgggtcacaaaataatctgtataccaaactcccatgacacgtaatttacccatgtaacaaacctgcacatgcaccccctgaacctaaaataaaagttggaaaggaaaaaaagaaaaaaacacgcacagatgaaaggacgtcttgttttaaagcactggcagaaacacagagcaagtcttttctccctattaatattttcaaagagcaaatgaaatgtctgctccaagggagctagttaactcctacctagagcatctgttaggagttcaagtcattaaggagcatgactctcaaaatagccaacactgtttgcatttgttttgtcatcaaatactgtttattaagtatgcacacatgttctgggttctgtaccaagtaacttgaaagaacccactatttctctttaagaaatcataattcagaattgctgagaaagggatgctgtgaatcctgggccagctgcttgtttgggttgttttctgttctcttataagcttagaccaatgcccaggttgtgtcaaaagcacctttaatatttccaccataattaaccatttccaccatggttcttgttgtgtcgcctcttgagactaaggaaaggattggagttcttattgagtaatttgatcagagctcttttaactatcttactttaggtaataaaccattgtattcttgaaccttaacttgtattaaggtggatgtgagctttgctctttcttgagcctgtcatgttttatgggttgtatcaagtaaactactaagcatcgtatggtgtgagctttttggttgaaacacttgctaatttgcagagatcaattagtcatagcatgagaagagaaatttctatagatattcaaggcattaattaaattttgtaaggtaagttaagaaggggagggattaagatacaaagacatatatctttttttttaaagaaaagatcctcttactccacattctttgtaataattgtggaaatctagaagagttgtaaggtatgctaatatgtcaacaccagttaggatattttcaaacctatttttagtgatttcttacacatcaaaaccctgctaaaatgaggcacatttttctgaagttgtttatgtttcaggttgctggagtttttgttgttgccacaaatgattatccctaagttcacatgatcatgtttatagcttcaactttgcgggaccctcaggctgtcttgtcaggctgagttttaaaattccaaactgaattgcgaagacatgacattagggaatggggagataaataagagtgtataaccaagaaaaatgtcatatcccaaaggtttaaattcccatgggaaagaaagtcttgctttcaaggactaatattggaggatagaatggtcagtagttgtttctccttaatgttaaagtattgaaaattactgacgagtcagctaccttccagccagcccagatcctgagcagggtggaaccgcttgtggctttgtgtccctggcagctggcacagtgatcagcctgcagcatgttctcaggtttgttggaagggagaaaaagaagggaaggagagagaaaggaaaaaccatgaaatagaattaaggaaaggaaggaaaacaggaaagagtaaagaagaaagaaaagggagtgaaataagtggaactggaaaactggtttgttaacacacatacacaatacacacgaacacacacacacacacacacacacacacacacacacacacacacacattaaggaacttgtccagctattactgacagacctggaaccagaacacaggcaggtctttataatctatctccctcttgtccctgtgcttcatagtgggaagtcatttcatgggcattttgaaagccttgaagagaattattaaaatgtataaattaaaagtccttggaagggaaaccatgccttaaattgaggtatttacatttaagagagccaagtaagattttaaaaggccccaggaaggttacagttcatagaaggaaaaaaagtgtgttgaaaacatctggaaagtaattcttcaagttatttcttcggtatttccttacaatattttaattttacaacaaaataatattggcactctcatgtctcatgttcccatccaaatgtggacttcctaaccctcttttttttttctttcctcatttatagttactttttctctgtccacccattgtacctggtgtctgacttggactctgcttgcctttttttttttttttaggcagggtattgctgtattgcccaggctggagtgcagtggcacaatcacggctcactgcagcctctcatggcctcaggtgatcctcccatctcagcctcctgagtagctgcaactacacatgcaggcccccatgactggttcatttttttgtattttttgtagagaaggagttttgccatgtagcccaggctggtctcgaacttctgacctcaagtgatccacccacctcagcctcccaaagtgctgggattacaggcatgagccaccgcgcctggcttgcttgctttcattgacctcaacattctttctcacatctcttgttttcctaggtgtgtatccatttgtattgctcagttcttcccctgtttttcccgtaacctcttttcttagcctgtacttttctactattttgctttgttttgttttgttttttggtcagctgttctttctcctggttggcattcctctctcattttcctctttagctctctttcttccattcttttcccctcccatccttttctctcgccttcttcaaggtttactaaaggcaaactgtcattggaaatctgttacaggatgaaactatttctccattatgtaattgaatgtacccagaatcagctgttattactgtcttacaggtaataacacttttcccaaaaatataataaaagctcctggatgatattcatagtggtgaaaggtagtttctttgggctggacttgacattttaggatctggatttctgatcactcttttctcaaaatcttaatttcactgtgttactctgtggccattttctatgttcttttctatatgaacaggcagtggataaataggaacatttatgtaatttttacttttatttattattaaagtatatttatacaatacaattcacctattttaagggtgtggcctgaggaattttggctattcaattgtttagccactaccactatcaagatatacaacagtttcctcatcttaaaaagtcaccaagtcaccttctccctttaccacatacctgatttttgtcattgtggttttgcctttgcgcaaacaggaatagattgcagagtcatatggtaaatgtacctttaatattgtaagaaattgctatactgctttcccaagtacctgtatgattttgcatttttaccagcaatgtatgagagatctacttgctccacatcctttccagcacttggtattgtgaacctttccaactgtagccaatctagtaggtgtgtagtgatatctcattgtgatttcaattcacatttccctaataactagtgatgttgaacttcttttcatgtacttattgcccatttgtataccttcttttgtgcagtgtctgttcaaatcttttgctcatttttagattgtcttcttgaattataagagttcttcgtatattgtagatacaagctatttgttggacatatgtattgcaaagattttctcctagtatgttgcttgtatttttgttaactgtgttttttcaaatataagatttttcattttgataaatccattttatcattcttttataatttgtgcttaagaaatctttgtctaatttggccaagtgctgtggctcacgtctataatcccagcagttttggaggccgaggctggcggatcacttgaggtccagagttcaagaccagcctggccagcatagtgaaaccccacctctactaaaaatacaaaaaaaattagccgggcgtggtggctcatgcctgtagtcccagcttcttgggaggctgaggcaggagaatggcttgaacccgggagatggagtttgcagtgagccgagatcacgccattgcactccagcctgggctacagagcaagactctgtctcaaaaaaaaaaaaaagaaatctttgtctaattcaatatcacaaatgttttttcctgtgttttcttctaacattttagctcttatgttgagattcataattcatttaaacttaatttttgaatgcagtctgaggttcttttgtatttttccatgcagatatctagctgatccatcaccatttgtggaaaagtctatctcttctctcattaaatttccttggcatctttgtcaaaaatctattagtatggtggattacattaattgccttgcattactgggataaaccccactttgtcataatatattgtcctaattatatattgttgtattcaatatattaatattttgtgaagaattgtttttggtttaatttccttcaagccaggaaatacattgatctcttgacttttcgcagtttatcaaaagtgaaaatctgtatttctgctatctaatatcagccttttacagatttgggagtaaagtgctatctaatatcatccttttacagatttgggagtaaagtcaaatccttgaatagttattttctaaacaatcctctgaaatttggaagagcatatacatttatctccaaaagagtcaattttctgccagtctgcagattatccccaggaagatgtggcccagattggttaataggcacttttaagaaactgacacttgtctagatgtgagtccaaataagttagcaatggcttttgccctcaggaagattgtgtccttctcttgcttgctactggattgtttctatttccttgttaaccactctgagcaacacattccagctcttatcacttacttccagcctctggcagtcaagtcaatacatttgtgtcctgttttgatgacaatgatatggatttcaagtaaatgtatgtgtttccgtattcataacatggttcatctgaaatttaatcaaatttctgatttttttatttgtttcttatgtgttttgttcatgtaaacaacataggctgtgtgactttaatgtggttagaaaaaacaagttcctttctctgctgtctcacatggtaatcttatttgcctctgatgactggagcagatgaagtaatcgcttcgcagcatctgataaatacattacgttaactgtgagaagcaacaagagactcaaaagccttgttcccaagtgaaataaaatcaggttattgtcctcataaggcatttctcttccttaggcttctgagcaggagtcattggtgctgcactaagcatttctgctctctctagaactaatgaaactcttggcaatttagaataaaggtcattatttttgacaaaatggaagatgggatttggtattcaaatgatttaggtatttttatgctaaaaatattgatggtatgtggaaataaaaccacaccttttctcctttgatgggagcagtgtgtacctttatattccgttatttcagagcatgctgtgaaatttcaactttttcactccctgtgttcttccatgactaacccagttttcaggtcaggatgaggggttgccgccggcccggctgtagctgctttagggggagtattctgcatgctctgggcgcccagaacattttgttaaatgatttaaacatgaaacagctgaaaccacttgacttggtttttttcgagggagttgggggcttctaaacaacaaaactttatttctcacaattctggagattgggaagcccatgacccatgtacaagcagatttagtgtctggtgagggcccattttctgattgaaagacagcttcttctccctgtaccctcacagggtggaatggcacttgacttttattgacagaatctccaaagtggaaataataaaagtaaaaaagtgaaggacactctataatctacaataatatagtaacatttatttttccagatgcatttaaaatgtcagcaattatatgcattgtgacctattggatgaaaatattgtatctccactccttaaatgtatcagtaggaagacaaaaatgatgaatatgtataataattcattctatccacaaaaggcagctctttaaagcactaatgataattcagtggtgctaaaatggaattaccaaaagacctaagtaccaaaaccaaacccagctcttacccaggcatcctttgattacaactcttttttttttttttttttttttttttttgagacggagtctcgctctgtcgcccaggctggagtgcagtggcgggatctcggctcactgtaagctccgcctcccgggttcacgccattctcctgcctcagcctcccaagtagctgggactacaggcgcccgccactacgcccggctaattttttgtatttttagtagagacggggtttcaccgttttagccgggatggtctcgatctcctgacctcatgatccgcccgcctcggcctcccaaagtgctgggattacaggcgtgagccaccgcgcccggccccaattacaactcttaaggaaacgttagagagaagaaattggagtgtcaccaactcagaagattaaatggtgttggattgtattttaaagtattaactacaggttttgatcatcttagtttcatttttctggattattaacctgtcctatagaaatagaatactttataatgagacaaattagaagattataccgatagtttgagatctaatattccttaaattctccatttttcttgagaatcagaaatcagctcttgattatccccaagtatgaagggaaactgggttggaacatccaaaacaatcaataattctgaaatcaattgcatttgcctaggggatgcaataaaagaactcaatcgaagtgtatcttaggaagtccacgtatacactcaaaacccctgagcctgaccttgactttggccttatcccattgctctcaggtggccgatgggctagaactgcattgaagagaaagttagattcttcttttccttaaccatatcacacacgacttgcttgttgaattctttctccagtcatgatacacattgcagtaatttgtctgtcttgttcaactcacacccatgctgttgagttaaagaacaaatgaatggactacctgcccagggaaggcaagggactcactttatatcaggtagttagtcatgaggtggaagtagaaacactcccttaccaatagcgtggcctgattttcacttagctgctgcttctatcagtctggattccttagctggggtactaatacttgccttgccaatgttgaatattttaatgaaatttaaatgagataatcaatataagtttttacaaatctcaacattataaaaacatgacacaaagtattttatttgctttttgagataaagggttctctatttttaggcaaaaggtactgcatgagttaaatgcccatcatgatatacttcaaggctactcacagtagaaatactacataagcctaacattgatatagcttcattcatcctcttaatttgcctgatgctacctttcattttattttttgctctaatgtaaattcaatgaaatgttgcttattttatttgaataaactaggcttattttcagccgtaactgccatgccatcacttaaatgtagtttttcaagtaaagccagtgaaaatgtattctattaggggcaagaatgacctcaactctcagggtaaggccaaaaaaagaacggccttctgtgttcttctgtctggtatatgcaggtgagtgaagtcagcaggcttctctctatctcaagtgttcataaaaagcttttgaaaggtcaggattccagggaggcctctttgttcctggcatctcagtttattccaggctgcctctggcaaaagtaacaatctctatcactatctctgggggaaggaaactgagacagatggacaaaaccagaggatggtacagaactatagagaacagagccagctaagcaagaggagagcattataaagggaaaaagactaggatgccctatttttaaatggagtggctgtcccaataatactatcaatggatatgtctgtttttcacatctaaatttatgcattggccattattcttgcggctcttcctttagcttgaattacagtcttcagcatcttaattgtggtgtttgaatgaggcagcagaagaggaatgtgtgtgagacacccggtgtctgggtatcatcataatgagtctagcagagccctgcacaaagtcctcctgtcaccccacactccatgtgagacagcactgggatctgtgaagaaagggaggagcatctccctactgctccactttacatttttaaggcattatcgtaacataggcaattgtggttttccatttgctttcaccaaaatgtatgaccccctcctccctttctcttctctaagttgaagtctgtatttctgaatttggtgatttgtatcaaaacctgggctaactggcttagtatgtaagagtttctctttgaagggcaaacatttcaaatatggagtcctcctagtactccataatctggaccggctgaagattgtttttcagtgcaatgtgctgtgttgattttctttttctgtgaagccttgtctggattaaacctgtgtcctgtggattgcttcacttccctccgcagcccagtggggagtgggaccagctggtgtaattctgttgacctcatttaaactctctgttatatcctttttttttttaaccttgatgtagctgtacataacaaattgtccatagaaagtttttgttcctttaaagtgtaaggttcctcttgggccttgatgaagatcatattcattcagttcatggccctggtccaaaaatagtttttaagcttgtcttatgcacgtgcatgcgcacacacacacacacacacacatatttcctgtagttttacacttctgctttctatagttttattactatgcttagataggatttttctcacaatatttaacaggaattacttgaatatatactagaatctttagatctttaggaatattagtaaagggtgtaacttgataatgctttaaaaaagaccaggaaaggagaatctatttggctcaacctactttatgagacttattaaaaagaaaatattaacagtagagacatatgctgataggacatgtaaggaattaaactatcattataagaccctgctttgttataaacagcttttatgtactttctaaacatactactttaatcttctgaagagcatacatttgagttcaaaacaagctcatttaatagccaacaatagtgcgagtttgatttagtggctttttgtgaaacagttttctttctttggctaggttatgtaataggttggctacaggccaactgtttctcagcaaggttaacaatgattataaaccctgatcttctgaaatcacaaagcatattcccagcttggaaataaatttacttataataaaatcatactgccaattgatgtttttcctttacccattgttaatcacccaatatcttagttgctgcagaataaaacaaaagttcaggttttcttgtttttaacagaaatatgaacaaacttaatagtatcttccattgactctgtaaactatttttaatcacacatctcccccttaataaataaataaacaaacaaaatggatctcatgactgggagaaaaacctgacaagtttccattttagcttcagtgcacatttcctgggcaatcataagccagcaactggtgtttacaatccagctatcttccggagagtagaaataaaatattacctagtattattgtgagttagaataaaactcttcgtggtaaatttgtggtaattgagggtcctaatatgtgaactcttaaatatcaggttttgttttattatttttacttctattgtgacattaatcacatttttctttgcagttcagggtccctactgctcagttactgtatgtttatagtctaatttaattttataattcagctaagtaaaatactgtatgggaatattatacatatcacaaaatggcccataataacattagctggagccatatgaaatgactgatatttgactgtttttgacctacagaaacggaattcacttggttcagacctaccaaaaccccactatttagtggttcaaatcaagaagccacccacttagtacacctgggtgtactagcagcacctactgagtgtaggcaaaatcagcttgaagttcttagaatctaagcatggatagatagagagagacacagatatctctttatatagccatatctaggtagatatctcacacccacacacccacatacacatacatattgttttaagccttttaaatggatagctttctaaaatgaattagtactttcataactcattaaactgactaaaccaaacaaaataggaactttctgaatgaatcagacatcagaatgaacatcaactcttctactatgaatgcagtaccatgatgccagcaggacctattgagttatattggttctcactgcagtatccccagactattgtgctttttaagctttagtcagttttgacagattttctattttgtctactattgtatctctgctctcatagaacctataacaagtactaaccccatttatttatggcttctaacattctttagaaatttagactctttagagatttagaaaacaggttgccaaatttgtaatatttttaggtaaagcataaaagcaaataatctgtaaaattgatggtgtatgagtttctcctccaagacagagcaaagaatttgatggcttgacttttgtgacttggctaattgattctcagttgtgttccaaatatatgagattgtcagatgagtatttgtggataaaggagatgttataagaagaagccagggaaggtaagtctgatgcagagctgtggaaattagcaaactattcaatcttagtttgaaattccttttttttttttttttgctactttcagaatcattgaactcttaaccattgaccttggatggacttggcaactgagtcacagatatcgtgactttaaatctttaggttaatagcactcagttttcagtgtgggctccagtggtatccacaataatgaaatcttaattgcttagatgatttggctcaatctgtatatcttatattctgtcctgaaaacaagttccatcatataaattaaaggtaaggcagtctgtttcgtcaatttaggctcattttaaatcccaaactttaaactgaatgttaactatttcacagttacaatatttttcaaatggcaaaattgtaaatctacttctgtaaataatattgtgggaaaatcataacaattgcaatgttggaaaatacttttcctatcaatactactttttcatattttcttatttcatatccattcacacccttgaccaggacaaatgaggacattttttattataacactaaccttttataaccgtataagtaaatattactttattaatttgtcagatttagaatcaggtgttaattctttggtttgccatttaagtacattttacacatatgtgtttagtgcatatttcaagtaactgtcgtgaaatgtagtgaggaatatcactggtcattcagaacagagggtcagtttacagttgatgtggacgtctgtatctgtgagtgctggaggcccatgcagccgagatgcagtggaaaagcttccctggcttgtgaggccagtagcacctcccttgccctattaaagctgcagactagcaataagtttccatttgtgcattgacatggttgaggcagttttagaaggtctgacagcattgggattagctccccagatcagatgacttctaatgcatctgctcacattgttttgccagctttcaattggccagtttccccagtaagttcctttcattgcaaatctaatcccctttacaaagtagaatattactcttagttttgtcctgaaataagcacattaagtaattcattatagtcttccagtaaatggttcctgttacaggcattttaaatatttccaaatgatctggttggattaacatcagtaaattaaaagtgtatttcacctgtctgaatttagagttctctcatgaatgatggtttggacaaccaaaagttctgttaaaaagaattgtaggcatgtgatttctgttaatgaggcttttccatatttaaatctagaactaccagcagacctgatcatagcaattttgtacgttaagttgtacattgtttacagaaaatgaaagtagagatacaaaaatgatgaatttctcttgtgcctaatgtctgctcttttcataattatataatttagccaatgtgctagattctttagataaccttgttcccgcctctttaaagaatccttctctattttgcaaacttccccactttcctacctgatgaataaatgtgcagtacagacaaagctcctgcatagaagcaggtcgtgttccataatgtatttgtttggacctcagaatattatattatgatatgtaggatctgaggccaatagacaagagcatatttaacacaaaatgtaccctgaataacagtgctatcaaactgagtcatcttggagaacattatttccatgaaaagtgaggcttccaaaaatttaaatgcaagcaacaaatctgctctcactgaaactctgtagctttgagatctgtgccttcccaccacccctgagaactgggaggagactcccacagttctgaatgtgtgattgatttggcctggtgcctggctacaatgaaggagattaggatttgggaagagggtagcacaaatattcagggtcaaggaattagaatgaagatgggaggactatgtgaagggtctggatgaggaaagaggaatggaagaacatccccagatgaattccctcctttttccttatagtttctccttatccttcctgtttctcactttccagacttttcaaaattatcagtaatttatgaagggtggagaagagcaatggcccaaatactatactaggtcggggatggatctccctcttcttgcatccttcccttttcctctcttgctgtgtgagaactcaaccgttgagtgaccttggtgccactgagaagtggatgggtaagactgagccctgggtgcagaatatactccatgtgttgttgaagaggcctgaagtccagtagcaacaaaagggaattcctctttcaggctctctgggcttgcagatcttatcaattagatttgtggtattactgcttttcatttaggacacacagtatctttcatggagtactctccaactcaagaattccaggtctgatcttacctatggggtggagtttaatgaatctgatgaaaaattggcagttcaaccaggatcctcttaaagacttgattcctaaattagatatatcaatttaaaaaaaatatcgtgaagtataggcattatgaacagcaagagaaagcttaaaaaaagattatgaaaatttcccttataatttcatctatttggggacactcaagagagtctgcactgtactaaatgggcacactcaaattcagtgcatattgatccttttgtgcttcataagcgtgatgattgggtttcacagtaacgtgtgagatgtgccttcttcagccttattaggatgttggcacattacccatctgatatgaaacaaaatcagtacatatttaactctgtgttcctatacaaggccaacttagatttgtggtttgaaaggatttgggctctaatttgttcatttaatagtctgtggctaattaactgggttggttagaattcagctctagagagcttaaggtcgagggctcaatctccctgtgaaccagtttatcttttctgtttcttggtcattgattacactccttattcgtattcaggtgacttacaaagttgtgttattgattatgagggattggatatggacaaattaaagcaaaacctttaccagagcaaatgtattgcatatagttaacaggtcaaaatggcatgccacttagtatcgtgaagtttgctattggacgggacctaaatgaaaataccggctttgccacttaactagagtactttgggcaatatggtttactttcctaaatcttagtttctctagctacagaatgaagatggtatcagcctcatagggaagctatgaggatcaccgagatcctcagatacgacgttgattgtggtacacagttgggacacgatctttgtttaccctggcccagttctctcagggtatactgtcccatgctgaatgtcctagggcctctgcttactctgtgctctgcagatggtatctgtttaacttctgcacccaccatagttcatcaatagctgtctccagctgtacatcgggagagcttgagagcttgcctatgaggacagtttgttcaatgattcctcttatttcatagcacctttcaactaaatggttctgagtggtaggagttacagtgcacaggagaggatgggagtctcatagatacatacacaaaagataagtaggcctactctgttggaggagattacatagatgggcttcaggctgtatctgaatcttcatatttcttccactttatcagggccttccagtgagttatcatcccaaagtcattttcaagtttgtgctcctaactaccatgctcatttcctcatttgtaaatttgttcatctcccaggagagagttgaaagtaataggtatcttaaagaagacttggcatacaaattataaataagatcaataaaaatatgatggaatgatgctttttaattctccttctaagattattagctcttttttgtggagagaaaaatgcaaatgtgatgctaattatgaagacccatctgttatacttaaagtaccacaggaaaaaaagcctaaatttaaagctcttctgtggtactttgcaacctttgaagactcattttggagaggctgtttccatttcaaacaaactttgatgtcctctaaggtaggatgtctacttgaaagactctgagttgctatttgaagagaccagtttattctgatgtaccactgttttttgtttgttttattctgctgtaccaaatatgtagttaatggacaactgaataattatttggaaagaattgttaaataaattatgaaaagcaaacattagataaccaccaacctgagtacttactcagctcagaatttgtttcttttaatacccttcctgggcagggattccagagtactttactaaacgtctattgaaatctgttctatactaagactgagcattctcctggtaatttgggtcaggtccaatttaggagctgggtgagaaattcatctgacctctctcatcctgtgttttttaatttgtaaaactggaaaagttattttcagtaaatcttcacaaagtcctgagttaaagaacctaagtattgttaaagccccaaattcatgttctttccattgtgtgatgtgatgtcatatggcatagagatagagatttataagttatcaaggtaaagggactgtgtccatttcatgctgctataatagagtaccacagaatgggtaatttataaacaatagaagtttactgggctgttctggaggttgggaagttcaagatcaaggggacgtatctggtgaggaccttattgctgcatcgtaataaggctgaaagcatcacatggtgacaatgtgcacaagagatagcaagagaggactgaattcacttctgtgataatgacaaactcactcctgaggtaatgacattaacccaattaataagggcagccctgcccctgtggctttgctgggctcagtccacccagcagctctcacaagttaaagtcttgtgcctgcagtttttccaggctggagttgcacactggtgactctgtggttcatggtctcaggggccacaccattcccatggctccactaggcattgctctagcagggactgtctccagtggctccacccctgtgacaagtctttgcctgagcccccgactgtctgtaacatcctttgaaacctagatggaggctgccatggccccacaactcttgcattctgtgtgccttcagaattagcaccatatggatgttatcaagatttatagcttgtaccctgtggagtggcaggtgaagccacacctcagctcacttgaaccatggccagagcagctgaggggtgctgtaccagaattccaggagtggagtcccaaggcaatgtagggcagcgaatgttgaggtcttgtaggtacctctctggaaaccttgcccttgaagttctagcttgccttggagatctctgaaatgccttcaaggtcattgtcctatagtcttgatgagtagaacctggcttccttctatccatatgaatctctttagcaaacgtctcttggccacacccttagtattctctgctgaacaaacttttttattctttacatggtcaggctgatatttttccaaatctttccattctgctttcgttttaattataaattccatttttatatcatttctctcttccttcattttactgtaagtatctaaaagaagctatgcacagcttaaacactttgctgcttagatatttcttctgccagatatcctagttcctcactcttgagtcccccgttccacaaagttctaggacatggacataattccatgaagttctttacaactgtataactaggataaaggatggcctttattccactttccaatgctccttgacttatgatgtgattacatcttgataaacccattgtatgttgaaaatacaataagtcaaaatacatttaacacatcaaacctactgaacatcatagcttaggatagcctaccataaacatgctcagaatgttcacattagcctatagacaaaagcctattgtataatctagtatggaatatctcatgtaacttattgaatgctatattgaaagtgaaaaacaggatggttgtatgggtactgaaagaactgtttctattgaatgcgtattactttcacaccatcataaagtaaaaaaaattgtttaagttggggaccatctatatcttgcttcttatgtctgtctgataccgtattggaatggcccttacactccatatttctaccaacattctgaccatgaccagttaagtaatccgtaggaagatttaggttctcctacagctcttgtcttcttctgacccctcaccagaattgcccttaccactccattcacagcaatccaagcttttactagcttgctgctccaaatttttccagcctctatgcattacccaattctaaagctgcttccacttttcaggtatttgttacagtaacaaccccattctctgtaccaattttctgcttgtgctgctataacacaacaccagagattttggagtttataaagaaatgaaatgtattctgctcatggtctggaggctaagaattccaagactgagggactgcatcttgtgagggtcttcttgctgtgtcataccatgacagaaagcaggagggcaaaagagtgcatatgagagacagaggaagaaaaggggacagaactcatccttttctcatgaaccaactcctgcaataactaaccaatgcccatgttaattagctcactcccatagtaacattgttaatgcatttatgagagtagaactcttgtaacctaatcactttttaaaggtcccacttctagacaccatgccttggggattcagtttgcaacacatgaactttggaggatgcattgaagccacagcagggactaatggaagacactagatattttcaactctctgaaaaaggagagaataagagagagagagagagagaaagagacaagaagcttcagttagctcaggaactgagccatgagggtcagctctgattgaggacagtagtatttgaaatgagtccctgagttgttctcaccataaaagcgagggatggagttttaagaaggagattgttctcaatactgccaaatgatgcagagaagtccaaaagagggagaacaaagacaaggcaaaaattcacagtgcaagaaagaaaaaaaagaatagaattacagagcccacagaacctctgagattttcattaatacaatacacataccagaaaactaagatcaagaaagatagacacttagagctacatagctaatcagcaatcgttcccagaattggttctgtctccagattcccagcctatgccttcttctttcatgccttcccttccctttgcagctagtcagtgcccatcagaccctttagcactttccaaagttttgattatagtgatattttaaatgtgaacatgaatctcaccagaaagtttctccacacatggaaacttgtttggggcaatgtaagtattaaacatatttttcttaaggtttgctcaagagcttcttatactgaaaaacttacacatcatctcttaatagctaaaaatatataccctgataagaaataaagggaatttgtgatatgacatttataacaatttaacagaatacttattgacatattcagatttttcaactacctaattttttttttaaactcagttctttcccatgatcatagaagactatttgatatgtagagacacctaaagaagttttagccagctgggggcggtggctcatgcctgtaatcccagcactatgggaggctgaggcaggtggatcacttgaggtcaggagtttgagaccagcctggctaacgtggtaaaaccctgtctctactaaaaatacaaaattagccaggcgtggtggtgcatgcctgtaatcccagctacttgggaggctgaggcaggagaatcgcttgaacctgggaggcggaggttgcaatgagccgaggcagcaccattgcactccagtccaggcgacaagagtgaaactctgtctcaaaaaaaaaaaaaaaaaaaaaaagttttagcccaggtgcagtgtagtggcttacagctttaatcccagctctttgggaagctgaatcaggcagattgcttgagcccaggagttcaagaccagctgagacacatgctgaaatcctatctctacaaaaaaatacagtaattagctgggcatggtggcatgtgcctgtagtcctagctacttgggaggctgaggtgggaggatcacttgagcccaggaggtcaaggctgcagggggccataatcatgcctctgcaccccagcctgggtgacaaagtgagaccctgtctcaaaataataataataataaagtattttttttcagaaattctgaatttaattgatgacaaaattgaagcaatatatcaggaaggcggtagacttttttctccattttcctccatggtggtcctacaaattgctgccccagccatattttaaatccctatgtctagggtagtttaggtgttttgttaggtatttttgacttcctgatcaactaatagcctaataaacaatgcatttaacaaggcaggggccaggtgcagcggctcacacctataataccaacactttgggagggagaggcaggaggataggatagtttgacccaggagtttaagatcaacctgagcaacagagagagcctttctccaaaaaaaaaaaaaaaaaaaaaaaaaaaaattagttggcatggtggcacatgcctgtggtcccagctacttgggaggcttgtattagtccattttcatgctgctgttaaagacatacctgagactggtattttacaaaagaaagaggtttattggacttacagtttcgcatggctgggggggaggcctcacaatcatggcagaaggtaaaaggcacatctaacatggcggtagacaagagaagagagtttgtgcaaagaaattcccatttttaaaaccatcagacctcgtgagactcattcactatcatgagaacagcgcagggcaggaaagatctgcccccgtaattcaatcatctcccaccaggttcctcccacgacacgtgggaattgtgggagttacaattcaagatgagattagggtgggggacacagccaaaccatatccggctgaagcaggagaattgcttgagcccaggaggtgaaggctgcagtgagccatgagtgcaccactgctcttcagcctgagtgacagagcaagaccctgtctcaaaaatgacagcaataacaacaaaaacaaggcacatatcaagctccaagaaagggcctatctatgtaactggagattataaagtcaaagaaagtgcctatgtatttgctctctgttttctgtttgtttgagttgcattttaaaaaattttatataaagactcgtatctcactttgttgcccaggtgggtcttgaactctcagcctcaagcagtcctcccatcttggcctcccagagggcttaaattactggcataagctaccacacctgacctgctcactgttttttaaacagagtgtagaccacaccaaagctctgggctctgagctaacccagagtaaaactatggagttgactaaatttatctttaaatttatacccaccaccttcacccagtccttataattaactcttccttaggagatgtgatgtatcattgcacaatctctccagataactctctaaaatatcttctgctcatctgagctacagttatgtgatctctctctctctacccttttaaaccatgatgagacttcttcctctaatacatacttcaccattcaggctctgtgtattaactgattaaacttaaaaacagttacttaatgaagttgcactagagaaaacagtagccactgttagttactgtattagttcactttcacactgctataaagaaacacctaagactgggtaatttataaagaaaagaggtttagttgactcacagttctacaggctgtacaggaagcatagcagcttctgcttctgcagaggcctcagggagcttttaatcatggtggaaggcaaagggggagtgaggtaggcacttcacatgccagagaaggaggaagagagagagtggggaggtgctacagacttttaaaaaaccagatctcatgagaactcactcactatcatgagaacagcaccaacggggatggtgttaaaccattcatgagaaactgcccccatgatccaatcacctcccaccaggcgccatctccaacattgagatttataatttggcatgatatttgggcagggacaaagatccaaaccatattattatatcccagacccctccaaatcttatgtccccctcacattgcaaaatacaatcatgccttcccaaaagtcccccaaagtctcaactcattccagcattaactcaaaaatccaatctaaagtcccatctgagacaaggctagtccgttccaactattagcctgtaaaatcaaaacaagttagttactccctagatacaatgaggatataggcattgggtaaatactcctattctaaaaaggagaaattggtcaaaagaagggggataaaggcaagtcctgcacccagcagggcaatcattacatcttaaagctccaaaataatctcctttgactgcatgtctcacatccagggcacactggtgcaatgggtgggctcccaaagccttgggccattccacccctgaggctttgcagggttcagcccccttggctgctctcaaggtttgccattgagtctttgtggcttttccaggcacatggtgcaagctgttgatggatctaacattctggggtctggaggatggtggccctcttttcacagctccactaggcagtgccccagtggggactctgtgtgggggctccgaccccacattttgcctctgctctgccctagtagaggttctccatgagggctccatccctgcagcaggcttctacctgaacatttaggcttttctgtacatcctctgaaatctaggtagaggcccccaaacctcaactcttgtactctgcatacctgcaggtttaataccatatggaagttgccaaggcttaaggctttcaccctcaaaaactgtggcctaagctttacctgggcccctttgaaccacagctgtagctgaaacggccaggatgcagcaagcagggttctgagtctgcagagggcagtgaggccctgggcctagcccaacaaaccattcttccctccttggcctctgggcctgtgataggaggggcttccttgaaggtctctgaaatgccttcaaggcctttatctcattgtcttggatattagcacttggctcctctttacttatgcaaatttctacagcctggttgaattcctcccctgaaaatgggcttttcttttctaccatatggccaagacgcaaagtttccaaacttttatgctctgtttcccttttaaatataagttccagtttcagttcatttatttactcatatgaccataggtggttagaagcaaccaggtcacatcttgaatgctttgctacttagaaatttcttccactggatagtggaatcatcagtctaaatcatcagtctcaagttcaaaattccacagatccttagagcaggggcacaatgcagccaggctgtgctaaagcgtagcaaaagtgacctttactgcagtttccaataagttcctgtcctgatttccatctgagacctcctcagcctggacttcactgtctatatcactatcagaattttggtcacaacaatttaatacgtctctaggaaattccaaaccttgttgcatctttctgtctccttttggatctcccaaatggttctagcctctacctgtttcccagttccacatttttaggtatctttatagcagtgtccctcttcttggtacaaacttttatattatttaatccttttttttttttttgagacggagtctcgctctgtcacccaggctggagtgcagtggcgcaatcccagctcactgcaagctctgcctcctgggttcacgccattctcctgcctcggcctcccaagtagctgggactacaggcacccgccaccacgcccagctaattttttgtatttttagtagagatggggtttcacagtgttagccaggatggtttgatctcctgacctcgtgatccgcccgcctcagcctcccatagtgctgggattacaggcgtgagccaccgcgcctggcctatttaattcttgcactgctgtaaagaaatacctgagactcaataatttattaagaaaaaatatttcattggttcgtggttcttcaggttgtgcagaaagcatagaagtttctgcttctaggaagtcctcagggagtttttaatcctggtgaaggcaaatggggagaaaggcatttcccatagccaaagcaagaggaaaagagggagtggggaggtgctatatacttttaaacaaccagatctcatgagaactcactcactatcacaagtacagcaccaagggtgatggtgttaaaccatttatgagaaactgcccccatgatccaatcaccttccaccaggccccaacaccaacattggagattacaatttgacatgatatttgggtagggagtcagatccaaaccatattcattacccattataatgatgtataaggaaagcaggattaaatggagaggtaaaatctagaattacactaatagcaacgatactaataatatgattataaaagcacagcagcttacatgttttgagcacttaccatctaccagaatatgtaagcctttttatattataataagtctgtaaaatttgtcaccttttgaatgaggagaggtctaggcaggttataaaatatatctggggatttagagctgtggatttcatcacaggtctgttgagttccagtggcttaactactgtgcgatcaagtggttgagtggacccaatgtgtaggtcactcttatgatccacatacacctcccattgttggggccatagctgtatttaacagctattgttaggcacacactgggatgttgaaaagccacactaactcaggaaacacagtgatcaatgtgatattgatgtgtaacctgcaacaggtgtgaccacacaaaccataacattgctgtgctttataatacataattttagagaacaatgatttaatatttgttgataacctgcagatgaggggaaaagttgttttataaggtagtatagtttataagtattggtaggaactagaaggttaaaaactcttgacgggacaggggctatggagaagaaatatgtatctcaagaattgccatcagagcaggaagaaaggaagggattgaataaatatgaatagggcaatgaaaaaggaagagatgtttctctagactaaagctgctgtcatgtatgatataattcagttattcatttgtttgttaacttgttactttttatttaagcaagctatgctcatttaaaaaattttaacaggacatcaaaaataaaaattatattactcataatttcacaactttactgatatagttgacattgaagtacatctttcttcagctatttttctctgcatgttatattttattttgggatctttctgcatgtactcctctagaatattcagtggctgcacaaaattttcttatattactggttttcaaatgatttggcctcaggacccctttctttacatgcttaacaattgttgaggactccaaaggattctggtttatactattgatatttaccttagtaaaaattaaaactgagaaaagcttaacatatttatatatttattaatttaaaaataatattaaacctaatacatgttaatataaataaatatattttccagaacaaaagaatagttaagagtgacattgttttccagttttttgtgaacatcacttctttagtgactggtttaatagaaaatagttaataagttctcatatgtatgcatatgacctgtttcaataggttgttttgattgaaaatatgaagaaaatacaggttcatacaaatatgtagttattaaagtggtattttaatagcattttgagataattttgaatattcttctttgatgtcacaccaaaacttgacaggtaattgtttctaaaggttggtggaaatgtggaatccatgagttcttcgtatttcgctgtctatgtatgtagtatatacatatgtatgtattaaatccaccatcctgtcttgcattttcaatggagaatttactcacgcataattctgtaacattgtacattagtcatttggaaaataacattctgaattatatagaacttctaaatgttgatacattttactttataacatagaaaatatggtatttattaataccactaatgacctcatctaaaggtctttaagtattgagaagctgccaagcatactgtgacagaaacaaatcttccaaaattcttatatttgcttgaaagctcaaattttaccattggcaacaatggcaactgtcaatgtgggttcactttcctcttggataaaacgttagcccaatgctcaagtctggacaacaatactttgtcatctgttgtttcaagtgaaatattttcattaaaaaaaggttaatttggcttgaaacccaaaaactcattacacaagtgctgtatctcaagatagccatcatctttctatgtgcatatttctcattttgtcacagaatatgaaaaagatatgtgctgaggttgatttacttctttttttttttttttttttttttttgagacggagtctcgctctgtcgcccaggtcggactgcggactgcagtggcgcaatctcggctcactgcaagctccacttcctgggttcacgccattctcctgcctcagcctcccgagtagctgggactacaggcgcccgccaccgcgcccggctaattttttgtatttttagtagagacggggtttcaccttgttagccaggatggtctcaatctcctgacctcatgatccacccgcctcggcctcccaaagtgctgggattacaggcgtgagccaccgcgcccagcctgatttacttctttatcaaggatattcttaagtaacattggcatttttttattgcaagcgtggaggtgaagtctacatggccaggagtagtacagtttggtgctgcaaccatgactcatgctaaagtccaggcaatttaacccaccatttcatttgggccatcagtgaggatgtcagcttggtgaaaatgggtagtaacattgcaatgttactatgaaagcaagtttaaaaacaatttaacttggcaccaaaatgattgacatatttataacaatttgagattgttttataacatctataacatatataatatgcaaaggaaaaaatgaaattagaatcactcatgttgcaaatgcttgatagagaaacagcatcagagcagaaaacatggattctggggttagaattctgctgccttctttgcatgcttattagctgtatgactttggacaagtcatttaatttcccattcttcttctgtaaaatgtcaataatatattttcttacaaagatgttgtaaaggcaaaacaagactatgtggaaagtgcctgatatagtacccaacatgtagtaggtcttccttaactagaagctattatatttttattaatgagaaaagatctccccaaatcaagggctggggccaagaggtctcttatctagacccatgctgcctctgagcatgcaaatcaaagaatccattggtagatgtggttgcaggaggtgggaagaaaaataggaatccaaaagcctgatacaagagtctgtaagagtcatcaaaacagaaagagggtcacagatagcaggctctttgctatcctctcccagagagccagggaaacaggagcaggaaatcgatgggttgaagggagtagaggaaacaaatttcatcccaaaggaggctcctggtgactgctggattattcaaacttcttggctgagagagctggtttacagggccagggtgggatggataggaattcttatacttttaggctgaataagaattttcttgccaacatgacagctttgagcagcaatcaagggcttcaaatttccacaacatctgaggtcactcaatttatacttaacttgccagttttattattatttccagtgtcatattggattcttggtaataattgtttatcactgaatatcagattgacactaattctttctctggggtcttctgtacagatcactgactttgaacagatgtacatgtccagatgtctgcaaccttgtcaggagtttcctctggcttaatcggtgctttttgatatttattaagcactcctcaacatgatggatcatcaaaggattatgtgtgttacatgctctttactttatataaagtgtattaaagatagaattgcacatgtgcatctatcatataagttataaagctcttgatccccaaaaaatgccagtcacttccagtacttagctttgttagaatttcttttgttttattttttagttgattggttgacttgtttgctagagttaaatatacatcatggtgaaagttaggtgctatttagaaaaaaaagcattactcaccaaattagttgtttcttaacaactcactgatagatacttaattatcagagccttataacaatttagaggtagaagagcttagctggccagcttagttctcctacctctaaattggcataaggctccaatctgttgattttagcatcagaaggcaagatctagtgactggatagcttgaatggatttttgcatatgtatttcttagcctcataggaggataacttgaaaataatttattttctgttttggtatttgttttcatattaacaaggtatgtattctatacttcagccataaaattggggtataacaaaaatgtttagtcatcagttcagtgatagattgattgactgattaattgattcaatgaccatgtattggctacttattatgtggtaggcagtgttctaggtcctacagaaacatcaataaataaaactgataaaaatatctgaatttgtggggcttacattttgggagtggagtgggaggagggagaaacaattttttttaagtaaatcataaagcacattgaaagatactaagtgcaaaggaaggaaaaacttatacagccaggaaaggaaacaagaactgcctgggatggaggtgggttgcaattttaatggggcagttgaggaagacctaatcgagagtgagatttgaacaaagatgacataggagagggggtggaccctgcagaggaagggagagaggttgaaccctgcagaggaggggagcatttcaggccaagggatgagcccatgcagaggcattgaggggagacagcagggaaggtagcatgtgtagaatgtgaggtcagagacaggagtgaagagggagggaatggacagaggggaaagccattataaagtctgagcacagtgtaaagtgatctgccttatgttttaatagaatcactcttgccactggtttaaaaagactgtattggatgtgtcttaaattatttgtgctgttataacaaaataccacagactggtaattttgaaataaaagaaactcatttcctcacagttggaggctgggaagtccaaaatcaaggcgctggcaggttaggtgtctggtacagactcattcatctagatgtcctcacgtggtgcaagggacagaagggtaaaagggacccaagctgggttccttccagcccttttataaggcactaatctattcatgaaggtggagcccccttaatttaatcatttctcaaaaggccccacgtcttaataccaccacaatggagattcagtttcaacacctgaattttggggcacacattcagaccatagcagggggtagggacagacacaaggaaaaaaaaatgggagggattgcagttaagccaggtgagagataagggtgacttgggctggagtgatagctgggtggtgagaaatggttaaatatttttaaaatagaacaaacaggtttgctgacaaatttgatgtggaatatgagaggaagccccccccccccacaaattctacagggcttttggcttatgtaataaacaatgagaatttggagttctcatcaacttagatggagaagacagtgtgtgggtagttttttaagtgagggagtggtattgatcaagtattcagtttcagatatgttaagtttgagatttccattagacatcaaagtaataagaaaagttggaaggttgagaagaacaatggatatttcagtcttgggattcagacaaaaggtatgtgctggaagtatgagtttgtaggtgttgtgttcagaattggttccttccagtgggttcttggtctcgctgacttcaagaatgaagccgtggaccctggcggtgagtgttacagttcttaaagatggtgtgtctggagtttgttccttcagatgttcagatgtgtctggagtttcttccttctggtaggtttgtagtcttgctgacttcaggaatgaagccgctgaccttcgcagtgagtgttacagttcttaaagatggtgtgcccggagtttgttccttcagatgttcagatgtgtccagagtttcttccttctggtgggttcgtggtcttgctgacttcaggagtgaagcagcagaccttcccagtgagtgttatagctcttaaaggtggcgtgtctggagttgttttttcctcccagtgggtttgtggtctctctgacttcaggagtgaagctgcagacctttgcagtgggtattacagctcataaaggtagtgcagacccaaagagtgagcagcagcaagatttattgtgaagagtgaaagaacaaagcttgaacagcgtggaaggggacctgagcaggttgccgctgctggcttggataaccagtttttcttcccttatttgatcctgcgcatgtcctgctgattggtccattttacagagtgctgattggtccatttttacagagtgctgattggtgcatttacaaacctttagctagacacagagtgctgattggtgcatttttacagagtgccgattgatgtgtttacaaacctttagctagacgcagagcgctgattggtgcatttttacagagtgctgattggtgcgtttgcaaaactttagctagacagaaaagttctccaagtccccactcaacccaggaagtctagctggcttcacctctcaatgtcagcatgtaaatgatgtctcagatcagttttcccaggaagcagaaactgagatgaagatttgcactcagacatgtattggcaaggacttttgagattaataactgtgaggagtaaaggaagtaggaatggacagagggaaaagttgggctgccataagatcagaagtaagtccttccaccaatctcatggagagctctagagctggaaaaacctcgcagaattgtcataatttataccccctacatcagtcagttacttgatgcccaagcttgtgaccttgagtgagtcaactttcttcagctgatggcagttgcttggtgaagatggggaataagttttgagaaatcaaccattaacattctcagcagtgggggtaatgagtggttcagtcctaaagggcaggcatttgagtggtacacccagcatacactgcagtagtatttaaatccacaagaaggatgagatcactaaagaaatgagtgtgcttagacaagatgcccaagggctgagccctgagccctacggcattattaagttatgaagttgaagtaataagatggaaaaagcaaagatctcagagaaggagtagttagtgttgctgattgattgcaaggagggtatggtgccctacaagccagggaaagaaatatgctttaaggagacagtgatcacatatgtcaaatgctgcagagaggtcaagtttaatgaaaattgagaatttacctttggatttagcaagatagaggaagtcagtggccttgacaaagacttgtttcaatagaatagtaggaatggaaaccagacttaaacaggttcaaagtagaatgggagaagaggatttggagactgtgagtgtatataattctttttagagtttttttcataaagaggattagaaaaaatagtagcaataatcacattaaatataaatggtcaatatattgatattgaaaaatcaatatcagtaatcacattaaatagaaatacaggcaaagattgtcagattgtataaaaatgtaagacctaactatatgttgcctataagaaatgcactttaaatttaaagacacaaatagggtaaaaatagaaggatggaaaaagatataccatgctaacactaatcaagagaaggctggagtggctatattaatagctgacaaaatagattgttatcaggaagattttgtaaagatagatgggtcaattcatcaggataccttataatcctgaatatgtacctatttatagagcttcaaaatacatgagacaaaaattaataaaactgcaaggaaaaatagagaaatccacaattatagtcagagattttgatattcctctcttgagaattgatagaacaatagaaaaaaaaaacagtaaggatatgcacgacttgaacaacactgtcaacttgatctaattgacatttgcacagtaatctcccaaacaacagcagaatacacattttttcaagtgcaagaggaatatgtatgataaaacaagtctcagtaaattttagaagattcaagtcatgttgtctgaccacaatggaattaacttagaagtaagtattataaagatatctgaaaagtactgcattatttggaaatgaaataagacatttctaaatagcccgtaagtcaaagaagtcaaaagggaaattagaaagtattttgaatggaatgaaaataaagagaaatacatcaaaatttgtgagatgctgctagagcaatatttagagggaaattcagtctaaaagagtattgctccattagaatagaagtgtctcaaatcaacttgcactttaaaaacaagaaagagaaattcaaagtaaaggaaataaatgtcacaatagaaatcaatgaaatagaaacaggaaaaacaatagagaaaattgatgaaaccaaaagcttgtttgttgagaagattgataaaaataataaagctctatccaggttgatgaagaaaaagaagagtagaaaagatacaaattataaatatcaggaatgaggaaggtgatatcactaaagatgctatagattacaatgataatacgggaagattataaatcactgcataccaatacatttgacaacttagatgatgtggaaaattccttgaaaaacacaaacaacaaaaggaaacagaaaatatcagtaattctatatctattttaaaaatcaatttgtagtaaaataccttctctataagaagcttcatgtccagttgactttcctgatgaattctatgaaacttttaagaaaaagtaatattaattctacaaatctcttgcagaaaattgaataggagagaatacttctcaattcattttataaggccagcattatgtataaggccagacaaagacattcaagaaatgaagctgtgttagttcattctcatactgctagaaagaaatacctgagactgggtaatttataaagaaaagagctttaattggcttatagttccaatgagccaagtaaacagttccaaagaggctggacaggaagcgcaatcctagcatctgctttgcttctgaggaggcctcaggaaacttacaatcatggctcaaggtgaagcggggagccagcacttcacatggctggagtaggaggaagagagagcgggaaggtgctacacatttttaaacaaccagttctcttgataactctatcaaattaactaagatgacggtgctaaccattcatgaaggacccacccctgtgatccagtcatcttccaccaggccctacctccaacactggggattacaattcaacacgagatttgggtggggacatagatctgaagcatatccgaagcctacaaatcagtatcactcatgaaccctagtgccaaatttcgttacactttttagcaagtcatatccaataatgtgtaaaaaaatttttttacatattgatgatgaggtggaatgtatcccagtaatgcagggctcatttaacattgaaaaaaaatcaatttaaatgacagtgtttttagaagtttaaaaattaaatcatctggtcatttcaatagatgcaataagaacattttacaaaatccaacagctataactgataaaaactcttagcaaactaggaatagatgggaacttccacagctcaataaaggacacatatgaaaaacctatagttaacatgatttttatggtgaaagactgaatgttttctccaatgatcaggaacaaggccagatgtcctctctatctttcattaaacattgaactggagattgtaatcactggaataaagcaaggaaaagaaagaagacaaacccagattagaaaggcaaactatttttattctcagatgccatgttcgtccgtataggaaacaagagggactcctcaaagaagcttcttgaactaatagatgaatttagcaaacttcaggatacaaaatcacttcaaataaaaagtatttctattttaatatattatcaacaagcacatatagggcaagcttttttttttttttacaaagatgcaaaggcaattaaggcaattcagtggagaaagaatatttttttaaataaataaagctagaacaattggatgtttaaatgcaacaaaatgaaatttgatccatatctcacagcatatacaaaaattaacccaaaattggtcaatacctaaatgtaaaacctaaaattataaaaatatataagcaaacatgggagaaaatctttgtgaccttcagttagtcaagtatttcttagatacgataccaaatgctcaatcaataaaagaacagatggataaactggagataataaaattaaaacattatcttcactaaaatatttctaagggtaagcaaactattttatgtacgtacaatagaatattattcagccataagaaagattgaagttttaatatgtggtgcaccgtgggtgaaccttgaaaatgttattctaagtgaaataagccagaagcaaaaggttaaatactgtataatttcacatacctgaaatatttagaataggcaaatttatagaaaataaagtaaattaggccaggcgcgatggctcacacctttaatccccgcactttggaaggccgaggtgggtggatcacctgaggtcgggagttcgagaccagcctgaccaacatgaagaaaccccacctctactaaaagtacaaaattagccaagcgtggtggcacatgcctgtaatccctgctactcgggaggctgaggcaggagaatcgcttgaacccgggaggtggaggttgtagtgagccgagatggtgccattgcactccagcctgggcaacaagagtgaaactccatctcaaaaaaaaaaaaagaaaaagaaaaaaagaaaagaaagtaaattagagcttaccaggagctggagggaatggagaatagggagttattgcttgatggttacagaatttctgtttgaggtgatgaaaaagttttggaaatagtggtaatggtcacgtaatattgcaaatctatttaatgccattcacttgtacacataaaaatagtgaaaatagcaaattttatgatatatattttttaccaccatcttaaaaaagactattaacagaatgaaaagacagtgggccatggtagcttgaacctagaatcccagctactctgaacactaaggctgaagggtcacttgagggcaggagtttgagaccagcctgggcagcatagtgaaaccatgtctcatattttttttaaaaaggagaatgaaaagacaggttacagatgaagagaaaatattagcatattgtatgttgataaaggacttgcgtcagaatatataaagaactctcaaaacttcataataaaataatccattagcaaaaatgggaaaaagatttggacacttcatcaaaaacaatatatggacagcaaataagcatataagatgctccacatcattagatattagggaaatgcaaatcaaaaaccacaatacactaccacttcacacgtattagaattgctaaaattagaaaggaaaaccatacaaaatatgggcgaggatgaactggagttctcataaactgctaatgcagtttggcagtgacttcaaaagttaaacacttactgtatggctcaaccattccactcctaggtattatcccataagaaaaggaaatatatgtccatatatacatagacttgtatacaaatgtttatagcagctttgtttgcaatagtcaagcactggaaagaacacagacattatcaacaggtgaatggataagcaaattgtgatatacctatgcaatggactgttacaataaagatgaatgaactattgataatatgctcaattagggtgactctcaaaatcattatgctgagtgaaagaagccagatgaagagtacatatgtattatttcatttatattctctaaactccagagaatacaaactaacctgttatgattgaaagcaatccatagttgcctgtggattggagggagaagtgctggcaggggtggaagggagggttacaaatgggaacctttggggagtgatagatatgttcattatcttcattgtggccatggcttcctgggtatacatatgcctaaccttatcagattgtacctttcaaatacgtggcatttattatatgttgcttgtacctaatgaaaatgtctaaaacaatttaagagtacaaaataaaactgtaactttagtactcaaataatgctacgattctttgccctattacttttaagacttctgggaaatagtctagaaatgtgcagtgccctctctctaattttcacattaatatattacagaaatgagatatgatagccacagagattccagatctctgaaattataccagtacattttcctcattttgaaaaattgcagtaccatttttttcactttgtaacaatccccgtaatattaaattggatgttatcttactacctgtttatgtgactgtggactggcacataaacaggtgataaatttttctgtagctccactttgcaatttcctttactcgggtgcccttctacttcacattcacacaatagggatgtttccttcatagcccacattatcaaccatacgaggctgagctcctggcgcagttgctgacagctttattcaataacctattcatacctacctggtgtttctcatttttcacagttttcatttatttaagctttcttacaactttattcctttattgtgtgattcctttattcctttattgtgtgattcctttattcctttattgtgtgattcagaccctaagatggaaatctacttctaattttcattgactttccagatctaaggtcaaattattttaaaaccttttgtattattcactttcacagtatttgggttacactttcattttaatgcatgagctactttaggaaaaacgataattttctataactattttgtatgtgctctttaaaaatatataatatgtgttgtgtatcatatataatataaataatacatatgctggctcataggagttcaatacagagattttaccttcttccttccccttgcctttactgtagctcctgccactcccatccctcacctgctgtactgttgcagtttctcaattggttttactgggtcgaatttctcctacttctaatccaattctaaccagagtgagcatgttaaaatataagcatgtcacagtactgcagaggatccttccccaattccatgttgctttgataaaagcatccagacaactccacatgacttatgtgaggtccagtgtgccctggcactactttatctcacttgctctgtttcctttctcatgcttgactctttctacattgaaattctttcaggtctttgtcacagatattgattcctatgcctgggatcacttttcctcacctcacatgattctcatgtatcctttgtgtgtcagcttttgcattatgttccctgagaaaaattagccagccatggtggtaggtgcctgtaatcccagctactcaggaaggtgaggcaggagaatcgcatgaacccaagagatggaggttgcagtgagccaagggtgtaccactgtgttccagcctgggcaacaagagtgacacttcatctcaaaaaataaaaaaaaaaagaagcctttctttccccaagctgagtgtgatgctttgcctttgtgcattgcgaaacatcctgtattcctcctgtcagatcctttagatttattgcattatgtagttgaaaaatatatgcttcaaatactcctgaagcaagatttaactaaagccatttggcacatagaagtgttgttgatattctaaccaagtaaatctttgtgtaatgtcttagataatctgagtactacaagagatttgttgagaattatacacaagtagcatcctttctttgattcttggtgatgtggtttggctgtgtccccaccccaatctcatcttgaattgtagttccctgtaatccccacatgtcatgggaggcacctggttggagctattataatttaaacatggggctgttaccctcatgctgttctcgtgatagtgagtgagttctcatgagatctgatggttttttaaggggcttttttcccttttgctctgcacttttccttgctgctgccatgtgaagaaggacgtgtttgcttccccttccgccatgattgtaagtttcctgaggcctccccagtcccatggaactgtgagttaattaaacctcttacctttatatattatccagtcttaggtatgtctttattagcagcatgagaatggactaatacacttgtcttccttacaagccacacaaatgaggctcctaacccaaaataaactgctgaaggaaaggagttgtcatgagaactttccagataaaagagtgtatttttataaggaatttgtagctgttgcgcattgtgttttcttcttcttcttcttcttttttttttttttttttgagttggagtttcgctcttgttgcccaggatggaatgcaatggcaccatctcagctcactgcaactgccgcctcctaggttcaagcaattctcctgtcttagcctcctgagtagctgagattacaggcatgtgccaccatgcctggctaattgtttgtatttttagtagagatgaggtttctccatgttggtcaggctgatctcaaactcctgacatcagatgatccgccaaagtgctgggattacaggcgtgagccactgctcccggcctgtgttttcttcttgacgttaactgcaccagcataattattttagaattcattatacctaacattagaacataccatatagtctgctgccacttacatagaagattatgatagcagcacagcttctctcataacttgtcatttcctggtacttgctcccaggttattgacctgtgattaacaaataaggctagaacaattggatgtttaaatgcaatacaatgaaataacaaaatctgctaaaaagggcatgagatatgatcatctcctgaagacttaatcattagtaataatagtaatggtagcaacaataaaaaacccaaaccaattgtttatgattgcctcattctttgtgttactgggctagccaagtattaagacaactagtctacctgaccattctttatgagtgtacagattcctcacattggttttgtaggtgtgcatttctccaggtaaaggaacagaattcaaatatgtcatataaaaagattttttcatatagccaaccttcaaattattaatgtgacagtctgaaaccatttttcagccttttccatcctctccccaatatccttttattggactgctttggggaagtagaaacagatgacagctgtgaatttccaaaatagtccccattaatttctccactgtttaccagtgggaatgaacttggaaccttgaacttgtccacccgttaatgtgggatcttgccatttgaatattcaattggaaatgatgataatttttatcatgaaacatctgatttcataccttgtaaaccaaaaagtggaacagtagactgtcatccacccagtgaaatctcctaaatgacaatgagaattttttttaatttttttattatttcaatatgcaggatcagtcataatgctggaatctatttcatcacagtatgtgtgtgtttgttgtgttatgaacctaagacttcaagttgtagaattcaacatttagtaatatctctgagaaatttttaaattattggttatattttatgaaaagtttaaagcaaacatttttatcattgaagaattttaaaccaataagcaaatatgatacctgagcatcactttggtgaattttggagttttactttcaatcttttgccttttctccatgatgggaaggctttcttttaggggatataacaggagagtaaacgggcattcacacttgtgatttagttttttttgttgttgttgttatctgatagacagatattggatattgctaccactaggaataagaatgccttcctggcaaaacagaaatgataaagcacaactccttttcaattctgttaccaaagtatttcctagttttgaggggggggaaaaacacagattcagaacctaaagatatgatattgctgtctataagaacggaactatatgaaggaagttctttccaggacacgtaacttcaggacttctggtacaaattgagaaacttctgggcaaatacaatctatagaacttataacagtttttatcttgctactgttgttgtttgcgacagcataccatgagggtcttcttttcctgtctctcaccaaattcatatccctcaagtatctcttacaaggaaggaaagtgaaaataaaattatttacacttttcaaacagcctcttgaaagttttctaacttttgaccaagttcacctccttcttccctactgaaagtcttgagatattaatttccctactcaaacgtcacaaaccccacttccttcagtatctacaaatcagttctggaagggagtcttgggttatactcatgtattttaaaaatcttgtcattttgatacattaaggaaaccggtgtggttgttcccagtttctggctggtaagcactctcctgtttgcttcttttagaacagttcttttaagtgcttgtcttactatttctcccccatgatgctggcaacattcattgctacttacagaaagaagacacaaaggatgaatgatccattaaccaaacctacctaaagaggttcaaattgaggtatggattacattttgatgggcaaaggcgtactctgtaagttgaggattatatagtaacccagaccttaatcttcagacactccaaagtctttggaaaataagccttatttctgagagtgtgatgtgcctcaattaggaaaagagctgtgggagaagagtgaatacagactccagatagcctgatttgaaggaggcttgcctgttagcgtaaaggccaggggcagctaagcaggtgcaaacacagctggtgatccagaccttctaggaacacacaggctgttaggctgtgcattttctataaaagcgctttgtgctttgttcactttattgaaaatcattattctcgacatttttacttctgtaaaagaaatatgtatcttattaagagttataaaaagtacttggatttttaaatatatttctaaaaaaaatttagtcaatcataacctatattggtgaggtttaccttagggaaagactctcaggaaaagatagaaaaataacttatgaactctttgcaagcaggagaatatgattgttaaaaatctatatgggcctaatatttatacaactcgaaatgattaaattttttaaaaaaatttcttcatctgtccttcatttctgaaatgattaaaacctttaaaaaaataagatttagaaagaatcatgaacttaaactactttgctcaattaggaatattacaactttagtaaaagctaaaacattttgattcatttcagaagactaattcaactcttatttcacatataatgaatgagacatttattggttataaagcttttcactttttgtttccttacttatccagagaagaggatgggaataccaaatatgttttgaaaccatttcatccaaagctggctggaaatgtttctctttttctttgttcaatgataggtaaaacactgtaactttagagcactgtgatcacattagtgacatcagcttaaacttagggactagggagagatgaaggaattgtagttgtatttcacaagaagtccagagtagagaaacaactcattatttgccatttttttcacatctaaaagtgttctctttcataagcaagattggggtcaggacaaaagggagtgcagcctgttctgggttttgttgaagctgtctccagaagctaagtagatggactggtacagcccacatttgaaatgtagactgattcacctacttactaattgggaagctaaatccatgccctaaccatttcttaaaaaataaatattataaaataaaataaggaaaacattactgaaacgtttaaggaaggtgaatctgtggaatctgtattctgatcattgggcagcaatatttgtgtatcactaaacattacacccatttcccacctttatctcccaggcagctcaggatgaatgggattctttacatgctgtaaagtcggcaaggctgtttggtcacagcagaaatttcatgttaatgccaaagattactagagtagaagataggaaaggcaaagctgtttaattttgtcaaagataagacaatattgtgaggtttctgtgactgaatcagatattgtattttataaatgaagaaaatgcacaaccgctattgggagcttcaaggaattctgctttaatgaggggccttgccgatctttatcatttaaagtggatgataatctttaggggctgcacacattcaagctgacattctcttccaccctacttttaatatgcagcttttacttcccccagacgctacttgcattgttaggagatttctggataaaatgtacataagtctgttaaaaataagggagtaagagaaaagttagacatggccaattccttttactcagattttagttatatggcattctggaaaaaaaaaaaaaaaaaaagaccaaaaaaactttaccctttaaaaaaaaatcttattttaggaatcagagcatacttctaggcaatcatttcattttgaatctattatattccatttgttctttaagttcattgaatatttaaaaatccctgcagcatttttttcaaatcccatgtaaagaattagcagctaatttggcatactacagtattcataagataaaatatgtaagtaagattgaccaggacttacttgtttatttcatgcattcatttattttaccaggacagggtgggagtgggatggtggagtgggaagagtagatgtggggtttgtttggttttgttttaatttgggcttatcttagaagatgtgaaatgccttgttttgatgcagatctgtctgtggattgggtgctaggacacaagactaacactctttctctccccacataatgctctaaatcttgcaacaatactgactcaatgacttcaaatcccatgctcctttcttcctttctttcgctttctaaacatgtttgtgttatgaatcatactcagacacagggcccatttgatggctggggctgggtctccttgtcaccaccccagtcaattggaatgcagcccacaaagtcgcccctgccccggcccaggagctccgcctggctgggtgagttcattgatgtgctgaatatcacaaagacttaattctgtgctgaaaggttaaaaagaagcggggaggggaaagaagagaggaataaagatgaggtccgtggagaatggttaattcagctaatgaatttttgcagaatggctaacaaggaagaattttgcttaaggaaaattggtccttgatgtgactccttccctccgtctcttttgccttttgagcgggtggaaagttagaggagctgttagttaaatgacagagggaaatagaaagatgtattttcaaaaggcaaaacaaaaactaccactttggcttccaattcatgctttgaggaatgtcagcttctcacagcgttgctccggccgcccctgccccatttaatattatgcagctggtgtgacctaatttagcctctgggggcacccaagtcagagcagttgagggcttcacacagattcttctgcaacatgtctgttaaccaacagtgcctttgggaaaaagcttgggtagttagtctttttggtagagtccagtcctgtcctgtttcaagagggatatgaataaggcaggatgattccaaagaagagaaaagacactggacactggtaagaagtgtaataaaagcaacttggcctatcccacctttgtttcttcctggagttaagaggagtctccctacaccttcgggctcttctaaacttggaataacctaaatgtatcggcaggctagaagaaatctgcagatgacattttaaaacaaaaacatgttcatgtttaagaagaaaacccttatgtgattgtacaagatgtattcattattcaagtacctgtgacaaatgttcatatgcctatggtagacaagaagataaaaataggtgctgggactagcagaactcaggttttaacaactttaggaggaaaatttgatttgcatgccatttacaaattttttctaccacctctgacatcagaattataaatgtttaaaaaactgcacaatgactttataactttcctgtatttgatttatgttcacacaaactgtaaaagagagaaagctagcactttctcttttctcttgcaattacatactgcattcacacattaagtacatgaaactgataccactgttctccagctgcagacttttgactttattgcccaaatattcagaggttgtatggaaaaggagctcaaggtaggggaagggaaaaggcattttattctctacctttttgtcctttaaactgtatgatcaaaagtatcattgtgtggcaccacagttggggaaaacatagagtaaatgaactggagaatgaattggcctaatataatggagtttcatgcctcctcttttttttttttaacatattaaggttcattcattcaacaaacatgtgctaagcatctgtaatatgtctggcattgttctcaacccttgggatacattaatgaacaaaacagataaacatatcagccctccttgggtttatattctagggcttgatcattgagtcaatagaacctgattcaaattgttcagattatttttccccacatagtcttactactcttactctcatcaaagacgtcagttcatattaattttctttaccatttctgttgcaatttacatttgctcagtactctaacttcagtcgttacccaaggagactgcataatctcatttcttggacatttcttcatttcacatccattctgtcattatacacttgctatggacagagaatctaggggtgatgtctgaaggacctttctagtcctgattctgcaaatatctaagcatcaaatgtctactcaaggtaggtaagtattgttttctttctttcttcgtaatgtattgaacaaagttcaaggaggcaaactggctgcaaatgagaaaggcttgaaaagtgtcaaggtttagacttctcactttgaattcagcactgagactatgaagctttgctgcttgttgtatttattctcccattcatttatgcatttattaatccttcatccagtacaccttcggttactgcaaaactatgagccagacactgccccagctgccaaggggagcaaagatatgccagaaagccactgccccctggagttcagtctggtggggcaccgggatgcttctttgcaagcacagttcttaatttcaattcatgaaggacttaagtgtttcttcagcttgcttttgttttttgtttttttttttttcagtatttttatggcaagctgtctttgccagcagaggaatacactattaacatgttgaacacagacctgagttcttccacatgtgcgtatgcatacacatgcatgtgcatacacatgcacaaaaatttgtttttcctcaactttgctgaactacttttccttcagttatcggctgaggcaatatagtagtatgcaagcttttcagaaatccaacgggattcatgcccagctgagttatttcactctgcgttctgtgtcagttcctggaaattaacaatagagcatttcactttggtctttgatcccaccagctcagtcatggtatttttccagatgtttccgtcttaggttgctattacaaaaaagcacagcacaagttaaactaggacaagttggcctgtcctggggtctgaggaatgtgttttccaccaaataaactggtcatgtgccacagacgggttagaaagggaaactcagactttataatcagagtgatccttttcattgtgtgtttaggaaaaagtaccatgtccacccccagtaatttgactcaagaccctgtagcttctcaaagacattgatttggcctggttctagtaaaaatgatttgtgttttgaaataagttaccatgctattttctctcaggttaatttaccctagcctgtataatactcttaggggtctaaatgccaacaggcataggaaaaaacctcagttgccagtaattatatcatttaggtggttgggcagagataagacaaataattggtgttatcatgccttctatccaagttttgtaagcaagaatttcatagcatgttttaacacaaatggcaaaaaaaataagcccacagcagcttgaagcattatatgtgaaatttactaaactagaaataagaagaagaagtgaaaacagtaccccaagaaagtcccagaagactgataacaccaaatgcaggggcccttgctctacctcaactccagcccaaatccaccatgaagactccctcagttgtcctgaaacacatgccctgaagcataatgtggtattataaaataaatttcctgaaaaatgacaagataagcttctaatgaactgtggctaaaatctgatactggaaagaggaagatggaagatggaattaggaagatgttgtgtgaatgttgacacatattctcacagctaatgcttattttattaagcatttctcatttggtttgtgctactactaactcataacattatttattgagcttgatttccaaataggtaatatctttctaaatgcttttataccctgtgatctggcaatttcacccctccatatagtccatacaaaaatgtatagatatgtgaatgaaacggcatatgagaatgttcccagaattatttttttgagcaatcaaacactggaaattgtccaaatgcctatgaacagtagagtggataaattgtggtatattcacataatgaaatgctatgcagcaatgaaaataaaccaattctaattatactcatcactatggatgagtctcgtaaacataaatttgagtcaaagaagccatagcaaaagagtccataatttatgattccatttatttaagtacaaagagaggcaaaaccaatctattttgtcaggaggtaggataacccttgggaaggggtggtgattaaaaaggaatagaaggaaggctactggggtgctggttgattctttttaatgtttgtaaagtttacatggtgtcttcagcttatgaaaattccttgagctctgaccttatatgtacacttgtcaatatgcatgttagagtttaatacacttgtgcaaatgcaaacatatgttcacttattaaagacagcaacacaacagaaaaattcatttaaaacttacttaaagaaaaaaaaaaaaaaaactagtcggttgtgatgacacacgcctgtagtcccagatacacaggaggttgaggcaggaggatctcttgagcagagaggttgaggccagcctgggcaacatagtgagacccaccccccctacccccaattcctaaaaaaaaaaaaaaaaaatcctgagtagtttcgggtttgacatttaaataagaacataatttacgaatattttaatcttattttcctactttaaagattaggatattttcctgagtacatatcaatgtggatacatttcatagttattatttgaccacaggctctgaagaattggcataaaatattgcataatacaagtatgttaaattggattaaaatgaataacaaatgctatttttccttcgttaaatattccagatttctttgattagatatcatctctccctcttttgaaagtccacaatatgttgtatttcacttagcgatgcatatattgtactactttgtattatgtctaattttataaactccttggggtagagttagggctcgttcatctttgaatctactgtgatatctgcagaaggcaggtgtaatatagtgaagatgttaagagagtgcctactggtgctagacatgggttcaggttcccttgctgccatttacaatttttttctttttttttttttgagacgggagtattgctctgttgaccaggctggagtgcaatggtgcaatctcggctcactgcaacctccgcctcccgggttcgagcagttctctgcctcagcctcccgagtagctgggattacaggagcccgccaccacacctggctaattttttaatttttagtagggacagggtttcacaatcttggccaggctggtcttgaattcctgacctcgtgatccacccgccttggcctcccaaagtgctgggattacaggcgtgagccactgcacctggcctacaatttgtataaatttggggaagtagtctctctgtacttcagtttcttctttataaaatgggaacaattgtggcatctgcctcttaatgttgtgaaattaatcaatcgccagaaagctctgaggacagttcccaaaacatagttagttctcaagaattgctagctgctatttttaggcatggtagtataattaagattcctgctgtgattcctgaatgagaaaaagaaaagaaaaaaattagaaagacttagaagtagtggtcagtcaaaagtcatatgtaaaaatctaaaattgcttggtaaaatttctgtctgctaattccccaatacaatttttttctcaaatgttcttcaaataaagtgcactgatcatttatagttgaatattttcaaagtgttctaaatcagtctggtcataaacaattactagattatttcttgtaagtatcgatagtctcctgattcagttaggtaggtgggaccatggtaataaatagacctaaaaatgtataacggttgaaacacggtaaaagtttatttctagctcacattacagcccaagtagatattaccagtcagcttccatatgatgattcaagaatccaggttctattgataggtataccatcccctaagtctcttctaatacttatgtcccacagaagtgaaagagagtatgggaagctgtatccatctacttcttaaaagccatgatgagaaacagcacacatcacttactcccatattccttagctagatttcacttaatggccacatcccactgaagagacactgggaaatacagtttaagtatgtgcctcagaaggagaaattgaattttgtaaatagctggcagtgcttgtcattatttagaggtaggcaagggctatagttctacttcccgacaattccattgcaaatacagaagcatactcataacattcccacacagatatgtcatagcaatcaggccccagtaatcatagcgccttttctgaagctcatgaaagtcccaggtctctgtccctgtaggtgcttcaatcacagctgatatgaaagggtcctcgtgagataaacacaacactattataagggcaggacttggttaagcttagagaaggaataaggcaaccgaagtcctgtgaatcatgcttggatataccactattttggaatcaagttcagcaaccatttcaaaaagcacctcacttccaaaaagtggctcacctccttagctccctggattattctagtgttacacataaaagggaagaatgtctttagattctatccaaatccacatatattgagcaccaataattttactaacaaaaacccccacctcttatacccgttttgccaattagaaaaacttctcaggttggtgtggacataaaaataaggaaagcagatctgtagcagccaccctggagtgtggccttttgatgaaatattagcaactacagttgatgtgcatattcgtacatagagcaactcactgcccccaggaataaacaggttattcacgcatacatatcatactacccgtgcagacatgtgtttattataggcagcaaaatattataaaaggtaaatttagccttttatttaaatatccctctgacagagattgtcactaaggaaggctcccctataataaaccgcttatttataatacaatggtttaatatgtaataattgcttgaaatatggaatgttgtccgtaagccaagcagttgtgtgatcaggaagttgtagatttctctttttccctgcaaagattgataggggacaatgacttcttgattcaataaccttcggaaaaggaagtagtgaaatgttaacattcttcaaagacttgacttttgaaaagcatcctgaagccactgtgggctgattgatcatctcagtgggggtgtcctctgggaggttttgtacaaaatactcctggattgtgcaataaggagctgcatttctccagaacatgagaaatatctgttgtgaatgttattcatacattttttttggatactcaaaaattcctgtttttcgtgactgtcttttgttggttttgtcattgttggtgggatggggagaaagaggatctgtttctctgaaatgatatttgaagtatgtgtttagatcctagatggagagttcacttctaagttgtgtaataacattgttttcaagtttagtggtggtgttccatggggatactggagaccaccctacttgtgcttgggggctgctatcttcattcattgtggttttcaccatggcaatgggaatagaattttcagctctctgagctcttctgcattcttaagtaagcttgcataatactgctgaggacaaagcagttgcctgctgaaagccaaatgaatgcataaatttggcctcaagatttttgaactgttgtgaaagagtttttgtgtcttaggtttctttttttctttcaaatcaccactagcaaattttttcttcagatgatatctttgttatccaaaatctgatgtataatgaaggtaggtagacaattttaacacatgatttacaaatgagttgcagaggctaggtaagtcttttaagagtttttatattaagtgaaagctccccttttaaacatttgtctgggattttgtgctgggcatgatccaacaaaagattattgcttctgtaacaaaaatgataaactctgtagaagttggcttagagatcttgccatattgttgaatagcattgaatgctattgaattattctttttctagatgactgagctaaaaggaagctattgttacagaacaatttattttggaattgtttcttttccttttctttcttcctttcctttcctgtctcacattatatcttccctaaccaaatgacatttgtaattactgttacctgaagacattctggtaagttttacccaaataattcaatggttactttaggaaacataagaagtaagtgcatatattgaactgtcatgtcaaatttgtgtactgtggaaggcaggcatttgaatcaataagtacagcttggcccagagacatataagtccctgaaacccttcagggatgagaacactgtgacaacaaataatgcctatcagtggtggtcatgcgtagtatctcagtacatttcaaatgttttttttgtttttttgttttttttgtttttgagatggagtctcactccgttgcccaggctggagtgcagtggtgcaatcccagctcactgcaacctccacctcccaggttcaagcgattctcctgcctcagcctcctgagtagctgggattacaggcatgcatcaccacgcccggctaatctttgtatttttagtagagacggggtttcaccatgttggccagggtagtctagaactcctgacctcaagtgatccgcccacctcagcctcccaaagtgctgggattacagatgtgagccaccgcgtctggcagtacatttcaatttgagctaggtctgatgactcagggaatgtcttgaaggaaaaattcatttagaaatatgaaacaaaaggcatttggcgcatagatttaggtgatgtcaaagttacctgcttaacgctacaaattcctcatatcttaaagtgcactaagctactttcccactatcctgcacaaatggaccactactttgattattgtgatggctctttacaaaacattcaggtggctttgggttggaaaaagccaaaaaaggagtttttactttcttagatgaccaatatagtcaattaaagaataataataacaacacaaacctctcattccttctattactattacaaattttgttctaaattacatttctggtcatgctgctggaagctccaaactggatctgctttctgttttggatgttgacaggcagagtgtcattgtgacagaaggcatcggctgttttccatggtccgcttatatttgaacctgacttttattttcaaaggctcaagccatagcagttcaacaataaggaataagtgtttgttttttgtttggtacaaaatataggaaagcactataatgaaaatagaatcggcccaaattatgggagaatgcattgtttattaagtcattttagtttcctgtaataagaactgggaagtctctggatatttataattgtctatatgtaagcagtaatcctggaagatctgtgtaaggatcaaatgaattgcacttaattaaagtgattataccaggaactttctaacattgttttcaatttggggatgaaaagatatcttcattactatggaataattccctggccttctggtctgataatctggggaaagacttctgcctgcattagggcagttaagtttagtctacaagttagccaagatatttccataaatcaaatagcaatttcaatttatgtctgacttattaataaatttacattaaactcagctatttcttagcaaaattgagtaacttattcaatagtttttgacactttggggaatgcatatatgttgtatttacttattttatttccactgtatttcaaaagggatttgagatagctgagtataaacatcctgctttagaccatgtcaggtacaaagatgagtaagtagtctctggcatccattttggttacgctgttatgcagaaggaaagggaagcgttgaacactgtgtcccagacagcgtctgccaccttccattcattctcagaaggaaaactcccgtttctttccaagataatccactactgtttatctgactctaaaattgttttttatatatttattgatggctaattaaatgagtcaacttttataacgtggttcttgaagaaaaaagttgacaggtcataaattcattgttaaaaattatgtgcaaaggtatatgttctgtgtacttgtatatgaatggctcagttaatattaaagtggaacacccttttaaaaaatatttattaggtagtagagcatcactttcatagttcattacatttaactcctatttatggctcagatattttttccattacaggcagatatcttctaaagcatttctaagtcattttccttagcaaatagcaagttttgatgacatgacctaattcttccagttttcaatttctaagatgtttggcccatgtcccatttggcacttacctgggaaggatcaagaatagttagtgaagatgtttgtggctaaaagtctggaaaatggaaaacttacttgctgcagacaaatgccttagcctgcatcaaggtgaacttcaaactgcagtatggccagaaggtgggggtactcagaagggcttggtctggaagaatcagactctgccctgggagttctttctcaggcagagtatctataaaaggattggagagattaggaaaatcattaattacttggtcagtacagaattttttttaaatgggcagggaacccttggaatccaatggagaaattaattatctatgaaactcaaataaatttgaattaatacaactgaagcaatgaaggatgttagctcaaagcttcatgtgggttgcaaaattctgccaatagaggaaaattaaacaaagatacggctttaatctagccatgtgtgctgcaagaccaggcaaagtctgtagacccatgttggtttaatgactgtcaaacagggtttctttggtgtgttgatgatggtggtgagaaaaattaccttggatctcttgcaatctcagaacttacctctaggctaaaacctgcagttgatactcaaccactcccagtggttgaacatttgcttgtcagcatgaccacaaaattgtttcaggtgattcagtagtttctataagacttaaaattaaatgtacagtgtttaagagaatcaccccataatattaaatgcttttgtattaataaatctggatgtatatggcattttaatgtatgagtattttcattgaacactgtgattacattaaaatggataattgactattttattcagagttgggtttttaagttgaaattttaatgttttatcaaaaatattgaacaacttgagataacttaggatccaccgtgtttgtactttaatttgttgcatttacaagaattacttatgtatgtggtagtatttgtttttactcaaacaattgaggcaattaaggaaattgaaaagaaactttataaatataagtttaaaattttaaggaatttgattaaatacatgagaccagacattgatcaaagattccctaaaagcaattgttaatatttcctaaatttcaaaagagaattttaaaatattttaagttggatttagaaactttgagaatatttattttgaaaaaaataaattctaggtaatcttacctgtgcacaaaaagtcatacattgatactatcctgacacaattcttcctcaaatggtgtattgtattacataacaatgtaaattgttatgtaaaacacatctaacacattattatggtcaagcccctattggaaaagagttatcagccactttctgtggcacaggactgagctggaccagggagcgaaactgtactgtgaatccttattcattttctcattcatcccgaactctggtgagctcagctacaatacagaataataaattaatgtcagtcacacccatgaggactcttttaatgttacccattgcaaaaataccttggacaaattccgtcctttgctttaataggatgagtcctgtggttaactcagatttcatttggaaaaagagctgtctctgccctcgagcaactcggactaatcttgtgtgtccttcattagtacttttaccacatgcctgttttcaccctggagctccctagaatttatgcgtactctgtctctgatgtggcctgtgaacactaccttaatttgcagcacctgcttttgttattaggcaaaagtgcctgagagcttcttttggtctgtttgtttgtatgacagctttttgaaattagcaagaacgtttcttgtcccctgcccccagtctgggtttctgctcagaagttgtctgttcatgctgaatgtaggaatggtagtttgtggagacagcccagaagatgtttatatcgtcaaggatttgggtggaagataaaaatgggaagagggtaaatattttagagcacataaaccaatctgtttcttttagcacagctctttgattcatcaggctaatcatttaaatattatcccaaatgcttgatcaaaattaagtaaagatgacagttttcaaaatggagctctttctttcacattttatgagtgaatctggttttctgactcagataaacaaaaggctgctgacttatgcaaatgtttcatatagctcaggaagacttgctgggtaatgaaattcaaggctgagacagaaggcagagttgggatggatagatagcctgtactacgtgatttataaattagaccgtccatgctcagtttcactcatttaagtcaaggaggacagatgtccacatatgtgtattactctttatcacctcacactcaattttattggtctttgtttttgtatattctgcattatccagctctcttatgttacatatgcattaattatgcttgtaaagagattacaagttttttctctgtcactccacagtacctgttagaaaactgatcacatagtactcaaatatttggttagttggctagttttaatttgggggattaagtatctgtgaaaaggtaaacattgaatttattgaccattcattttgcacaaatacatattgtcctgtcccaggtaccgtaccagatgcttagatgctgtgataataaaacagtctaggtcttggctctcatagggtacaccatctaggaggcatagggaggatcagaacaaagatggcatagctaaggataaaataagaaaaagtacagaaagctatgagatggagctcataaatggcagagaaacctaaattagctggagtgattgttgaagtctttgctggaaaagtaacattgaaaccagtggttcccaaactttggtgcacaatgaaatcatctagggaatctttaaaaacattgctttttaaaactgaagctcccacctccagttgttattatttaatttgtataggctgtggcctgggcattgggatttttgaaagctgtctgggtgattctaatatgtagcagagtttgagagccagtgatttaggccgagacctgaagagtgaatcagaattgaccaggtgaagaattttgagggaatatagtgttcttgagttggaaggactgtacacccaaaggactgaaagaaggcttgcttgttggatcagggtgaaaaatggggctgttgactactgactaaactagtttggtcatgaacaacacttagattgattttattagttagcaactaagaagtttaaagtattataggtgagagaaagccactcccttatcacctggctactaggttataaaacatgtaaatttcaaacaaaattccatcacgtgcttatttaataagcagccattagcaaagcaggcacaaagcagttcacacactgtgttccttgagctccacaaagtctcagctctctatacgtccaggtaagttgaccttgccttgtacaaaggtttacttgaggcaaaaacaacagcatttatcaggcatgattccaggccttctacttggcctcataaatcagaaattctcctaaaccaatgctgggcacatatccaactaggtatcaagccacagacgccatttttctaagaggtacgggattcaagcctaagggatacatgataacaggcctggctggattcttacatgtttatacagtggtgggggtatgtccaacatatttttacccatgcacatactttgaatatcttaaacatcacctaatgaaatttcattattacatctatcatgctaattagtgaaccactactttcaccaataaaaatctaatgttgatgtttattggctattggcaaagtttctgctcttgatcgatatagagataataaaagggcttgtagtcgctgcctctggagtgtggctcttactgattgaatgttactttgccaccctagtcttgcctcctttatagcacgtttccttgatgactcctgaacatgaaagtgtaaaccaactggtatatgcacaatatcacattgattatactgcagtaatttaaagtagattacagactgtaacagaagagtaatggccatctcagagcctggaaagattggaaaggaggcaatgataaaattcttcttgggtgagaaagctgacactaattaactttctttcttgcctatttatagaacacaagagcctatagagagcaaggaaataaggaggaaatggagagctgcttggatgttcccttttataaacaggcaaattgtctagctctgtgaatgacttgaattgccacttgacaaaagcattgcttctcccatacctcacacaatgtattgatccctgtttttccctatttctcaatagatgggagtctaaatattaatcagaaaacttctgatacaagtattaaattatcttgttatctccctgggtcactgtgtgtcccgttgagggaattccttcgaggaccctttggtgctttttcagtaattaggttccatctttgatcaagagaaaatcaaagtgaggacttgagtactgtgggagtcacagccctaacctctagcagactgtgagagctactttcccacagccagttcaaaagacaaggcagggattttaaaatctgtgtttgatttctttttgatactgctggattacatagattaagctgctggctacgcctttatgccattctcaatagcagagatatttatgaagccttctccatttccagctactcttctgcttttgttgccagaggattcgtttgccttcatagcagatcatttttagggttgcttttcatgagtctgcattttctgtgctcttttatgttacagatggagcctgtgatcctggtctgtatttgtgttgtcaatagaaatatagtttggactacatatgccattttacattttcttggagctatatttctatatttaaaaaagcaaaaagggccaggcacagtggctcatgcctataatcctaccactgtgggaggccaggactggaggatcacttcaggccaggagttcaagaccagcttgacccacatagcaagatccctatctccacaaaaaaattgcaaaaatactagccaggcatagtggtgcgtgcctatagtcccagccactcagtaggctgaggtgggaggattgcttgggcccaggagttcaaggttacagtgagccatgattgtgccactgcactccagcctgggtgacagagcaagaccccaactcaaaaaataataaaatattaattaattaattttaaaaaagcaaaagaaacatgaaattaacttacattttatagaaataagtatatcaaaaatattgttgttctaacctgtaatcagttcaaaaatattatgaggtattttacattctttttttcttatggagtctttgtaattggtgtgtattttctacttttccaacacatttcaagttggactagccacatttctgttgctcaatatccacatgtggttagtggttaccatatcggacggtatacatctgtctaaaagtactaagaaacctgttatctaaataacccattgttcattttgtaaagcacaggcctggatcattccctatcttcctagtggttgtcgtgaccaaggcacctattgttgagatgacagggttaagggcattactggggagcagctaattggctttttgaaattcaaatatataaaagtcttgagtcccatgccctagccattttggttaattgttcacagtgatataaaaatgatagaagtagactaattgcttatggtagtggagtattggcaagttaggaaaggtgtgagaatgattaagcggtagaactcatggtacttttgtgaaacctgaattttaacaactcagaaggaaaacactgagcatatgtatctccaaaaagctcataaatactcatgctgcttatctttctgcttcagtgccagcctagtaatgactgctggaaagaacagacacaaatggaggatgcctccctctccacaccttattgaatctgacagcatgagacagtgaggtcatcatttcccactgttgactccaagtctccttcacctgtatcatcatgaaactgatgaatttcccctcttaagtggaaacagtgaactctcagttttaaaggagagagacagagagggaggaacaaactgtacttgttttcttcctgcctagcctctactttcattgttatgtaacaggttcatgcaaatgactttggtgtctgtgtgcgcatttctaaaaattaaaaaagacattgtaaaatcaccacccaaagccacgtgaaaggatttcaggggttatgtaattgttgaacttagactactcagtgtgtctactatggatatttgtagttgcgctcaacatagtcatgagactggaatttaatgtcacataagctctataaaggaatagttcaaatcacttttctatatgttaattataggatggcttgctctatggtttcaattataattttctataatacttctttgtttatttctttggtgattaagcttgaaaatagttgaaactggtacttagtagtgaaaaggaatgataaaggtttagaataaacatagtagttgatgctaacaggcattttggtgctgggaagatatataagagtattactaatatttgccattcttttttttttttttttttttttttttgagacggagtctcgctctgtcgcccaggctggagtgcagtggcgggatctcggctcactgcaagctccgcctcccgggttcacgccattctcctgcctcagcctcccaagtagctgggactacaggcgcccgccactacgcccggctaattttttgtatttttagtagagacggggtttcaccgttttagccgggatggtctcgatctcctgacctcgtgatccgcccgcctcggcctcccaaagtgctgggattacaggcgtgagccaccgcgcccggccttgccattcttacagtagtctgaaatgtctgaaaaccattctgtctaacacagcactgtccagtggaactgtctgcaaatgatgaaaatgtctcccatctgtgttgactagtatggaagccaccagccacatgtggctattgaacatggaaaatggggcttgtatggctgtgaaaccaaacacctgattattttctagagacttagattttgattgaactcacgtcagtgttttttccaagttagtatcaacagcaaataccaatttgcagtgaaggtatgctgaggtgcacattattgccacccttcattttaaatttggctattaataattttcaccttacttaggcctgctttcttggatcaaatttggttgtatgaattttcttttcttttttgtttttgttttgagacagagttttgctcttgttgcccaggctggagtgcagtggtgcgatcttggctcaccgcaatctccacctcctgggttcgagcaattctcctgtgtcagcctcctgagtagctgggataacaggcatgtgccaccaggtctggctaactttgtgtttttagtagagacggggtttctccatattggtcaggctggcctcgaactcccaacctcaggtgatccacctgcctcggtctcccaaagtgctgggattacaggcgtgagccactgcacctggcctagttttatgaattttcttatttaaccctggcagtcagagttttctgatcttggatccccttcatctcctttcaggtgccgatgatgccagaatttatcttaccacaaatgtaagaggcaatattagtcataacattttggcttctcagtgaatttctttgctttccacagcgtgatctttataggacgctatcctttcaagtcccatgcttctccctcttccactaaaaagagttcataattcttgtcctgatttgccaattctgctatcctaaatttccaattaagatacacctacataagtgttgtcataggagtttagaaagagcttgttcaactcttgcttccaagtttgtctctttcctacttatcattttcctcctctaataaatgctaattaaaatacttttcttgctggtttagagccttctgttttaatattcttctgtgtaaagaggctaaatttagttttccctgaattcttcagaccattttaaacagaaatgaatatgtaaaaccactttagactgtggtgtctgtgttttctcaacaagatagctgtaagtactatagaaatatggttatatattttaatagaagccagcagaataaaccagattgaccctatgctcttttggcttacaaacatgtatgttgaaactttgaaagccccttttatggtgtctggataaccataggatttttaaaacttgaattcctgcactaatcagtggcactaggaaggcactaggaaagacttggagttgtagggtaggttggccacacttgtgtcgaatgattatgaaacgtactctgctgttctagagcagcaaaccctaactttctggcaccagggacctgttttgtggagacaatttttccatggacaggagggtgtagtgaggatggtttggggatgaaattgttccatctcagatcattaggcattagattctcataaggagtgcacaacgtagatcctttgcatgcacagttcacaatagggtttgtgcttctatgagaatctaatgccactgttgatctgacaggatgcggagctcaggcagtaatgctcacttgcccaccgctccccacctgctctgcggccctgttcctaacaggccagggactggtagcggtctgtggcccaggggatggggacccctgttttagaggctggtggcacttggttaaatccagtaaatttacaatatccaagaaggcaaactagtgccaacaaagcttccaaggctggtaaaatgtatcacttctgcagagtcacctcaagtttgggctagtgaagactgaagcagcttaccattgctctgccctttgcagaaaggctttaccctttagggagttgagaaatacaggtttctggaaatacatctttcttactatttggtaaattaaaggaagatcctctcaagtcaggtccagagaactcaatgccagaatgtttaataactttgttcttcaaagagctcaaagaaatttactattctttcttaaatcttcatgtaacatccaggaagttccttaggagattttacaattttttaaaattttgtttcattgagcttattcagaaactcagtaggaaaacaggcaaagagaagcagccctggttgaaatggagtttgcctccgaagtccttccttcttctctttccttgattatgttgtctccatgtgtcccagccatgcagtcctcggaggagggcccacggaacacaccctgaagactggccaaaagtgtcactaaagatgtgtgtggtgaacaaaagtttggctgagatgctgcctccaccctaaaacactatgtcattctaatgctgttcagcagagttactgcttctgtctctctctacacaaatgcacacaaacacacacacacacacacacaaagtctgactttcctagatctcaaaataattcattagttacggctctaaataaatggtaatttcagaatagattgggcctttctgagtaaccccccctttccaacaaaaggaagacaacggaaattattttctttccgtggctcccggaacaagtttctttccaaagagcttctttccgaagctcccagaaatagagtttatatggaaatacaaacattggcttcagaataacagtctgtgcatttggagaggagaaactccacaattctaaaaacaaaaagtggagaacaagtagccaaaccctgagatgccagaggaaagagggatatatgaccttactttaccttcgtcacggatgacttacaagaattaattaagtaaaagtcggtaaatttcttcaagctctttggagaaagaagctatttaaatataaattatgatcatgcagcttgcatctcacatgtcaggcatgcatggttaactatgtctgacgtgtaagttatgcttcctccaggttatagcagtgaggatcctggatcgacctcccttctttgacacagtggtaagacagagattgatggtgttatgtgtggcatctgagtctagggcatgtgagccgtgatgttgtgcttggagaaaccagagcctctatctatgtctcttcttggggccattttcttaagacatttgaggatggggtgggaaacagaagttagtaaattaagaaaatctacttttttttttcaatttactttattaacttattgcctaagagggtaaaacaaattaaatgagagaagaatatatttttaactaggtgttttagtttcctagggctggtataaggaaggaccaccaatcatgaggcttaaaacaacagaaatctattctctctcagttctgaggctacaagtctgaaataaagttgttggcagggccatgctccctctgaaggttctagagaagtttctccttgcctcttcctagcttctggttcccctaggcattccttgacttaaagcagcgtgactccaaactctgcctctgtgtgtgtgtatgtatgtgtgtgtgtgtcttcacctgcctgtcttcctgtctttttttctttttgagacagtgtctcattctgtcacccaggttaaagtgcagtggcatgatcacagtttactgcagccttgacttatctggctcaagtgatcctcccaccacctcagcctcccaagtagctgggaccacaggcacacaccaccacactggctaatttttgttttttggagagatggtgtcttgccatgttgcccgggccggtcttgaactcctgggctcaagcaatcctcctgccttggcctcctaaagtgttgggattacaggtgtgagccactgcacccagcctggctgtcttcttataaggacaccagtcacatcagagtagtgacctaccctactccagtatgatctcatcttacctaattacatctgcaacaaccttatttccaaataagttcacattctgaggtactgggggttaggacctcaatatacctctgttttggagatagggcgatgcagtttagccaataacaccaggttaggatagttttcaaaattatggaggagctgaaccttgcccttatatacaatatcaggtgcagccccatcagaaagcaggtagagcagccccatcctggtgggggcagcagtggagggcaacatctctgctctgcatcccccaagctcaccttgctccatcccacctgggcacatgttctttagacaccacagagacacccccaacaccctgcagaggttcaagggtcacagcagaaaaagctgcaaaactagatgttccattggtttcctttctgaagtaaaaccctatgccttcatagcaggcagctttaaggcacacaaattgtgaaaatagtctgtttataaggcttgttagaaagcaatcgcatttcctttgttggttttaatgtaaaggaaatagaatctatactgaaagcaaacttcctccactgtcacctttgctttgccaccagcagccattcagagttgggtgaaaagcctaccacagactgagggctgatttttcccttctaaatgttaacgtccatggagaatggtagcatacagctcaccttctagaatgtgacttcctcctttcataaagactgggaaagtgggaaattcattcttgtaaagactgaaacagagggagtcacagccagtcctacctgctgagcagcacagggtccacccacaaaaccaatgactccacagcagaaaccctgactgaggtccacggcacctcccgcccggagtgatggaactcttgggaatagtttgcccaggctccggggaggaatgcagacgtccttatcagtctttgggaggctgtgatctccctggcaaggagaaagaattatattttttagataactagatcctggaagaggaggctctgggaaatagtacacaaagcagcccaaggggaaaagtcctaacgataactccataaaaagcggctttaaatggtctcagctgatccatatttttagaaaattgtttttactcagcctgcctgactgtaatactattgccagaaacagcaatgaaagggagataaacatgatgttgtgatctttctttttatgcctcccttgaagccctgggtagtataaattgtgcttgacaacctttgattagcagctgctcattctgctgaaaaaaggaggcatttatctgagacactgttctcccttcataaataagctaggaatttgcagctgatgatagtttccctggaggaagctggtctgatccacctctttcacacctctggacacttctgtttggagccccgtgggaaggagcagtggggagtccatggggccaattggggaagccggtgtctcacgcttagggtagcgctgggtgacctcagaactttttgaatgtgatatagtctgtgccaggcagatcaagtactttcttcttttctgtgtgacagcgtggtgctgcagaaaatgctttggaccgagcaacaaaagatttcattccatttctgattcttttactaactgtgactttgagcatgccacctaatctctttgagctgcagcctagattcattcttctaaaactgagctatccatgtacttaaagggaaatggctccagatatgtgaagccacgagataaacccaaaatatcttctaagagcatcaattttactccatcattttgaggaaagcatttttatatgagaaacaaggctacccatggagtagaatggagaacttcacaacaatttttcagtaggtacaaggaaaacctgtttcagagaagtactgacttaaggtatgagttcactactctttgattttaggaatattttcatggcaaagtttgagaagcactagattagatcatcttgaggctgcctttcaactattacatttgaggattcaaccacaaacctctgttatgggctgaggtttgaacttgccccccacaagttcaaatgttgaagccctactccccagtacctcagaatgtgactatgcataaataggccttgaagaagtgattaagttaaaattaggccattaaggtggatcctaatctaatctgattggtgtctttatcgcaagaggaaatttggggctcggtgcagtggttcacacctgtaatcccaacaatttaggaggctccggcaggaggattgcttgaggccaggagtttgagaccagcctgggcaacttagcaagaccccatctctacaacacataaaaaactagctgggtgtggtggcgtatgcctgtagtcccagctatatgggaggcgaggccagaggattgctttagcccaagtagttcaaggctgcagtgagctaggatcaggccactatactccagcctggatgacacagggagactccatctctatgaaagaaaaaaggaaaggaaatttggacttacaaagagacattagggatgtctgcttagagaggaaagaccgtgtgaggataccgtgaaaaatggctatttgcaagccaagaagagaggcctcacaagaaaccaaactgcccacaccttgatctaggccttctgagtctctagaacgagaataaataaatatatgaatgaataaatgaatgaatgaatgtttgagccacccagtctgtggtgttttgtgattgcagtcttagcaaacattacaggttccttttggctactacgtaaaggccaacttccttggcccagaattaatgaccttctgcgagggtcattgaccccatcctcaccatttagccaccactgtcctctactccctgaattctaacttgctcttgttttcattttgtgcctccccatctcccagcctgttctcttcacctgagatgaccacgtctacttctcagaatgtactcatcccctaacagcctccttcccctcaggtccagcctaaaatgaactgacttatctggtatctgttggttttgctgctaacatgacacaaatatagccttgtctttgggttgtttctgcattattcttcctctcagatgccagagtaaaaagaccacttcttccgtgttttgaatgtttccacagtgagaagtcccatgcttgacacagagtcaaagcccaccagctcagtgcatgaaacagacattaatcagtactgttttctctgccaaatatattttaaaatatacagtcattccttattgtccttgggggattggttccaggacctttcttagataccaaaatctgcagttgttcaagtccctcatgtaaaatggcaccgtatttgcatataacctatgcacatttcctgtatacattaaatcacctccagattacttgtaatacctaatataatataaatgcaatgtaagtagttgttatagtatattgtttagggaataataacaaggaaaagaagtttgcgtgttcagtgtgaacgtaaattttttcaaaatatttttgatccacagctggttgaatccatggattcagaactcatggatacagagggccgattgtatcttataaatatattttacacatatatctttattatatattatatataactacataaaaaataccttaaaatgtatctcgtgctttgattcctgggtatacaactggtattcaggtttttgtttgtggaaaattcatattgagataattaaaagatcaggctgaaaatgagtattcctgattctaccttctgctagttctataatgtgaaatgcagcatttactcttttgttttgttttgttttgttttgttttgagacggagtttagctcttgttgcccaggctggagtgcaatggggcaatcttggctcactgcaacctctgcctcccaggttcaagcgattctcctgccttagcctcccaagtagctgggattacaggtgcctgccaccataccctgctaattttgtatttttagtagagacagggtttcaccatgttggccaggctggtctcgaactcctgacctcaggtgatccacctgccttggccttccaaagtgctgggattgcaggcatgagccaccgcgcccggccacttttaccgattttggagtctttttttattttcattttactgtgctggttatgataatctatttgaaaagatatgagtcattgtgaccgcttgtggtagtattttaaatacttcttcctttgtaaaatactttataaccatatttcaaggtacgtttttatatcttttaatattaaaaaacactaaagacagatgtgatttaaattaagtcaaagtggaaaaaaagtattgaacttactggaaacagaattctcaagtactttcaaaacttgtttgggactgatcagtacatcacagatggaaaagtaaaaagttgcagttatccttgacatttcaagagagaaagaaaacggaaaggaaaatcatgatagctgtcttgaaagaaattgcttccatactgctgtctgtcagctattccagatggttttactgttttttcagtggaagtgatggtattttaaaaagacctgaggaaaatggatgaggttcttctttcctgatgtcccagaaaaaggatgaaggggaaaatatttttaaagaattgtttcttttaagtgagttggccacctgtaccaccgtattgatggtgcatatcagcaatcttatgatacgttcatattctctaaatttttagtgatgaaaaagttgctatatgagcataaatagtgaaaacaatatatatcctaagctgaaaagttagtagaagttagtagaaatctgttataaatggcttatatattctattaaaaatgaatgattatatataaggtttgatacacacatatgtatgtatatgtctgtatgttttatacacacatacacacacacacacataaatccttataatccttacaacatagagctctatgatatggattttattccttcttaactgatgaggaaacatactcaagagaaaggcaagaaagttgcccatgatcacaacgccaaaggggaacatagccacacttttaaggccacccttttcattaccatacaacgtggcagtagtgtttgtgaaattcacagggtgtttggtttgctgtggtatcaaaatcagtagtaaagacctggattcaagtctgtcctctagtgtgtcaagacaaaaatctacgcagtttcatgctttaattttcttgtttgcaagctagggataagtagtatctgccatcagagtatctaggacttgaagaaatgtgctatatcaaggcatgatatgcttattttcattagtactgaggcttttcaattgatactttctgcattactgtttttggattggattcttattttatttatttatttatttagttttgagacagagtctcgctctgtctcccaggctggagcgcagtggcgcgatctcagctcactgcaacctccaccttcctgattcaagcaattcccctgcctcagccctcccagaagctgggattacaggtgcacgccaccacgcctggctaatttttttgtatttttagtatagatggggtttcaccatgttggccagactggtctcgaactcctgacctcaagcaatccgcccgtctcggcctcccaaagtgctgggattacaggtgtgagcctctgcacccggccttggattggatttttaaaaagtttttatttgtatggatttaggagtacacgtacagttgtgttccatggttatatggcgtagtggggaagtctggtagccatcccctaaatagtgcacattgtacctgacaggtagtatttcgtctctcacctgcttcccactctttattacattgtaaaatcttgtttcctttgttttttcttttttagttttagagacagagtctcattctctctcccaggctggagtgcaatggtgcagtcatagctcactgcaggcttgaacccctgtgcttaagcaatcctcctgcctcagccaccttagtagtcgggactacaggcatgtaccaccacgcgtggctaattttttttttcttttttaagagaaggagtcttgctgtgttgcccaggctggtacttttcttatttatctgtataagaggcttcagttagctcactgtggcagggcaaactacacagagtctatataaatttgtagaaagtccttctttcactatccagttcaacaaatgtagattttactacttttttaaaaatatgtctgacatcctactttactgttggtgtggggctcctgatttacttaagacccttagaaatatgtaagaagaggaattatttcttatccaaactttttaaaaaaaagttaagtagaaatgaatgaaggtagttgggagtctgttggtgcttgtgctcttgatgtgttggttaagggcactcgtggggagagaggtttaactcttcctcctaaatattgttatgttagaactgaaacaatttctgcaatagaacttacacaggagagaagctgaagtagaagccccagggaactcatcactgctttgtaagatttctctacctgagctctgcactgtcttgggtaattttatgatattagtatatcaaaactaaggagggagatattttccctcaaatagtttgctttctctgcatgtgcttctcctgagtgatctcctatagaacatcttctgtcatcatatgcaaacataacatgccactgtctgccacacaccggggaattggtgtgcgttgctctgatggtcacaccatccccaagaggtgcaggtggctttgttcacactggccctgagagaaaggctaagtttcaaaacaagtgacctgcctaggccaccactcaccagtgcagagcctggctccagaccaatcactctctggttccaaagcttatggcccttcctctacagcaggctcctatttcaggaccccatttgagttaaagcttggccataccccttctttatacgttttggccttaggtaatgattaaaaaataatgaattactatttctcacagccatatgagaaggtacattcgctgggacccttctcaacccacaagctcactcttcctttcttccaagggaatttggttactcacaccccactagttccccacccagtcagcccctcccctgaggtcatgggatccagtgtagaagctgtgtattaattagcatgacaaacaatgtagttcctcatatgatctgcacagaatcgggcaacttggttccatcgttgtctccattcagacaggaatgcaacccccaaatctgctccagtttttgcaggagatagtgtattgcaggagtctcttctccagctaactctgtctatgcacggcttggctttcaatcccatcacaaatgtccctcatatcagctcacccagaatccctgagaggatcgcacaatgagtgcaatcggtagaaaagacgtgatttcccacggccagtgtaaatcgctctacaagcctgccgggaaggaaactgtgagttagggctctaacaggaatcaaagatctgtacagatgtcaggggaaggcttggaggtggctggggatggcattctacttcatgatgccaaggtgtgttgcctgtgagacttcaaacacacagtatcatctgccctgcaattccagtggaagttttgcaaatctctcccacaacactgtgcatcctaatgtaatgatggtctactttgttttcataaagtcactgttacagaaataaaaataaatgttcaaggtgttacctccccctcctcataattttcccccattttacagataaggaaaactgagtcctaaagaagtgaaatggtagaattaagatgcccttaactactggggttagaaaggtgttgctttcaatcagatgtaatttcccagaaaactgtcacgtagaaattgcaaaatcttccccaaattttcattgtttgaaacaactttattttttttctcccaatgattgcctaggaccccaggaagataaaaagtgacaagtcactcatgactgaagttagcttgtgaatttttgctctgagctaaggagcaagtattttggtgcataacgcattgtacatgtcttttgtgttttctgtcacatgaattaaaaaagaagaatgagaatcaaggcaccattttgaaaaacattttaaggaaacccgaagtatactctcttctgcaggatgttttcagccaagaaatagccttattgtgatttgttaaaatatttttgataggttgtcaaattatcatatttctgttttatattttagtgtttgaataagatatgctttccttggctaagcttctgataataacccatttctcatctttatacctccatgtgctctctttggacagaagctttttgtgtgccagcgctcacaactggggttctcactcaccggcccccaggaaagggatttgcagggtttccaagagcccatcccttgtcgttagtcacaggcagcagtgggagacttccctgtggctaaagcagtgtcattcttagacaaatggtgactggaaatctggcttgatcttctaccccattcctccttcccatttacacacagggttcagtgtgtgtgtggctatggaaagtaagcccagagatgggacagtgaacacttggggatttgggaggcattggagaagaggggttaggagcactggctcagggctcaacctggatgtttgtccctggatctaccacttgagtagatttatgagcataggcctgcttgtgcaagctttggtttccttcacctattaaacaggggtaatgatatattcttttttttttttttttttttttttgtgagacagtctctcactctgtcacccaggctggagtgcagtggtgtgatctcagctcactgcaacctctgcctcccggttcaagcgattctcctgcctcagcttcctcagtagctgagattacaggtgtgcaccaccatgcccagctaatttttgtatttttagtagagatggagtttcaccttattgtccaggctggttttgaactcctgacctggtgatccacgcacttcagcctcccaaagtgctgggattacaggcgtgagccaccgtgcccagctgatatattctataactatgagtcgatatctggacttcaaaaacatgtgtgtacaaaaatacatttttctgaggattttaaagtactaaataatattactatatttaatatttaacaaatattgtgaatgagtgagctggatgcaagtaaacatagagtgtctggccttccaggacatgtaatacttacaaataactgcaatgtatggtcagcctcaagtaaagggtagagagtgcatcaaaatagcagctcacaggagaggcaaaacctatagctcgctgctgggatgaccaggaaaggcaatgtgttgaggcttcgtagaccttaagtggtagtattttctgagcattaaggtaagcagtgagtgtctcagtcaaagagaagggatttgactttcagagatgaaaaagctcaaaatatattcaaagaaccagtaataggtgcagtaagtcagggatccccagtcagaaatgtctttgagtctggccagggcacccaggcagttaacaggatgaccaggacctggctccagccagccacttgcaggctctgtgttgacatatgtttcaattattcaagagatacaagaaatctggacttagatataccaagtcccacttagtaaaacatgatgatggtcaaatacaacatgtctctggttgaactcagattatgggtggtgagtgtgtgactgtggagtggacttatgtccaagcattgagatcatgataggtggaaaaagagctctggcctaggatccaggaggcccgggattaatctgagctctgtgtccttggacaggcttcttacatcctctgtgcctcagtttccagaaagcactttgataggaggtgtggtttactagaatgcaaccaagcctttttttttgtagactaaagaatgtactccttgagtttccagggtctgaagaattacactgctgacccctgctcttgttccttccccaccactgtatttgttttattgttacatttcttgttcttacattttgtaaaggggccattatctagggatgaaaatggacaaaactcgtgtacatcaattagcatatggagaatttgagatggaaacatgccagcctcttccaaagagaagttcagataacagactgcaagattgagcagctttcatgagaacagtaaagaaaacaatttccctcggtgcttaccacagaaaggaagataaaggaactggaggatggataaaagtatccaaaaaacataaaagatgaattgatgggaaacactggtgtgaccactcaaggggccaagggtggaaaaagtcattccattaaaaaaataaaataaacagtggaaaaagaatggagccatagtcctggaaaaaagtgagatcacattaaaaaaactttcaagattggcctggaaaaataaggctttatgagtttaacatgaggactctattcttaccacctgtggagagtaattggcattggctgactagaggtttgttttgccttcttggcaggagctgaattgttatgttaatagtccgctggctaagtgttaagtactgtgtttgaatagaaagagttttgcagaagggaaaattcccagccccaggttcttattctgaccactgagctctttacagacttcagacttcacacactcaaattcaaagaaacaattagtatcatgctgatatttctagcattttgtgaaatcgaagagtttctactaggaacgctcctgtaggtggtttacggccagtgtatccaagctcacgtttgggcccaagggcccatttggagctaaagaacagactttcatcacagcagcattgcccacctttttgtaattgtctatgccagctcttttccattcccactggctcctccttagaggtcattccactgacttagtcttaaaatattttaattgtccttgaacagggtgaacccaaaaaccgcagggcactcaggaggaaatggtgtagtagtcaatgcattattaaaatgaactttttcaaatttaagaattatcaagtcatctgttggattattgctttttcttttttaggaggcagcatctctctacaatcctaaaacctctttaaaaacaatcttccccatggccttttgcctctagattgctgattgcagcaaagtgctggtagaaactaaagattgagctaatttgctgtaatttgtgattgacttatgaccccttaaaagttgcacatccttggggtcgcagaaatagattgcttcttaattgcaaatgagcttgtagctgcaaatgatctcacacctcttcctgcaacccaccttggttcccaccttcctctggttgctgacttgcttcacaacatctttcctcacttccactcgtatgcacaaatttccaaaatgtgtgaaactgacgccttttttatgttgtcttttatggcggtgacaaaggaatttggttgaaattaaggccatgtggtaaccacagggtttagaaatctaataaaacccatgtaaataatattaaagcttgtgagctagagattctaattgagccatatactccccagaagcaaattaggcaactagagctattaaaatctgtcaggtcactaagacatcatttgggcaattacttcaaattccagaaaattttctgagctctatttctgcatacagtgtaatacccaagcggtatctaattcagggatttctaaactgtgcttccatcaaacattgatttccacaacatgggctaagatttaacactgctggaaatgaacaatggcagatttcttccattaaaaagatgttctcacttttacatttaattgcctctactttacaaaatagtacttcagtatagacaacaaaatactagttgacttcagtcctcccccagaagacaattagttaacatttgaagtatcctcttcagaaatctacatttcaggggaggttacttagcctgttacatttcctaacgagagaccataccacaggcatgcttaaaggcaaagctttagaatattgctctctacacttgccccagaagtttaataattagcataaattgtgcttcgagataatttttacttaaggaaatggatgatgttcaagaaatacggtggggtattaagatcagtattggctcttctgcccttttgtgagtgggcatgtaccagtcagagtttgaccagtaagagaaaccactccagatatttccagcaggaagggatgtagcccagggatttaacgttttttgtagacctactaagaggtctgagaaagtgaaggtcagagaagctgttttgaagaattcaggaaatcaggaagtgctgggatcaaaagaagctacagctgataatccacccttagtgggtgatgaggagggggacacctggaaatcactcccaaaatgtcactgtctactgtctgcagaaaggcttgcccctggctgcaggtgtgaatgtggaataccagtttatcctttttattttttatattccacgtgagagcttcttattgacagagtatgacccagaactcccactagtttatgaaatatagtttcctgacctctagccctacctaaaaggaagaactttaaagagcagtgatgattttgattcttaacaagcaccatcaggcttaaggcctaagaacctgacaaatccagcattcttttaaagtgtgtcttatatctagcacagccatcctccagtagaactacagttatggaaatggtctaatttacactgtccaatatggtagccactagtggcaggtggctgttgagcacttgaaatgtagctagtgcaactgagggattgaatttttgagttgtatttaatcttaattaacttaacatttaaacttaaagggctacctgtggctattggctactgcatggggcagtccaggttaagatctttctctttggacctgtgctccctctccacttccatttaatggaaaatattgtggcctgatctgacctaaagtttccctgaactgtctcatatttgtccactgagtgttgaaaatttcatgtgaggtccttgttacaatgactatatgatggagttgtgttgggcaggggggcaggtcactggatttcactgagcttacagaattggtcttctgactctttttcgtgccagcttactaataaacatttgttgcatatttggccaaatttggtctgaaactcccttttaccataacatacggtggtagcaagttagtggggaggccactgaaatgtttacctacatatcctaatcactgtgatagccaattagcctgatcatacggtttgtaacgtacatttttttcccagaaatgtttctcaaatttttggagtctgcagtttctttcctgctagcaaatactagcaggtgacaaaacaagagctacataaatattaatataaaaattcagataagctagttgccctccactgaacaactttttaaacatgtgagcatatgttcatggtatgtttttaaaattcatacatgtaccacaaatttctgtgtataaaattgttcctaatttatatggttgaatctacatttcaaagtaatgtggctgggcgcagtggctcacacctgtaatcccagcagtttgggaggctgaggcaggcagatcacaaggtcaggagttcaagaccaacctgaccaacatggtgaaaccccgtctccactaaaaatacaaaaatcagccgggcatgggggtacgcgcctgtaatcccagctacccaggaggctgaggcaggagaatcacttgaacccaggagtaagccaagatcacaccactgcactccagcctgggaaacagcaagactccatctcaaaaaaacaaaacaaaacaaccaaacaaacaaaaaacaaagtaatgtaacctactctaggtttggctgcttgccggtagaaagccagacagaacgcaagagacaaagtttggtgggaggaaaagcaggtttaatcggagaaccagcaacctgagaagatggcaatctagtgttctaaataccatcttacattttaaaatttaccataggacttttaaagggaaacttggtataggagacattccggagtagtgcagggtacacagtctgtatatcttgttcttgttaaattgaactaaatgtggcctgagaaaacctccatacttccatacgtaagtccttgaggatgaaccataacctaacttagtaggtagacaagtaagtagacttagtagaaaacctaatttaggagtatgcttctgtaacaatagctgcaatctcagccaatcccagcatccatacttcaacaacgcatatgctgctgactgttcaaactgtgttcagataagtcaaacaccaagctgtaaccaatccatctgtttctgtacctcacttctggtttctgtatgtcactttcctttttttttttttttttttgtctataaatttgctctgaccagaaggtatcccgggagtctctctgaatctgccatgattctgaaggctgcctgatttgtgaattttttttaacccttactcaattaaactctgttaaatttaatttgtctaaagttttattttaacattctgatggccatcttgggtaattgcctgtccagaagtctggctggcattatcttgacttcagtgatggtggactaatggtggaactcttcctaagtgggaggattctgccatggggttccagcctggtttgtttcaagagcaagagcacaattagataagcatgcgttgttggaggggagtatctagagagtgaaggaatgaaagggtgagaggggagagaaggaagaaaaagaaagtgggtgattgttaaaaccaaggtccctggttacagtatcacaaaaacaacccagaattccacaaaagactctgactgccaagtgttctgccccttggagagcccctggcctaagtgttccatatgtaagctcctttctatttagtgtcccaaagtgactagcataagactgggccagactaggtgttttcatgacttcatggcacatagtttttactcgtaatgaacattagcaaataaaactgtttttcatttacttgtcaggtaaagaggaaattactgatggcttaagtcagaaatccccaaccttttttacaccacggaccagtttcatggaagacaatttttccacggactgagtggaggagggtggtttcaggatgattcaagcacattacatttagtgtggactttatttctattattattacactgtgattatataatgaaataaatatacaactcaccataatgtagaatcagtgagagccctgggcctattttcctgcaactagacagtcccatctcagggtgatgggagacagtgacagatcatcaggcattagattctcataaggagcatgcaacctagatcccttgcatgcatagttcacaatagggttcgtgctcctacaagaatctaatgctaggccgggcacagtggttcacacctgtcatcccaggactttaggaggctgaagcaggcagatcacctgtggtcaggagttctagatcagcctggtcaacatggtgaaaccccatctctactaaaaatacaaaaattagctgggtgcagtggcagccacctgtaatcccagctactcaggaggcagagatggggaggcagaggttgcagtgagcttagattgcaccactgcactccagcctggatgacagtgcgagactctgtctcaaaaaaaaaaaaaaaaaactgatgccaccactgatctgacaggaggcagagctcatgtggtaatgtgagcaatggggagtggctgtaaatacagatgaaactttacttgcttgcctgctgctcacctcctgctctgtggcccatttcctaacagaccatggacccatactggttcatggctcgggggttgggtccccctggcttaaatgttactatttttcttacacttaaatacttcttgtccagatgcctttctgcatttgtcatcctttaaaaaaaattgttcacaagatcttctcagaaagtggtgctacctattaatttaagaactgagtatcgcagacatgatacctcattgtttattaaacattcatggaattcattttgcacaaagcttggcatcctcattaataatttctttacttaatggtgcccaaaactagtttggagttgtctttagaatgctgtacattctatcccaaggggaaaagcctaaggaaattggccactaggacatttgcctcgtcagcaaaagcttgtataacttctttctagattattcttcagcttcaacataattcatatttatgcagttgcatgtaggacatcctgagactagtgattcatagtttcaatcattctttctagcactcccacaagtagatggccctctgccttgcatatagaaggcccttcatgtcaaccaaggggcagactggggaaagcattaccagggtaggaaatgtatcaggatgggtgtgggggtgagggaggcctttccttagggaggcctttcctcagggtagttgaggacagggatggaaagtagctagctctcctttagttacctgtaaggaaacagattatttgtatggattactactggtcaatttatccaccaggggtgactgactggggtagggaggaaaaagacaaaagacggcccggaagggacttggtgcagaaatattgaagatctcctttcctagatacattccgggccctgccatcctcttccacgttaccatattaatggattttcctatttagggggctctgtcatttagcacctgataagccacttccccaacattagactatgtatctgttggtcctatgggttcagcacatttgtggtactcacagatgttgataacacctgtgattgacacaacaagatcttactttcagattagcccacaaattcaaatagtgagtgcttaaatctcgtttagcttcttgtaaaaccatgttaggctttgatgcaaactaaagactcaccaattgaaagctgtcagctcagagagtgctgccaggataacttaatctatattaagagaaaaccatcactttctttggtttagtcatcaaaacttttggttttagcagcaaggggtgcttagattatgataaatgtctgtcttcctgagactttctgagatgcgtggatgctcagtgattctccacatcgcctaataatgggcagtaccgttcagaggtttgatgaatgtgctgaggccattcatgaaactctttatgttctttctgcccctgggaaaatttgacaacactgaatcattctattttattcttaaataggaaacaaaaatctagtgaataagaaatcataacctattaggaacttttgcttgctcttgaaatacttgtttgcatggattaatggtggaattggttggctttttgcaagaatgatttaaaaagcttctgaattgtatttcctaaacaggatttgcaaggcttttaatgctttaaaaggcaaagttggacccaaactgagctgtcaagtttttttttcttttaagctgacttgaaattgttgttggagtcaaactgaccttagattgcttaaaagagttgtggctggtgctgtctaaaaagcagacgctatggtcttgttatattgctaaatattgatcccaccacctttatctagtgatgcagagaagcactggtaaagccctcttgtcttatctctttgcaggcttgttgattggtgctggctgtgccctctaccccttgggctgggacagtgaggaagtccggcagacttgtggctacacttctggccagtttgacctgggtaagctttcttcatggatggcactccttttagaaaaagaaccttatctgatgtttcatagaagcagaaagtggaaaggggacagataagaaaaacctccctgggtattacagccagtagtcacgtgtaacaatataaatgtatccatttatttagtgaagagttattgataatctactgtttgctcagtactatgatgagtattgtagatacaaagataagaaatggcccctgccccgaagagtttatactcattgatcacttcatttttcaaaatcatgtattttttacccattgcatgggctaaaaataattctgtagaatttgcagtctgagaagaggtgacaacaaaatagtcaaggaaatgataatacaagctaagcaattcaaagcaatttcacatcgttggtctaataaggccactttgtgaaagaggtgagaatggagttcagtcttgaacaaagtgctacatatggattatcaggattagatggaagcactttgcaggtgaggaatacagtatagcaaaggcacaaggaaagaatgggaaaagctcatcaggagaccacagggattccagcaacaggaagagtcaggtgctactctgataaatgtgatgattgggtgagagtctgcacattgataaaaggctcttaactcacaaatttgtttttctgcagactaataagaaaatttcagttagttttcatttgtaaccatagtgtagtctacttacttatgttgcgatctataaaatattttgcagaatactccatggtttgcgtcattttaatttgtaataattgggtaatatttcacttgcttgataaacctacatttacttaaccactttcttatttctttctagctgggcatttagtctattccagtatctgttgttttaagacatgttatgatgagtagtttaatgaatataagtgcttttcctactgaatattttcttagaatctttttctagaattggtattactagatcaaagaatatgaacccataaaacacttatcattgtatgggaaaagaaatgtattttctcttccccattgctagattcagacctaaggctcctataataaaaggcagattaacaagagaaaagcatacaaattcgtttaaaataaaattttcatgacataggacccttcgtaaagaaatgaagacttggagaggcaggtaaacctgtatactttttatgctaggtttaatgaagaagtgggattgttctggaaaagtatgattggacaaagagggtatgatctagtggtaataaactgcagaacttagcaagacctgtttgttcagactcctctctgtgtccttgtattgccggaggtaagaatattcctttcttctgggtatggtgagagcgtctttccagtggtggctttatgatctgcttcagaggaaggtcagataatcctttctaggttttatgatctgctttaggagagaagagcagcaggggaaggtgagagagactttcctgcttctgctgctttctcaaatgtcaaggtgctgcattttacggtagcatgtcctgaagcccatcattgccaagtgatagcaaatatattttcccctactatatggatggacagactgagattctcataattagtacatagtcagttactaacttagacatctactttttacattaaatactttaagaagaaaaattgtgagggaattgatctaatggcagtattactatattccaaatattaattttaaatttttatgttagaacatctatgaaaaaaaattctgttagattctgagaaaaagggacagaaaaaaagtattaaaggtctgtgaatttgaaaatgaaaaaatgaagcaatttttatttgacttcatgggtgacaaccactctacttccgtcgaatataatactggctcttctggtagagaagactgttctaaataccacctaatttgcatggataaaacaaataagagatttccttttacctattcttccctctttgatgacaaggctttcctaaatctggtttagtttgggtttgccataaatgtagagaagggggaaaaatactgaaatgctggcatgcaaagctgactgccagcttttttttggaaagcaaactgtgtctaggggagatattttaatacagtgcttggcatttttctttccctggtgtttgaggcattcttggctgttcaacacaggcctcaacttgatcatgatcctgtgtatgctgacctgttgttattgtgtattgctatattaattagcagattataatgaagttcaggtcctgttattgcaattttcattactgcacctcagtattttgtatgtccccagcattgtggaataaaactttgaatgtcaaactaaacgttgaaaaatacttgcctctttactagtggtaattgttttttaatgttattatacactctaaaaccattctggcaatttaaaaaactataaagttgttttcatttctgatcatgcgtttctaaatttccttagattggttaatgagaaaaaaaaaactggcatcatccacagataaaatgagttctaggtccactgcataagttttttggggtttatcaaggtctgtttctctaggttactgttatctttgtggactctgttatctattctttgaaaagaagacctaaagagaaagtgtggcatagagatatctctaggcccatcccacttcactttcctttttttttttttgagacaaagactcactctctcgcctaggctggagtgcagtggagagatttcagctcactgcaacctccacctcccaggttaagcgattctcgtgcctcagcctcctaagtagctgagattacaggcacccgccaccaggcccagctaatttttatatttttggtagagatggggtttcgccgtgttggccaggctagtctcgaacccctgacctcaagtgatccacccacctcagcctcccaaagtgctgggattatgggcatgagccaccctgcctggcccatccctgttcactctctatgctttctaccttttagaaatcattactgttcccctgaacactaatgaaagttgagcttcagttacctagtgaagtcacaaattatgaagttaaatagggagcgtacctggaactgtagctggtgggctgcagcatgaggtcatgagtgagcattcttggttaagatggctccagcaaacatgctgcttgcctctgccacaccttgcctctcagattctgagaatccaagtttgtttctgcctcttctcaagggagacagcacgtagacacatcttcctcccaagggttgtgaaatgttaatgttattaaagctcatgcccttcttattggagaatacgtgtctctttgttgacgtgctgtttttgatatgttgttactctctgatctggagcatcctgaaagaaataattgcttttactcctacatagaagattatttaagtagtgcatttatctcaattagtcagccaacaaatatttatggagtgcttataatgagccagcccatgggctaggtgctggggatgtggcatcagcaatgaataaaaaatgacactattcactgccctcagggaacttaaattagcaagggaggcagatgttcaaaaagataatataaatgtgaagtatgttagaaaggaaaagtgttgggtgctagaatggaaattgtggttgacttgctgacattattccacactagttgttgcatctaagccagaggttggcaaacacttctataaagggtcagataatatcttccgctttgtgagttatatggtctctattgcagctacttaactctgcagaaaagatagatggccccaatagaacttttttttttttataatttcaacttttattttagattcagtgggtacatgtgcaagtttattacatgagtgtattgcttgatgcggagatttggggtatgattgatctaatcacccagctaatgagcataatgcccaagagttagttttcaacccttgccccctccgtccctcccctcatagtagtccccagtgtctattgttggccacatatatgtccatgagtacttagtgtttagctcccacttattaatataaatgagaacatgcaatatttggttttctgtttttgtatttactccttaggataatggcttccagttgtatccatgttgctgcaaaggacattatttcattcctttttatggctgtgtagtattccatggtgtggaatactacattttctttatccaatccaccattgatggacacctaggttaattccatgtccttgctattgtgaagagtactttgatgaacatgtggggtacatgaatctttttggtagaatgatttattttcttttgtatatatatccagtaatgggattgctgggttgaatggtagttctttattaagttctttgagaaatctccaaactgctttccacagtggctgaactaatttacattcccaccaacagtgtataagcattcatttttctccatagcctcgccagcatctgttgttttctgactttttaataatagccattctgactggtgtgaaagggtatctctcattgtggttttccatttctttgataattagtgatgttgaacattttctcatgtttgttagctgcttgccaattaaactttatttacaaaagcaagcagtggagccatagtttgacaatccctgatctcaagcaaagaatacctctggtgtgccagaaatggttacatttcagctgtgctcgtttattgatccctgcggctctcaaggcagctggtcaggacccaggatagttgaagactgcactgagcagccccatccaattaccctagtacgctgtataaatactacaattttcttgttgagtggcagtgggaaggaaggtggcaagcactgtacctcagcctttgtcagcccactgctaacactgacatagaatgggaatgcgtagcctcatttggaccagtgagtctagaggcatcttggggaagaagggatcctatgcctaagggagaggccacacattcctggctcaccccctctgacagccccctctgaccatggggacctgcaggagtaagcagcctgcagaggagtgggcagagaaaccagtctgtggagcagtcatccctgaagctggccttccctaggaacgtccagcctgtgttttatggaaacaaaaaacacagtaatttgtttccatattgggtgatgtttgaggcctgtttactctcgcaaatgaaagtagcctgacttgtatttagttgctatctcatatttcaaggggacctaacctcacctgtgagcttcctcaggaagtattatacaggcggagctctcagcccttgtaggctttaggtaggtaaagggtttgagtctgcatgtggtctggggtgacatggagagataggttgcagagagggcaggaggaaaagtcaggaaggaggctactttatgtactgcttccctgtttggacaggttttaattccaagtatcagccatggtacaaaataatacttgaagagcctcccaaggtcagaacatttaaactgagttcaaaaatataagtaatagttaggcaagaaggatttcataaaaacctcacatttgtagttgtagtataatgtgtaggaatctgaaagaacctactttaaaaaatacctcttttccttagaaaggagaattggagagaacttttttatatgccttaaaaacaatcttataatccgattgattctcaagcatttttatattttattaagtgcagcgctctgaagcaatcttgcaaaagtattcactttcacaaatcaaagtctgttactctgcttacttttggatcacgctaatttatgaagaagcaaggagtaggtgtgaatccacacatttttttaaacagagaaacaagaattcagacaggctgcataattctttcttttgcggtttaaacaagtatccagtgtgatttaggtgtaagtggtcagtgagcatacttgaaaaaaatcgtccttagttgtatagaaaagtatttttgttttgtacttgccttgcttaacaaacattcattatgttttgtatagactaggatgctttaggtttaggttatacaagtctggctcaaacaggccaaaacaaagaagacgtgtgagatctcttattatagcaaggcaggagctaaggtcagctacagacttgactgactcaggagctcaaagatgttttccagggcccatgttcaggaagaacgtgtgagatctcttattatagcaaggcaggagctaaggtcagctacagacttgactgactcaggagctcaaagatgttttccagggcccatgttcaggaagaactgtctgtagactggctgtaaccatccgccatctgtaggctggcttcattttgacgttagttctccccatggttgtaagagcgtttggcacttgtggctttaaacatccttgttcatgccaaaaggagaggacaagcttctccccagaaatggaatcagagtctctctcctcactctaattgggccagctttgtcatgtgtccgctcaaagggataatggctgccagggaatgccacgtgcttcttatggttcagcttagatgcacttagagttttataagatttgattttactgagaagtagtgggatttgtaagaggaagatgagataaaaaggagaaaaggcattttagtcttttctttcttttgtcagacttcactgtctgtggtcctatcatcagtgtagcctgtggttgtggacagagggacagtcgtggcaggtgttaataatgctgatttttatttattgctttttgagagaataaaacagtataaatgataagaatacatagtgtcacagcatctggcacataataaaagcccagtaatgtttgcagttggacaggaccatttaaatgcatattggctgatcaatctttattcttccttttacattccgcaacagtaagtttgggtttacccattaagcataagggctttataatcaggttatccaattgatttaattcatgcctcagagatattctcatccaccaaagacttttctaattatatccttgtgatcaaaagtagtgtttcaattaatttgtctcgctattttgccaagtaaatttgagtaattattgctttcattttgctatttaatttgattaagaagccatcatggttcctgttcttgaaattatgctggtggcttcttaagagcagtgccgtaaactggaaactcagagcctcccagtgttgataaagatgagagtctgtttcttccaattttcaatcaaaggaagaaatctcttctactttaatctgaacactgactgtcccacatctctttagacacatatcctttagctctttgactcctgactcatgccgtcttgcctctcaaatctaatcatacttgagaaaaatctgtttgcaatttctggctaggtcagctgggtaaaaatgcaaacaaaagtataattttttaaaaaaattttgagctcttggtgttagtggatgcttctcaagcaagagaacctgctattggtctctgtgacattcaatatgactcgcttcattttgtccagaagttagaaagctcctatgactcctgtggacttttcgggttgcttcatgctcaggcaggccaggcagctctgtgcagtttctgcaggcatctgcgttgtgtgccagagcagggttctcctgactcaagcagcaagtgtttgcagagagcggcagttaaagtgtctgtcactcagctcaggaagagactcctaacacttgatgcactggtcattgcttagagtaaatggattattccattttgagattgctatttgggaggttggttaatagtaaggtattgaacatgcattgaaatgtaggcaaatttaaggccgttaatgcagcaatgatgtcctacctcccaaatgactattaactgaatattttctaaacttttgacacttaaatccaagtcactggaagtcatttagaaggtccagcatgagcctggatttcctcacccagagctctagcacagaatcacaggaaagccaagcagctgctgtgaattcaacaaagacccaaattgtataggaacccatgggggcactcaggaacttggctccaaatgatgcagggaaacttccgcgtccaagggagcccaccctggccagtgatgacatgactgagcaaagtgttcaggcacccgcaaggcaacaataataagcttttctggtcactcagcctttcttaggggcctctttccatcagatgaagagttttctgcctttactctagaagtagggagaatgccacattttttcagggatgttcattcaacctgcccattccagtaggttccacgttttcaaaatcagagccagaacatttctattttataacttagtaaacacctcttgtcctgctttgggaaaaaggaccccactctgtacaatcatagattcaatttgatctgtttccctaaacacagttttgcagatcccagatgaacctgtgggataggatttttcaacttcggtgcctagcttggtgtttggtgttcaatagattcacttacttcctcaagcaaatatttattaagcacattctaggcaacaaaagttgtgccacaaacaaaattgtgaagaagatagacataattcttactggcatgccatatatctgccatctattgaatggttaaaaaattaggagggagaatgagaggaaaggaaagggggaaggaagggagggagagagggaggaaggaaggaaggaaggaaggaaggaaggaaacctactatgaatttttgatcacagaaacagcagctgccatcatgtttctgtatatatttggccactgatatcctaccaagaatcatggcatcactttttaagggactaatggcctaaccacctcccaaaaaaaaatttaaaaaccaagtcagggtaatcatttaaagaaccagataccctgataggtggaaaaaaaattgctctacattctttttttctcaagtctattttggcttggttatttcagtgtggatcattcctactcttttatttatgcctttgtaaagcttcattcagtggcttgcagagatttatagcagggaaattcaagcaattgtgggaaaaaggaaatctcttagaaaacctgtgggaaataagatttcttgagatatggttacaaaactattggggagaatatgctagtctctcttttaaagattcttctttttttttttttttcagtgttgtccttttattagtttaaaaaaaaaaagacgtacctgagtttgccttttcagatgtaaagtacttaaggacatttaggaaattgagctgtttcattctaattattttttgtattatgtgttctcaaccattatattctttcccatcatttcagccagaatatataaaatataaaacagaaagaagcccctttttatcattagtggctctgttgtcaaatagtcattcctgagacctgtggacatttatagaatgctgttgccattttaataagaaatcaagactgaaataatttttttgttctttctggttttgttgttgcattgcaattgttttatgtcacagttattgattattcattgcagtcattaatgatgcctgtctctttttattctctcacttctaatttgtgccctttctaaagatcataaatcattttaaaatcatgctatgaaggaacaatcttcagtccttttttctgaggattttgtgtcttttttgatgttgttattgttgttgttgagacggagtctcactctgttgccaggctggagtgcagtggcgtgatcttggctcactgcaacctccacctttcaggttcaagagattctcctgcctcagcctccagagttgctgggactacaggcgtgcaccaccagacccagctaatttttgtatttttaatagagacagggtttcaccatggtggccaggatggtcttgatctcttgacctcgttatctgcccgcctcagcctcccaaagtgctgaggttacaggcgtgagccaccatgcccagcctgtatttttttttttcctccaccgcccactgcaacctttgcctcctgggctcaagtgattctcctgcctcgccctcccaaatagttgggattacaggtatgcacaacaatgcccggctaatttttgtaattcttagtagagacagggtttcaccatgatggccaggctggtctcgaactcctggcctcaagtgagtgacccacccgccttggcctcccaaagtgctggggttacaagcatgagccaccatgcctggctggattttacatctttgaagcattgatgtttatatgttctggctagtagtttttaacctcctgatttggggtcatgttttggataggtggagatgttattaatacttaattgatatctggctaagtaagctactttgggttagcaactggatgttttgatgacactggtagaagagttaaatgttatggtaacctttgatcttcagactgattttaacttaaggtctccagaccgtttaagtggctcatagtccatcagtaggcttcagagaaattcagaatctactgaaatgctttgcaattttcataggcttttggacatgtgcttttttctggagagaatattcatagcttttgttattattcaaatggattcctgacacctgaagacttagaacctatatagtaaacaacatttggaagtcttacatgggaaagcttagagatctgaactctagacctcacctcccaacaatcctcaaattcctccagaaagctagaacacagttgaacccctttgacttgatttcattatctacgaaagtatttgttaagggatattatacagaaacgcacctctgcttacaagaagtgttatgcaaataaatgctaccatacaatagttcctttgtatttttattttttaagccatttttgtcttttttattatttcaaattttattttagattcaggggatacatgttcaggattgttacatggatatattgtgtaacactggggtttggggtacaaatgataccatcatccaggtagggaacatagtaccccataggtagtttttcagcccttacccctctctgttttgcctcactctagtgatcccctgtgtctgtggttcccatgtttatatccatgccatgcaccagttctaattcaaaatcacatctgtgaaaatgagtgttcagccttcctagtgaattgaatatgcttccacttaggatcttagccagtttcattagtgccgctgttggagattgttcttcacagatctcttgtgtgttagcacaacttgtcagcacagacactctattctgaactatcatttcgaagatgtttgtgtagtaaacagtcttggaagtagagcagaggataggtgtgtttagtgtccattataataaaaataatgcctttctctggggtaaataaagattgggcagattttattgcagtccattataaaagatttgagttcccttagtttgggttcctcaactgtgacacaaacccactatgtttgttgcattcatctgggctgtttcacatcagcccctgtgaggagagggcaacaaagggagtggacataaacatggagctcatgctgcctgctgtgctgtgagtaatacagtcctttgtctctgatccaggagtctcctatcttttgccagcgtccacaaaattgtgatagtataacttgttacattgcaaatagagtaaaatatcaaaccttcacagttcttaagactactgttacaatgcctatagttccttgaaaaatacttcatcatagacagtgatatatgggtattatttaagggaaaccacaactcgagtgcatattccggactggatactcatgggtgctagtacaagtggttctgttattcatatcttgactaacactggaagctttactaattagcacagcaatgatcaaaatggacttttattggtagaattagatcttattaaatagcatgatgaatattaaaaatggactttcattggtgaaattaaaaatactcaagattgtggattggtagaatccacataagtagttagagacactccctatttttgcttgcaaggatttaagcatccatccagtcatagtgttatcactctaagtctgagtgatattcaaaatatttaataatcaatatgtcataggctatgaaaaatgtgagctaaaacaagtactggccatgtgcagaggctcccatggggccctcctttgccaggcactagccctttggtttctgggatgtgaggcaaggattccctagggttttcaagggaagaaagggttttgggggaacttggggcagtggctgtttacctacagacagaggtacatattttagtattttgatacccagtacagccttactgatgcattccatctgtgccctcactattcttaggaatggtatccacggcttgatcatccctaaagtgttcagtttctagtctctggtttggaagatttctggttttttgttgccaaagagaacagaatcctgccatggaaccttgctgcattttccctagcagtttattcaagaagttggtcgtccaaatacctaaaaagagagctaggacttaactagctcccaggtcagtttgatgttttgtgcctgctttttgatggctatttgttgaataagtgtctgtatgtgtaggaggatttgttccgagacttgctttcattataagttggaaatgagattgtggaagagtatcttaccacgtcttgcactttttcaacagattgtaatttaccaaaaagagtctcaaggctatgcttgcccaaattgaatgaggttcgttcccaagagctactgtacaagcaaaaagggatcatcaaggaaaaccttttagattgagggcagctaacaaacatcaaagcagtgcttgctgcagttccgttccggttctctaggtatgtaaccggatacctagagagtatattcagagactgcttggtggccagtggtagtatgaccggtacagacagggagggcagattaataacatcacgaggaaatgcagcacctcttcacatgggttttataggaaaatggctgcagccatagttcacatggaggagcagtaattagagacagactggttcttttcacactgtcttctgggcagtccatgagtcagaggagctggatttcaggtatttccagcctttataaatagcagctacagacagaaactgaaggataatctttatcaccatacactaaataaagcctgattggttatcttagccacccccacctggagatcagattctgtgtcagttcacagtgtgaacacaaaggccaccactatacattgagccaacatgtttgctttatcatcttaacagtacatcatctctaaggaaacttttaggatggattcagtgctaagaagcaaggattgatagcagctgtgctagcagatactcagctggccagacaagacaaagggtaaaccattttttgtgtgtaagtggcacaaatgtgtatgttaagaaaactattgggtggggggttgaagggtgcagcaaaccaccatggcacatgtatacctatgcaacaaatccgcatgttctgcacgtgtatcccagaacttttacagttaattaaaaaaaaagaaaagaaaagaaagaaaactatccaccgggccacagaacagaggtccatttgattggtgtgatcataagaattcagaagccgctccactcgtcctgctgaaatgtggttatgtttctggagaagccagagtatttctgtttcttttgccatttctctgcattgggggaatgctaaataggcagagcatctgccaccctttccatggcatgtgcttcctactgggatttcaggatggggtgacacagggccttgactcagtggaatttaggaggaaggaccctggatggatctgatggaaggaaaaataattaggtttggtgtggtatgaaagggaaaccccacaggactctagataagaggggaagtgcagagagtttgttcctgtgcagccatacccagcaacatcacctggacatctagttctcagatcttccagggccggtttctctgattggcccatctctactctcttccctgccacataaccctgccccttttgttttctaacgatctcatttccacaagtagtttacttatattgacatgaagtacagtcacgcactacataatgatgtttcagtcaatgatggatcgcatgtgtgatggtggacccaccagatgaggatggagctatgtaatggagtaggctatacatctacgtttgtgtaagtatactctatgatgtttgcacaatgacaaaatcacctaataatgcattagcagagtgtatctccattgttaagcaatatatgtcccaatgtgtatatatatcccaacggcctggtttattgatgaaaaatttgtttttttcccataactttatagctttttgttctgggtgtgtgaaattaaaagagcaggcaggtaattatgtggtgcaagtacccaaagagtcaggactgcatttttagattagagtaacccagcatcaccggcctgctttagactgggagccaggaaattacaaattataaacaaagaataggactcagctactgaagagaacacattcaagagacatgggaaagccctgtcggtgtcctggggagcagtgttctcattgggaaagtacgggagatggcttacatcaggggttggcaaactatgggccaaatctagtttgcatgtttttgtaaataaaattttatgggaacactgccatgctcatgtgtttatttggtgaccgtggttgcttttgaactacaatatttactatctggcttctttcagaataaggttgccaacccatgacctaaatgatccttctcctaggtccctctgtctctaaagtctgtgatgctatgatgctctgggtggcagaagtgacaaggataaaatcaaaaggatgcagaaacagaggggtgatgcactggcttttgacaaggcttgaatttaaaagaggctctgtcctgttcaggtctaatccctttcctctaatccctgcctcccatcccttctgccttcctgtcttgccaggagcactcacagctggagctgcctggggatgactttgattgcacaaatagtctttctctttggaagacaggctttgcttgtataaaatccttcaaatgtatcagctggaaaaaccccttttttcagtgggaaatattgtttcccacatcgaatatataaccactttaccttgccaggctggggaaattttgtggaggaaaatgggctctgtgccccgatgtgtttccctcatcctctgggcagctcctgctggagaagatggatgacactctgttccttccccactggacacaggtcctgcacacttattcatctcctgaattgtctcacgggaacattgtatgattcgtgctggtgtgtcatctttatttaattgattcaatttgtaggttgtttgctcagttgggtatggttggcaggaatgggatgaagttttgtgttagatgggatgtggccagagggcaggaaccaactgagctgcctcaccgtgtgctgtgcttaacagagccacacagagtgtaagagggtcattgagtattttcatgaggaaaattacagaataaaaatggccattatgcaggtgtctcattttgcatatcatatggtcaatatgtttattgatttcttgctccttaaacttacaagagtaaaagtccccactgattttgtgtatacttatacatatacatacacccattgtattagtccgttctcacactgctataaggaactacctgagactgggtaatttttaaagaaaaaaggtttaattggtgcacagttccacaggctgtggaggaagcatggcaggggaggcctcaggaaacttacagtcatggcagaaagcaaaggggaaccaggcacgtcttacctagccggaacaggaggaagagagagaaagggggaggtgttacacacttttaaacaaccagatctcgtgacaactcactcactatcataagaacagcaagggcgaagcccacccccatgatccagtcacctcccaccaggcccctcctccaacactggggattatagtttgacatgagatttgagcagggacaaaaatccaaaccatgtcacatagatatcttcaaattcttgtttatatttgtgtaattttgattttggagtaattttagatatatagaaaagctacagaataatacaaagaagtcctatattcctttcacctggattcccttaatgtttgatttcatcacactgggtttatcaatccctacctccctcctgcccttttccctccttctgagacatgctgccctcccaaccgtagatacttaagtgagtaattcctaacaataacattctcttatctggcaatgcaattaccaaattaggaaattaacattgataaaatgctattatctaatctacagaccttataccgatatattttacatacagaattattaataaaagaaatggaactcatttccttgtgctgggtattgtttgtcatggactttctttatgcttacggtttgcgacttgcaaaatataacaaatgaaaagcacatttaaaatcttaagaggctcaagggccaggcacggtggctcacgcctgtaatcccaacactttgggaggctgaggtgggtggatcacaaggtcaagagatcgagaccatcctggccaacatggtgaaaccccatctctactaaaaatagaaaaattagccgggtgtcatggcatgcacctgtagtcccagctacttgggacactgaggcaggagaatcacatgaacctgggaggcggaggttgcagtgagccaagatcacgccactgcactccagcctggcgacagagtgagactccatctcaaaataaaaaaaaataaaaaaaattaaaaaaaattcttcagaggctcaaaatttgaaagaaaaaaagttgctttcttcactaacttcattctgatgttagaaattgttaagatgtcagaaaagtattaatagtgacggcgttagtaataataatgatggctagcaatgtcttccatcctctgctgtataatttgggctcagcactgctgacccttgtgtcaagtccagctactggtcagtgtgtcctgccctttcacagatttgagcagctgtgcaagtatgagatctcatataggtattttctggtaaattcttgtgttgatgatggccggcaccatttctttggaggacaataactggtacaaataaatgggcacaaacctgttattttcttttgcccacagtctcttaccttgaaagtggagctaaaacatttgagggggcgggcaagagagattcaacagagcaaatgaaaactatggctcttcagcaaaatttttgtgggaatccagaagggaaacttataccattgaatataaaagaatgcatttgtaattcagaaaggtttttttttttttttgtccccttacaatctgaggcccatctaacatgtgctcctatttgagcttagcgtttgaacagctggtcattgccctctaatgcatgtctctgtagagctctttccttactcctcctactccagctacagaatggattaacctacactggataaaattgacaaggctgatatatattttcccatcaaaattcacccctaacatatctccttagacatagcactgttctgttatgagctctttgccaatacacatcttatcttttctagagcataaatctctgctccctttgacatgcgtggttatggagagcgcttaatgccatagcttgagtgtgtcagttcttactgatgaacacatctgcattttatcttctggttagctctgtggagaaagtagggcaaacaaaaaagatgaagggagtctttaaaaaatgtcttggctgggcacagtggctcatgcctgtaatcccagcactttgggaggctgaggcaggcggatcacgaggtcaggagatcgagaccatcctggctaacacagtgaaactctgtctctactaaaaatacaaaaattagccgggcgtggtggcggactcctgtaatcccagctactctggaggctggggcaggagattggcatgaacctgggaggcagagcttgcagtgagcagagatcgtgccactgcactccaacctgggcgacagagcgagactgtctcaaaaacaaaacaaaacaaaacaaaacaaaatcctgtctcctctttctgttgaagtggctccaatactctaagctagaacatcatacatcgaggcatactgcgtgctttggggaaaggtgttatcccacttttaagagagtccaaatcctaccatgcagtcctctaaatctgataataaataacagaacaggtcaaaagagccttgtatgttagagtcacattagagagcagagctgcagttttttttttctttttcaatgtttattttagattctgggggtacatgtgcaggtttgttacagaggtatattgtgtgatgcagaggtttggagtatgattgaatccgtcaccgaagaagtgagcatagcacccaataggtagattttcaacctttgtcctacctccttctccttgtattccccaatatctattgttcccatctttatgtacatgtttatccagtattttgcccccatttataaatgagaacatgtggtatttgcttttctgtttctgcattaatttgcttaggaaaacggcctttatgttgattttttttatggccatgtagtattccatggggtatttgtatattttctttacccaatccaccatggatgggcacatgcctttgctattgtgaatagtgctgcagtgatcaatacaggtgcatgtgtcttcttggtagaacaatttattttgggcatatacctagcagtgagattgttgagttgaatggtagttcaactcttagttctttgagaaatccctagactgctctccacaatgcctgaactaatttacattcccgccagcagcgtataatttcccttttcttcacagtcctgccaacacctatgtttttaggtgttttgttttggagacagagtctcactctgttaccgaggctggagtacgtggtgtgatctcggctcactgaaacatccgcctcccgggttcaagtgattctcctgcctcagcctcccgagtagctgggattacaggcgcccgccctgctgattttgtatttttagtagagatggggtttcaccatgttggccaggctgttctagaactcctgaccttgtgatccaccctcctcggcctcccaaagtgctaggattacaggcgggagccaccacacccagtctattttttcactttttaacaaaagtcattctgactggtgtgagatggtatcttgtagttttgacttgaattttctgatgattagtgatgatgagcattttttctttcacatgtttgttggccgcttgtatatcttcttgtgagaagtttctgttcatgtcctttgcccacttattaatgtggttatttggtttttccttgttgaattgtttaagtttcttacagattctggatattaggcctttgtcagatgcattgtttgtgaatattttctcccattctgtaggctgtctgtttactccgttgatcatttctcttgttatgcaaaacctctttagtttaataaggtcccacatgttgttttttttaattacaattgtttttgaggacttagccacaaattctttacccacacctatgttgaaagggtgttcactaggttttcatctagaatttttatagtttgaggtcttacatctaaatctttaatctctcgagttaatttttgcatatgctataaggaaggtgtccacttttattcctctgcatatggatagccagttatacgagcaccatttatcgaatagggaatcgtttccccattgcttacttttgtttactttgccaaagatcagatggttgtaggtgtgcagttttatttctaggttctctattctgttccattggtctctgtgtctgtttttgtaccagtaccatgctgttttggtttttgtaaatttgttgtatagttgaagtcaggtaatgtgatgcctccagctttattcttttttcttaggattgctttggttattcgggctcttttttggttccatacgaattttagaattttttttctaattgtatgaacaatgatgttagtagttgataggttgctctgagcagtatctaccaacctacaaagttggtagattgctttgagcagcatggttattttaatgatattgatattaatggttggtagctttttaagtttctgatttcttccaatttatgagcatggaatgtttttccgtttgtttgtgtcatcgatgatttctttcaacagtattttgtagttctttttgtagaaatctttcacttcttggttacatgtattcctaggtattttattttttgtggctattttaaatgagatcacattcttgatttggctctcaacttgaatatgattggtgtataaaaatgctactgatttttctgcattgattttgtatcctgaacctttactgaagtaattgaagagtactaggaagcttttgacagagtcttaagggttttctaggtatagaatcatatcaccagcaaagagagatagtttgacttatacttttcttatttggatgccatttgttactttcccttggctggttgctctggctagggagcccagtactatgttgaataggagtggtgaaagttggcgtctttgtcttgttccagttctcaaggggaatgcttctaggttttgcccattgagtatgatgttggctgtgggtttgtcatagatggctctttttattttgaggtgtgttcctttgatgcctagtttgttgagggttttatcatgcattagaattggtacaaaactcttctttgagtgtctggtagaatttgactgtacatccatttggtacaaggcttttttgattggtagctttttactttttttgttttgttttgttttatttattttttgtttgagacaggctgtggctctgttgcccaggctggagtgcagtggcaccatctcggctcactgctacctccacctcccaggttcaagccatcctgtcacctcagcctccctagtagttggaactataggttcatgcaaccacacccagataacgttttatattttttaataaagatggggtttcaccatgttgctcaaggtggtctcgaacttctgagctcaagtgatctgccagccttggccttccaaagtgctggaattactggtgcaagccaccatgcccagcctgattggtagctttttaagtttctgattcaatttcagaactcattattggtctgttcagggttcaatttcttccttgtttaatcttgagaagttgtatgtttccaggaatttacctatttcctctagattaatgactttgtgtgcatggagatgttcataatagtttgtgagagtctttcgtatttctgtgggattggttataatgtcatctttgtcaattctgattgtgctgttttggatcctctcgctttttctttgttaatctagctagcagtctatctatcatgtgcatccttccaaagaaccaagttttggtttgattgatcttttgtatgaatttttacatctcaattttgtttagttctgctgtgatttatttgttttcttatgtttgctttggtgttagttttttctagtttttcttttcccacagatatgatgttagattattaacttgagatctttctaacttcttgatgtaggcattttgcgttataaagtgtcctctcaacacttcttttgctgcatctcagatattttgttatgttgtgtctctgttttcattgatttaaaaggattttttaaatttctgccttaatttcattgtttatgcaaaagttattcaggagtaagttaattttcatgtaattatgtggttttgagagatcttcatggtatcaatttctatttttatttcagtatggtcagagaatgtgcttggtatgattttactttttaaaaatttattgagacgtgctttatcgctgaacatgtggtcaatcttagcatatgttccttgcacagatgaaaataatgtgcattaagtggaatattctgcaggtgtctgttaggtcaaattggtcatgttgagtttaaatccagaatttctttttttggttttctgccttaatgatctgcctaacactgtcagtgggatcttgaaacccctcactatttttgtgtgactgtctaaatcttttcatgggtttagaagtgcttcttctattaatcgaggtgctctaatgttgggtgtttatacactgaggatagttaagtcttcttgttgaattgaaccctttatcgttatgtaatgcccttctttgtccttgttcactgtggttggtttgaagtctgttttattggacataagaatagcaacccctgctcttttttgttttccatttgcacaatacatctttcttcctccctttactttgagcccatggttgttattacatgtgagatgggtctcttgaagacagcagatggctgggtcttatttgttttacccaacttgccactctgtaccttctaagtggggcatttgtaccatttacattcaaggtttatattgatatgtgaggttttgatcatgttatcatgttgttagctggttgttttatacttgattgtgtgattattttataggatatgtgtactaggtacttaaatgtgtttttgtggtatcaggtactactcgttcatttccatgtttagaggaaggacatctggtaaggctggtctggtggtaatgaatttctttagcatttgcttcactaagaaggattttatttctcctttgcttgtgaagtttagtttggctagaatgaaattcttggttggaatttgtttcctttaaggatactgaaaataggcccctaatctctcctggcttgtaaattttctgctaagaaatctgctgttagcctgatgaggctccctttgtaagtgacctgacccttttatgtaatggcctttaagatttttttctttcatgtcaaccttggagagtctgatcactatgcatctagtatggtaccttgctggggtttttagaattttttgaatttgaatgttgacttccctagtgagattgtggaaattttcatagactatatcctcaactgtgttttccagattgcttactctctctccttctttctcagaaatgccagtgagtcgtaggtgtggcctctttccatagtcccatatttctcaaaggttttgttcattctttttcatcctttttctttattttttcctgaatgagttgattcatcagactggtctttgagctctgagattctttcctcagcttggtctattctgttattaatgcttccaactgtattacgaaattcgtgcagtgaatttttcaatttcacaagttcagtttggttctttcttaaaatggccgtgtctttttaatctcttggattattttactggtttccttggattattttactggtttcctcgggttggattttaactttctgctgaatcttgttgaacttctttcccatccatattctgaattctgtgtctgttatttgagccattttaatctggttagcaaccatttccggagagctagtacggtcatttggaagtaaggagaccctctgactttctgaattgccagagttcttgcctgattatttttcatctgagagggctggtgttcttttatctttttgaaattgttgttgcttgggtggggctttttatttttttatattctttatttgtctgagggtttgactgtggtgtatgtcatgtacagtcaattggcttcttctgggtgctttcagaggcccaagactctgtgcaggatctttatttgtggctagattcctgcacttcaccagtgatgtgtggtgaaagaatttttgtttgatggtgtaattcaggctgcaatccagtggacggtgcatacatgtaagggctggcagataggctcttactcagtggcacacttctttcatatttcagtgcattcacagcagcagtggagagctgcagttcttgagaggaaatactggtcccacccactgcagtgctgctctggtgactttggaagcatcaagatggcctcctgggatattttgaaaatagactcaatgcatgggatttgtgagattctaccattacacacaccttctcactacctattcttttggggaatactgtgcagggagcggtattcccattatatgcatgtgtgcagcacctcacccccagggcacatccattaggaagcccatagaatgcaaaataaatagacgccttggagttgtgtataggacagccctgacaatcaatatgagtttatactttttgtaataagcagacataaagaaacaggagtttttttgtttgtttgttttttgttctgttgcccaggctggagttcagtggcacaatctcggctcactgcaacctccgcctcccgggttcaagagattctcctgcctcagcctccctagtagctgggactacaggcgcatgacaccacacctggctaattttttggttttttttagtagagactgggtttcaccatgttagccaggatggtctcgatctcctgacctcgtgatctgcccgcctcagcctcccaaagtgctgggattacaggcatgagccaccgcgcccggccgcaaagtagcttttaaaaagcaccacaccccacaaacattcttctctcagccgttttacttctacattttctgcccaccaaccaagtttgggtggtcttctctttataggcatatgacaaatcatttttactacttgtctcattaaaagttttatttaggatcaggcgtggtggcttacgcctgtaatctcagcactttggaaggccgaggcggctggattatctgaggtcaggagtttgagaccagccaggccaacatggtgaaaccccatcatctctactaaaaatacaaaaattagctgggcatggtggcacacacctgtaatcccagctacttgggaggctgaggcaggagaataccttgaacctgggaggaagcagaggttgcagtgagcgccattgcactccagcctgggagacagactgagactctgtctcaaaaaaaaaaaaaaaattatatatatatatatatgtgtgtgtgtgtatgtatgtatatatatatacacacatatatatacatttatatatatatacatttatatatatatacacatatatatacatttatatatatatatacacatatatatacatttatatatatatacacatatatatatataaatgttttccctctttctactgatccttcaaccttcctgccttcattattaatacagcaacaaggatacaatctaatatgtatccttttttacccaaactttacatttaaatattaacatgttaaaattttcaaaatatcacagacaaaagatattctgcctggataaatgaagtcagtcagcttatcatatcctgactcagacactatggctacaaggcattatgggtgctcagcagtgactttgtggggaaagagaaatggggatcccatggagctcaagttcaagaaaagaaactgtaaacatggaggttttgtgataaatggcatgcagtcagagggcaggaactgcccgagttacagtgtcctgtgctgcgctttccagagcaatacagtacacagtggagggcgctaccatggagtctctgggtgaaagttaggatggtatggtggcaccagccaaacttctgagggttcataggcagacagcagctctggagtggaactaaagtgtatccaggagctgaagctcttaatcagctagggctcacacagagtcaaggtagggtcaaaaacattcagtctgggaccatatctagaggcagtttctcctgcaggtagcattagttatctgttcctcaagcaagcttattttagacatcacatttccacatccttaaagaagatgcattgccaaaggtgccaagtgtggtttcattgcctcaggaattggggctgtcaagtctttgcaaggtgcagacctttagcaattgaaaccatgctgttgaacatgggcattgtcaaagtaaaactttggctgaattaaatttaaaggagtttaattgagcaatgaacaattcgcaaatcaggcagcccccctgtatcacaacagattcagagagactactggggtgcctcatggtcagtacaaatttatagacaaaaaaggaacgtaacatacaaaaatcagaagtgaggtacagaaacaactggattgggtacagtttggtgtttgctttatttgaatatagtttgaacactcagcagtatatgagtggttgaactatggctgctgggactggcgaagactcagcaattattacgggtgcgtactcctaagttaggttttcaatcttgtctgcctattaagctaggttatagttcatccacaaggactcaaatatagaagtacagagttattcccaggacatatttagttcactttaacagcatgtagtcttctaagaagactggcaaattgaaggggtaaggtaaaatatgttttatttttttctcgggcatataagtgccaagacaagtactatttaacaaatgagaaaaatgcatttgattaagatctttttttatacattatctgagcacaggaaaaaactctggaatcagtttgacccaagttccgagttcaagctttgctatttatttgagataatgggtaagttacttatccttcagtttctgcatcttcaaagtgagaataatgttggaaagtataaacagatcaaggatcctagacaaaaatgattaaaggagagaccccttcataacttgtagcccttcacttgctgtctatatatgacagctgttatatgacgattaattttgtatttctattcttagcacaagtataacgtctgatatccattcatgccacaaatgtgtatcggttgttgtgatcaggtcatcatactgagtgcccgaatagaacattgaaataagcagacagtcacacttggtaggctccaaattgttaattgaacaaattaatgaaaaggcagaggttaaactccagtgtccttaaaagatgaaacgatcactggaattccattgttatatgtaataagactggattctttgtacctctctttctgtctctatcacttccaaaagctatactaaaaactaatttgagccaccgtaagaaatcagcaacatccctccccacccctatctctactctggggctgccctggaattccgccacagtctttttctgtcgacttggcaggtggctatggtatgctgctttctgtcccattaacctctattttatctgtcaagaatagtattccccattgttgaaagcagtaatttgccaaccaagcaagcttggagtcctgtttgatggagcattacggagagcaaaagggaaagtttaaacagatttccttctctaatttcctgaaaggatcacagacaaaacttgccctctggaaaaatgctttctgtttgcattataataacaagcatttattgccatgacaggcatagagggaggccatggaagaatggccctgtatttcctggttttatttagtttcattactactcatgaagagtatgcagaaacactttttttctatgactgtaaaacatggtgctaatttcttgttattgagcacataggttttaacaataggatcatgctcagagagaaaaatctatttttccttttcctttggagaagttcaaagtgacaagcctgtgcctggtaaacctttaatctctcacagaattctggatgttttgctttcacatttatagttttatgaaaaaatcctattgtatctggtttatttcattgaactgaatttctacaaaacatgtgtaatatacaaggaatgtttcagaataatacagctgatgtgagtgatatgaactggaaagtaagcttcatgagaccaaagactctgtctgtattgttcccggctgcgtttccagcttctataacatagcaaaacaggtagcaggagcttaagatttatttgtgactgttaaatacctcatattcctacccaacaatacaaatgacagtttcaaagagggaattttcaggcttcaagctccgaactctagaggtggtcatacccaaacccatcccttgctttacacccaaaatgggatccatctcttacttgagcaatactttagcaagacccaaatctgtctgcatttctccattatatttcccatcccctcactccaagcatactgttccctggccccccacattcacgcttggctcactcctgaacatctgcaggtcttggcttagatctcacttctaatttaaggctctctttcactgacctgaccgcactacgtagatcacttgcaatatgctgccttcgcatcctggatttttttcttcaaagcacatatcacaattatcagtatagaaatgtctcattattgcttaatgcttatttccttgactagacaataagcttcttgatagcaggaattatattattcccaacaaagctcccagtacccagtgattcattcatagttggagctggcactcactgaatgtttgttgaatcaatgaataaattgagagagggagcgaggaaaggaaaaaggaagggaagaagaaaatcaagaatcagggttggatgacagtattttttcagatttgcttaaattctattgacacaccttactctaactagactgatcttgaccatttttctcaaaagacatgtatgcatatgtacttttgtatattttttgaggctactttgattggctggctatatctcaatataatttgtaatactagaacaaattcatattaaatcactttttgaattaataattattttaaaaattacttagtaaatgaaaaagccttcatgtcttaaatgaaggactctttttcttttaaatcacattgaacattaacagctcattttggaccttaaccagttgttgaattttaatcccaaattttgtaaatcatacacacaaacttgcatatatgtctgattggtggccatattttcttatatcctcaaacattttctgctattatgttacactctttaaagatctttgcttaattttctgccagttttcatctgatagacatttagcctgatacgttaactacctgttttatgacataaacaggaatggatccagataacaatgactagaaattacaattacacctgagcaagacaaggatttgccctaggaagagggtagtgtggggagagtgggagagagctggtgccgaaagctctgctctgcctctctcaggggatagcagggcttgggtaggcgggtggggtggcttagcttctgacaatggtagaaacttacagatcccttgacaaagaaaagcaagaaagtctttgttcattcactccttagatctggttccccagagtgcatcctgagatgaggatttgagttcaagtgattgaggaaatgtgccaaggaaaaaacagtggggaagtggaaaagcaaggtagggaaggagtaaacacccagcagggtgcagtttgtcatgagggttcagcctcagcctgaactcacagggctgggaacattcattatcattacactgcagactttgttccacccggagggaagaaagcccggtgtgcacactccagtacaagtacatcgctggctgtgggtcacaccagggggcacttcagctgtcagagagctgggacagagtaatgccagtcactcatgggtcctctgaagagcgttgcaaatataagctattgggagcaaagcacgaacagaagctggagattgagagtccagaaccagcaaagggacagagaggaactggctggagaatctacagcatcggctgtagctcccctgccacttacgagaccctgaagcttaaacttctgctattttattgacttctctgccaaaaacaaaagcaaaaccaatactatcctctctctcattgtcctctgatagccaaccctttactagcttctttttccatctttgtttaataaatgtgtctactgtcacatacactgttttcaaataattagcctcagcaattttttcttaagtgccaaataattaataaagaattatatactctacttttcatgttaggtcatagaactatgtataggtcaatacattattaataatgaacaattgattgtattctgtgttatgagcccagtgctaaacagatggaccacaaattttgccaactctttgaaatgttctacacgattggccatctcttctctacctattaattaattccccctcataggtgtatttaatctagctaaagaataattcaaaatggagattattcccaagactcacaaccacattagttcatggttgtcagcaaatctgacctgtgaagggggactcggttaccagtgaaaaatgcttattctatctgtattaatggaggtcattgtgccagtgagacctacccagaggtggagaggtgatctttcagaatctgttaccccgttaaatttagcacactctctagatgaggccggaaatacatacttggtttgggaagttctctccaaaatttcagtgccaaaacaggacacgagttactcttaaaatgctagacttactgtttttcaggtattagctgcctgcccggtttgcttcctttctgcttttcttttaccttgcctttcattcaacaattatttattaggtgtttaccagaggcctggcatttccacgatctggaagtagaatttctgggtggaaggaatcacaagtgtgaagctctcatgtcagcaacaaggctgatgtgctccagaaaaagtggtcagtgtggccagagacaagacacaggagagagtggtcatgaagtgtgagaggtcagcagacatttaagccctcataggctataggaaggacattgatttttgagaattcattaacggggcttttttttttttttttttttttggagacagagttttattctgccatccaggctggagtgcagtggtgcaatcttggctcactgcaacctccgcctcccgggttcaagtgattcttatgggtgggccacttgtgctaatttgctctgtgtgcttgatgtctgtgtgcttatgtaatggcctaagaacttttaagatgtggaggctcttgatcaaatttgcccggctaatttttgtatttttagtagagatggggtttcaccatgttggcaaggccagtcttgaactcctgacctcaagtgatccagccaccttggcctcccaaagtgctgggtcattacagggttttaagtaagagcatggcttgatctgattgatttttaaaaagacagctgcctactttgctgttggtgatgatatgagtagaagcagagagacaagaaagcaatgacagcagacgagactgcctgggggatgatcgggcgtttgagaaggggcaggacacaggatagatataggggagagtggcagaggacttgctacttattaaggagaagtcctggagcagcttattaaactttccctggcctcagtcttcccttctgaaagatgagaatgatactcatatacctaccacattgtgttcctatgagaatttaagcattaatatttactccatgtaaagctccatgacaattttgagaaaatggtaatcaatacacatttgcttattttttaattattcattggatgtggaaagggagaaatcaaggatgacacctaggttgaggactgaacaacatagcttgatgtctgtgtgcttaggtaatggcctaagaacttttaagatgtggaggctcttgatcaaattttgctgctgttgactcatggtgaccacaagccaataactcccttagctctgtcttgcgttgcctttttatctgcgcctggggcacatgctaactacttctccagtaaacgtccagtgaagatccaaagtttaattgcacattgtacctaacagtcttggaaattttcagcagggaagttattaatttttcacaaatgaacaaggtaaaagtggctgtgttccgcggtgagcaggtctatgcaaaccccaccccacagggtgagaggctgagaaaagaggtgaggaaagaggctgacacgtccagtttctcagaaagaaacatttgatagggacgtacaaacagaagccatgtctctggcagctgtgagatggtggatctttgcacctgccctccagaaagcagcctttacatagcaagcttttagggtacagacaagtgcagctggtcacatctcacacttccttgccaaaacttgtgacctctagggagatgagataaacgtctttatgaaaggttatctatgccataggcattgtttctttatggggggttatctacgctgtgggaacacttcggtatgcagtagtcaaacgctggttgtcattgaggtttcacttcagtgtcactcttgccaagcaacaggctgttttcctgcagactgacttgtgaaaagaagggatgtgattttctttcttttttttttttttttttttttttttttgagatggagtctcgctccctgacccaggctggagttcagtggtgtgatctcagctcactgcaacctccaccttctgggttcaagtgattctcctgcctcagcctcctgagtagttgggattacaggtgcccaccaccatgcttggctaatttttgtatttttagtagagacggggttttgccatgttggtcaggctggtttcaaactcctgaccgcaggtgatccacccgccttggcctcccaaagtgctgggattacaggcatgagccactgcgcccagccccgtgattttcaatctatggcctttatgttcagtgactgtgaaatccaaatgtcttggtgtttatgtttgtatctaatgtaatgcaaagcaagaaccaaaaggaggaacatggttgctgttggagcatcatctgataagatggtaagaccggctgaaaaatgaattagaattgaagcagaaagtacagtgtccagtataagatatagaggccttctttactgtgcacacaaaaagaataacttggatgtcattaagaaagaaaaagctaatgaatgcagaaatccattccattaacccatctggggacaccgacctattcttgggatctagaacccagatttgagccctggctcactttattccaaattataagcatatgactatgggtaagtcaccaacttctttaaatgctgagaagcttttttgtcaaccatgttgagctagtattctaccttataatgttgataaaagaattgacaaagacaatacagataaataaatctacttacatatttttaatattttgggtttgttatgaatattaagactaatccaactctgagaaatcaggacccacttggatgcttgtcattatattttcatttaaatgacactttatcttcaaggtgagtgttgatcccagaagaatctgggaatttttgttttctgattcagacagtagagagtaagtcacttgaccattccacataaatggcagtattcaccttagcattagccattatccttcaaatgggttgcctcctcaaagtggcccttttgcagaaggattgcatcaacatttatatttttttccctaaagtactttgttacgcaggtgagcttgggtgatgtaagttacaattaactccttcatctcctatcctggttgctgccattcttctctatttttggccagggtgtggatattggtggaggagactagacttctcttagcccgtgtgagaggtagacattgagatccttctgaaatgcatccagccattcttgctttcttcactgtcaagataactttcagcacattattattccatttaagcgaggataccatattcctaaagggtgtttcagaacccacacactggaagcaataagaaaccctgctgcaaaatcatcctcatctgtgactttcttctttccccttcctttgtccttagggaagtgtgaaatcggctgggcctactactgcacgggagcaggtgccactgccgccatgctgctgtgcacgtggctggcttgcttttcgggcaagaaacagaagcactacccatactgagatggagctaccaagagcagacagaggagaagatgggccaaaggggcttggagaggtcaaaacatccacctaccttcaaaaggtgggatagtagttctaatccaatacaatgctaataaaatgaaacccgataaaatcaggaacatgatataggaaggaaggattgtaggagatttgtgggggaaaaaaaaggagagtatagaatgatggagaaaaatggaccaaaggctaaaaatattgcagggcatcgggtgtttctattccacagagtattgttaatgtacaacacacacacacacacacacacacacacacacacacacacacacacaacaaatctacatatacaaacaagggtttgggttttagttttttttttttaaggtgaggactcagaaaatcaaagggctagtagaaacagtgttatgttgggaagcagggtacccccaaagatgttccctgtaggtcacggcactcccaaaagcacacaagcacatacagacatatgcatccccacacacgcctatgcacaaacgtggattatcgcacagactgggaggtttagtggtgcatttctcctctgttttctttttaatatacatttaaaatacagtattatcactttataaaacatacattaagcctaataaatggaccaataagccaaactatcagtattttgtatatcctgcataaactctaatttagttcctcaacatattttcagtgtttatgcagacctttagagttaagcctttgtatttccatgttattccacaatatgcaatatttctctgagtagcttctgctatgatattcttatgaagaaaaggggcaactttctgtccactataggagagaattcagccgaagatatgagagtaatgagagacattttccagtcattggatcgtgttttcttttgtccattattgtactgtgctgtaccacatttatttctatattcattttgtaaaaaatttaaaagtgctattttgtttgtatttgaaaatctctgtgaataaattctctctttgatcaata

SEQ ID NO: 61 - DNA, 15616 bp, Homo sapiens
agtgcaggtcgctttaagaaaggagtagctgtaatctgaagcctgctggacgctggattagaaggcagcaaaaaaagctctgtgctggctggagccccctcagtgtgcaggcttagagggactaggctgggtgtggagctgcagcgtatccacaggtaaagcagctccctggctgctctgatgccagggacggcgggagaggctcccctgggctggggggacaggggagaggcaggggcactccagggagcagaaaagaggggtgcaagggagaggaaatgcggagacagcagcccctgcaatttgggcaaaagggtgagtggatgagagagggcagagggagctggggggacaaggccgaaggccaggacccagtgatccccaaatcccactgcaccgacggaagaggctggaaaggcttttgaatgaagtgagtgggaaacagcggaggggcggtcatggggaggaaaggggagctaagctgctgggtcgggtctgagcagcaccccaagactggagcccgaggcaaggaggctcacgggagctgcttccaccaagggcagtcaggaaggcggccgccctgcagcccagccctggcccctgctccctcggctccctgctactttttcaaaatcagctggtgctgactgttaaggcaatttcccagcaccaccaaaccgctggcctcggcgccctggctgagggctgggatggaggacagctgggtccttctagccagcccccacccactctctttggctacgtgagtcaaggctgggcgaccaatgaggttgtggcctccggcaaacaatgaccactatttaggccggcaggtgtatagggcatgggggcccagctgccagtgctggagacaagggccgtccgagatgaaccctttctgctgcctgccaagccactgggaggggtaggtctcagcaggattcccagaaaccccgcccctgtccagcctaggccccccacccggtgttagctaacccaacgttagcccccaggttccgtggggttggagggcagggagtcctattcttggggctgctgcttctggggtgtggggaagtgcaactccacggcaccctgggctgactcattcagcttctaaagcttcaggaaacattgtttggggctgggtcaccatgggtgggccagagaggacccctcaatcccctccggagagccaggggagggggaggtgcccttccccatgctatctccgaggcccactgccatgtggctgaaggctgtgcggttctgggaagagggggaggtggcggtggaggctgtttgtctcctaactgggcttaatctgaaacacatgtattggcttgagttgatccgcctcacgtggaggcaagatcacaaaagcttctgtgtttcttgatgtgggcaattgtcagaaaataaggcctgaccttggcccagcagggagggtatctacctctccctgagccctcccccgcctgctaggacgagagcggggcttggatactgccctttggacaggatggcatcattgtctgtggctgcagccagccagcggtcgcctgctcagcccatgagcaaccactgtggacagggtattgcgtgtgtgctgaggggcgtccatgcagacccccacgcttgccctctcactgcccttgtagggttttcaatcatctctcctcttcccttatccagatggcttgaagtggaggattcagacttgccgttaatactctgggtccctgtgtctagctcggggccacctttggacccatgtcccttccctgccaggctccctcacctcacctcagcctacccacattgtgacaatcatctaccacctgatctggggtttgggcttagattctgtaggcaccaagactaaagtcgctccttcaagtccatttgaattgtgactttagtttccttaaatactatgccaggataatggccagggatggtggctcacgcctgtactcctggcactttgggatgctggtggatcacctgagatcaggattccaggccagcctggccaacacggtgaaaccccatctctactaaaacataaaaattaaccaggtgtggtggcgggcacctgtaatcccagctactcaggagactgaggcaggagaattgcttgaacccgggaggtggaagttgcactgagctgagatcgcgccactgcactttagcctgggcgacaagagtgaaactctgtctcaaaaacaaaaaaaactatgccgggatgagcctgtctcctcccttaatttcttacttgggccagaggaactagaactaacaacttctcttctagccttgcctcctgtgtacctcactgaatttttggtctctaataaaccagtctgcagaggctcaggggaggcaggctcctggcagctgggtggggctggccccagccgggtggagaccagctgtaggcctggatggtggtgaggcctctgtcttgcgctgcagaaagcttttcctgttgtctacacgaaagttttctccctgcatgtcagggcagccacgtgcaagagcagctggctgggaacgcagaggtctgcggctcgaggcggggtttagaaagaaaaccaggctgcttcctgctgcccgtcctgccttaagctgagtaaactcaaaggcaatcttctttcatgcctcacgatattgtccagtggattatctgatttaatttgaaggacgagagccaacaatcacacaacgtcctcccaaattttctgatccactttgttctgggaagtcaaaaagtgtgtgtgctgtgtgggtggatgtttgtgtatataaatggataatgaaggatgatgtgttgggggccagggcaggggagacaacgctgttcagattctacatttttttttccttttttttttttttttgagatggagtcttgctctgttgcccagcctggagtgcagtggcgcgatctcagctcactgcaacctccacttcctggattcaagtgattctcctgccttagcctcccaagtagctgggattacaggcatgcgccaccacacccggctaatttttgtatttttagtagagatggggtttctccatgttggccaggatggtctcaaactcctgacctcaggtgatctacccgcctcggcctctcaaagtgctgggattacaggtttgagccactgcgcctggcctttttttttttttttgagatggagttttcactcttgttgcccaggctggagtgcagtggtgcgatcttggctcactgcaacctccacctcccaagttcaagtgattctccagccttagccctccaagtagctgggactacaggtgtgtgccaccatgcctggctattttattttattttattttatttatttatttttgagactaagtcttgctctgttgcccaggctggagtgcagtggcataatcggctcactgcaacctctgcctcccaggttcaagtgattctcctgcctcagcctcctgagtaactgggattacaggggcctgccaccacgcctggctactttttgtatttttagtatagatggggtttcaccatgttggccaggctggtctcgaactcctgacctcaggctatccgcctgcctcagcctcccaaagtgctgggattacaggcatgagccactgtgctcggtagttgttttattttaatagtaggttattttatttccattttacaagagaaaaaatggtgatttaaagagctactaagacacagcactgagaccatgtgtgatggcatgcgcctgcagtcccagctactcacgaggctgaggcaggaggatcacatgaggtcaggagttccaggctgtggagtgctatggttgtgtagtgaatagccactacactccagcctgggcagcacagcaagatcttgtctcccaaaaaaaaaaaaaaaaaaaaatttcaaatgtgaacccaggatctctgaccctaggccctgcactcctaaccatgggaggaagagctcttgaaagggaactgtgggagaagggaatgagctgccttgtgaggccacagaagtccaaagacagcttgagaatttggagggacagcacgtgccggactgggtgcctctatgcttggtatccggtgattccatggaggagacctgggttctgccccattctcctgggaggggttgcccaaagtcttatcaccggagtgggtcagctgcctccaggacaaagctttagcatacacttgtgctgggccatactccacgtggagaagccctgctggggctggggccccactgctctggatctttaaaagctattggttcaggggccaggtgtaatggctcacacctataaccctagcactttgggaggctgaagcaggtggatagcctgaggtcaggagtttgagacaagcctgatgaacgtggtgaaaccccatcgctattaaaatacaaaaaattagccgggcatggtggcaggtgcctgtaattccagctacttgggaggctgaggcgggagaatcgcttgaacccaggaggcggaggttgcagtgagccaagatcgctccactgtactccagcctgggcgacagagccagactctgtttcaaaaaataaaatataaataaataaataaataaataaataaataaaagctttaggcttaaaggagggtcccctgacgcagacagtggaacaaaagcacaagcttatggtatgactgtgggccctgaggcagggggaggggcgggagaaccttgctgggagggatgggccatcaagctgagggtccacttctgggggcctggaggggtgaggggtggtcgctgcagggggtgggggaaagtgactagccctgcccaacccctgggtcctggctggggtggccaggaaggggtagcggggcagtgcagtgtcgggggagagcggcttgctgcctcgttcttttcttgcaggccccaggatgcaggccctggtgctactcctctgcattggagccctcctcgggcacagcagctgccagaaccctgccagccccccggaggaggtcagtaggcaggcggggagggcgtggtcagcattccccgcccctccttggcaggcagcacgggaaacaggacagggaacccggacccaggttccaggccaggcttgggcctttatttctctagggctggagtttctccagcagcaaaacagagagaaaatgtcttgccttgcctttcaggggatggagtagggacatgaataagatcccaaaagagtaaaaatctgaagcacttttaacaagtccagggcaattctcctgcctcagcttcccaagcagctgggattacaggcatgcaccaccaagcccggctcattttgtatttttagtagagacggggtttctccatgttggtcaggctggtctcgaactcccgacctcaagtgattctcctgcctcggcctcccaaagtgccgggatgacaggtgtgagccaccgcacctggccaggatcttttctcattaccttgtcttcctagtgggggctccactgagcaggtcatgttcccggacatttgttcggatactgaccaggctgtggcagggagtgagggtatggagtgacctctctcctgcccagaaagggcgcagctgggttcccaaggcagatacaggcacatggagggaagcctgggccatatgagtgttatggggtgagtgttggcggaggcccacccttgagggacaagagcagctgggcatcttggcgagagccctggactttcgtgaggtcagagtatgaattctgcgtctccctcttcctagctttgtgaccctagacaacccttacctcagtctttgcttccttgcctatgaaatgggataaaaacacccattctacagggccatgtggccactcatttatttctcatctaccaaacacctactcgacaggggctggcaatgggcggaaataaaaactcagttctgccgggtgcggtggctcacacctgtaatcccagcagtgtgggaggcggagcaggatgatcccttgaatccaggagtttgagaccagcataggcaacatagtgagacccctgtctctacaaaaaagcaaaaattaccaggcgtggtggcaagtgcttgtggtactacctacttgggaagctgaggtgggaggatcacttgagcccaggagattaagactgcagtgaggggccgggcgcggtggctcacgcctgtaatcccagcactttgggaggcggaggtgggtggatcacgaggtcaggagatcgagaccatcctggctaacatggtgaaaccccgtctctactaaaaatacaaaaaattagctgggtgtggtggggggcgcctgtagtcccagctactcgggaggctgaggcaggagaatggcgtgaacccgggaggtggaggttgcagtgagctgagctcgcaccactgcactccagcctgggcgacagagtgagactccgtctcaaaaaaaaaaaaaaaagaaagaaagaaaaactgagttcttttttttaactttctttttttagagacagagtctcactccatcacccatgctggagtacagtggtgcgatcttggctcactgcaatcttggcctcctgagttcaaccaattctcatgcctcagcctcccaaatagctgggaccacaggcacgttccaccacgcccagctaattttttgggtatttttagtagagatggggcctcaccatgttgctcaggttggtctgaaactcctgagctcaagtgatccatcttcctcggcctgccaaagtgctgggattataggcataagccactgcacctggctcccaatttttatatttatatttatttttatttacttatttattttttgagacagggtctcactctgtcacccaggctggagtacagtggcactatctcagctcattgcaacctctgcctcctgggttcaagcgaatctcgtgcctcagcctcctgagtagctgggattacaggcatgcaccaccatgccccgttaatttttttgtatttttagtagagacgggtttcaccgtgttgcccaggatggtctcgaactcctgacctcaagtgattcacccacctcagcctcccaaagtgctgggattataggtgtgagccactcggctgatggtttttaaaaagtgggtcatggggctgggcgcggtggctcatgcctgtaatcccagcactttggtagaccgaggcgggtggatcacaaggtcaggagatcgagaccatcctgcctaacacggtgaaaccccgtctctactaaaaatacaaaaaattacccaggcatggtggtgggcgcctgtagtcccagctactcgggaggctgaggcaggagaatggcgtgaacccgggaggcggagcttgcagtgagccgagatcacgccaccgtactccagcctgagcgacagagcgagactccgtctcaaaaaaaaaaaaaaaagtgggtcataggtttcggcttataggtcacaagtgtttaaacctggccatgaggccaggcgcagtggcgcatgcctgtaatcccagccatttgggaggctaaggcaggaaaatcgcttgaaccggggaggtggaggttgcagtgagctgagatcgcgccactgaactctagcctgggtgacacagtaagactctgtctcaaataaaaaaaaaacagctgatctctcttctgcgctgtctctccacagagagctcatgcgtgatcagggagtaaaactcattcccgttttaggccaaacacagaaaaattaggaaggacagccccaaggggccagaaccaccaccctacacaaagccgtgaggagacagtccctgtgcatctctgcgagtccctgaactcaaacccaagacttcctgtctcctgccagggctccccagaccccgacagcacaggggcgctggtggaggaggaggatcctttcttcaaagtccccgtgaacaagctggcagcggctgtctccaacttcggctatgacctgtaccgggtgcgatccagcacgagccccacgaccaacgtgctcctgtctcctctcagtgtggccacggccctctcggccctctcgctgggtgagtgctcagatgcaggaagccccaggcagacctggagaggccccctgtggcctctgcgtaaacgtggctgagtttattgacatttcagttcagcgaggggtgaagtagcaccaggggcctggcctgggggtcccagctgtgtaagcaggagctcaggggctgcacacacacgattccccagctccccgaaaggggctgggcaccactgacatggcgcttggcctcagggttcgcttattgacacagtgacttcaaggcacattcttgcattccttaaccaagctggtgctagcctaggttcctgggatgtaactgcaaacaagcaggtgtgggcttgccctcaccgaggacacagctgggttcacaggggaactaataccagctcactacagaatagtctttttttttttttttttttctttctgagacggagtctcgctttgtcgccaaggctggagtgcagtggtgtgatctcagctcactgcaacctctgcctccctggttcaaggaattctcctgcctcagcctccagagtagctgggattacaggcacctgccatcatgcccagctaatttttgtatttttagtagagacggggtttcaccatgttgcctaggctggtctcaaactcccgggctcaagcgatccacccgccttggcctcccaaagtgctgggattacaggcgtgagccaccgcgcctggccagaataatcttaagggctatgatgggagaagtacagggactggtacctctcactccctcactcccaccttccaggcctgatgcctttaacctacttcaggaaaatctctaaggatgaaaattccttggccacctagattgtcttgaagatcagcctacttgggctctcagcagacaaaaaagatgagtatagtgtctgtgttctgggagggggcttgatttggggccctggtgtgcagttatcaacgtccacatccttgtctctggcaggagcggagcagcgaacagaatccatcattcaccgggctctctactatgacttgatcagcagcccagacatccatggtacctataaggagctccttgacacggtcactgccccccagaagaacctcaagagtgcctcccggatcgtctttgagaagagtgagtcgcctttgcagcccaagttgcctgaggcatgtgggctccatgctgcaggctgggggggtcttttttttttttttttgagacggagtctcgctctgttgcccaggctggagtgcagtggcgtgatctcggctcactgcaacctccacctcccgggttcacaccatcctcctgcctcagcctcccgagtagctgggactgcaggtgcccagctaatcttttttgtatttttagcagagacggggtttcaccgtgtttgccaggatagtctcgatctcctgacctggtgttctgcccgcctcgacctcccaaagtgctgggattacaggtgtgagccaccgcgctcggcccgtttctaaacaatagatcatgtgtgcccaggcctggcctggcactggtgtggaggaagggcccgtgagcccaaagaggctcagaaagaggaagtgggctgcaggagacggtgggaggggcagggagggcagtggcgcgatgtggggaaatctgctgcccccctggccagtgcctggggatgccagcagaagtcctggcaagtcacaggaagatgctggctgggaagtcagggcctgctgagcgctaaaccagaacccgagcctggcaggctctcaaagacgggatgcttgtcgtcgagtctcatacgctaacctctgctccgcctcttctcagagctgcgcataaaatccagctttgtggcacctctggaaaagtcatatgggaccaggcccagagtcctgacgggcaaccctcgcttggacctgcaagagatcaacaactgggtgcaggcgcagatgaaagggaagctcgccaggtccacaaaggaaattcccgatgagatcagcattctccttctcggtgtggcgcacttcaagggtgagcgcgtctccaattctttttcatttattttactgtattttaactaattaattaattcgatggagtcttactctgtagtcctaactggagtgcagtggtgcgatctcagctcaatgcaacctccgcctcccaggttcaagcaattcttgtgcctcagcctcccgagtagctgggattacagggatgtaccaccactcccggctaattttttgtatttaatagacatggggtttcaccatgttggccaggctggtctcgaactcctgagctcaggtggtctgcccgcctcagcctcccaaagtgctaggattacaagcttgagccaccacgcccagccctttttatttttaaattaagagacaaggtgttgccatgatgcccaggctggtctcgaactcctgggctcaagtaatcctcccaccttggcctcccaaagtgctgggattacaggcatgagccaccgcgcccggcccttttacatttatttatttattttttgagacagagtcttgctctgtcacccaggctggagtgcagtggcgcgatctcggctcactgcaagctctgccttccaggttcacaccattctcctgcctcgacctcccgagtagctgggactacaggcgcccgccactgcgccctactaattttttgtatttttagtagagacggggtttcaccgtggtctcgatctcctgacctcgtgatccacccgcctcagcctcccaaagtgctgggattacaggcgtgagccactgcgcccggcccttttacatttatttttaaattaagagacagggtgtcactatgatgccgaggctggtctcgaactcctgagctgaagtgatcctcccacctcggcctcccaaaatgctgggattaccatgtccaactttccacttcttgtttgaccaaggatggatggcagacatcagaaggggcttggaaagggaggtgtcaaagaccttgcccagcatggagtctgggtcacagctgggggaggatctgggaactgtgcttgcctgaagcttacctgcttgtcatcaaatccaaggcaaggcgtgaatgtctatagagtgagagacttgtggagacagaagagcagagagggaggaagaatgaacactgggtctgtttggggctttcccagcttttgagtcagacaagatttatttatttatttaagatggagtctcattctgttgcccaggctggagtgcagtggtgccatcttggctcactacagcctccccacctcccaggttcaagtgcttctcctgcctcagcctcccgagtagttgggattacaggcgcccgccaccacacccagctaatttttgtattttcagtagagatggggtttcgccatgctggccaggctgttctcgaaaactcctgacctcagatgatccacccgcctcggcctcccacagtgctgggattacaggcgtgagccactgcgctggccaaatcagacaaggtttaaatcccagctctgcctgtactagctgaggaactctgcacacatttcataacctttctgggcctacgttctcacctttaacgtgaggataatatatctacttcatagacacctttttatgttgtctccaagttttctaacagctctagttctgtacccaagacatggcaggtggccaacgacatccttctaggctgtggtgatgtgtttggagcttgttccacgggtcttgtgtggggccagccctgttcagataaggccttgtggggtggcctggggtagggggaggggttgggcaaactctcccttaaaacgctttgtaaccatctgaggcaccagcaagagcggcccccgagcctggacaaaatccaaacggcttcctacttcaagcactgatgtctagtgagtgaaggaacagctctgggtccaggatattataggtcacattaaactaaaggggcttggccatcagctggcttccagagcgtcagccagttacttcacctctttggctttggcctgttttcagctacaagaggacttaatccagaggacctcagaggtccttcccagctcagaccttctttgactgtctcccagagacactgctgtaggagtgcacaccagtttacttttctttcttttgtttttgagatggagtttcgctctttttgcctaggctggagtgctgtggtgtgatctcagctcactgcaacctctggctcccaggttcaagtgattctcctgtctctgcctcccgagtagctgggattacagacacccaccactgcacccggctagtttttgtattttcagtagagatggggtttcgccatgctggccaggctgttctcgaaaactcctgacctcagatgatccatccgccttggcctcccaaagtgctgagattacagatgtgaggcaccacacccggccatttttgtatttttagtagagacggggttttgccatgttggccacgctggtctcaaactcctgacctcaagtgatctgcccaccttggcctcctgaagggctgggactacaggcgtgagtcaccgtgcccggccatttttgtatttttaggacagcgttttttcatgttggccaggctggtctcaaactcctgacctcaagtgatccacccaccccggcctcccaatatgctgggattccaggtgtgagttaccatgcccggctaccactttacttttcctgcaggctatcacagaacgtgtacaatctagactctaatcaaccaaatcaacgtcttgccatcggagtttgctggtgaagggcacttggggtcctggaaataactgtaggctccaagccacacacactgagataggcctattccctgaggcctcagagcccctgacagctaagctcccttgagtggggcaattttcaacaacgtgctctggggacacagcatggcgccactgtctttctggtctcctggggctcagactatgtcatacacttctttccagggcagtgggtaacaaagtttgactccagaaagacttccctcgaggatttctacttggatgaagagaggaccgtgagggtccccatgatgtcggaccctaaggctgttttacgctatggcttggattcagatctcagctgcaaggtctgtagggataggggcagggtggggggtggatggagggagaggatagagaagcaaaacagggtagtgggaataaaatgacctttgagatccgacagctgtctacatgtcgcctgctgtgtgactttgagcaggttaataacatgtctgagctttcctcctcttaagatggggcaggggatcgttaccaacacttaccctcccagggtttgttgtaaggacgaataaggtaataggaaatgggccctcagactgggcacccacatgtttgttctcttgagactcctatttctagaatttaaagccaaactttgaaaaataatgacaaactccaaatcgttggcatctttttttttttttttgagacagtctcgctctgtcggccaggctggagtgcagtggcacgatctcggctcaccacaacctccgccccgctgggttaaagcgattctcttgcctcagcctcctgagtagctgggattacaggcgtgtgccaccatgcctggctaattttatacagacggggtttctccatgttggtcaggctggtctcaaactcccaaactcaggtgatccgcctgcctcggtctcccaaaacacagggattccaggcatgagccaccacgcttggccaatcgttggcattctaaggctttcagtgtacctgacttcttttagttctaagtctgtaactgttaacctttcttgggccacggctatcacacggatctctctgggaatctgacgacagtgcctcaaacccgagggagcaccgccaggtgtgcacacacgtttctgtcaacgatttcggagactcttgggatccctgacaccatctgttccatggaccttaggttaagagcctctgttcaaaggaggcttttgctcttggtgggtggatggggtgaagtctccaagccctcttacggccccttcggtattcctatccccggttctccctgtcttagtccagtgctctctatttaacaaatgagcagtaaatgttggccgatggactttgggagaaaataaagacctgaaattcaattctagctccttaaaccacaggagaacattctttcagcagacaacttcagttggtattaggccaaggtaagaaaggccaacagcatcctttctgaagaaacctcaggagatggctcactgccagaaagctataacctggaaggggaattgttaaatagatgaggggctggatgaaggacgagaccagggccccgtcacgggagagggaaggcagctcctggctgtgtctgtccccggcttttgggctctgaaggactaaccacatgctttctcacttgtctcagattgcccagctgcccttgaccggaagcatgagtatcatcttcttcctgcccctgaaagtgacccagaatttgaccttgatagaggagagcctcacctccgagttcattcatgacatagaccgagaactgaagaccgtgcaggcggtcctcactgtccccaagctgaagctgagttatgaaggcgaagtcaccaagtccctgcaggagatgagtatgtctgaagaccctttcgctcttggtgggtggatggggtggggcagggtctttgggccttccactgtgctaagcagaacgcaagggctccacaggcttgtaggggggccgtggatgagtccttaatcctcatcgtgccagaagggaaggctgaactgccttctctcatcagactcattcctcagcctcacgagcagacctccctgacaggcgctcacaacactgcctctcaagacgagtctgtctgacctgttttctcatcttgacctaacttgctaaatgctcctgggcaagtcactccaccctcggtcagctcagacctcttcaggcctcagagaaagtcaacagtgctgcgccatcccagcttgcttgcaaagggatcccttggttggggtgttggggaaggcagggttttaacggaaatctctctccatctctacagagctgcaatccttgtttgattcaccagactttagcaagatcacaggcaaacccatcaagctgactcaggtggaacaccgggctggctttgagtggaacgaggatggggcgggaaccacccccagcccagggctgcagcctgcccacctcaccttcccgctggactatcaccttaaccagcctttcatcttcgtactgagggacacagacacaggggcccttctcttcattggcaagattctggaccccaggggcccctaatatcccagtttaatattccaataccctagaagaaaacccgagggacagcagattccacaggacacgaaggctgcccctgtaaggtttcaatgcatacaataaaagagctttatccctaacttctgtta

SEQ ID NO: 62 - DNA, 55499 bp, Homo sapiens
catttaatcgccgttttctgttcttggacatcaaagctggggcttaggcgctgtgctggggtcgcggcggcgcgggcgctgggggagaggaggtgagtgaataggggctgggctgaatgggctttgtgtgaccgccagctctgccagctttacatgctctttgacccagatatgatctcatggagagaaaggggccctggccaggccagcctgagaatgctccctccgtggcctgactcaacccctctcctccctgcctggggcaggcggccccactgccgccccctgccagccccggctgccactgccctctgccccaaccctggcaattgtgggcagcctcctccagaacacactcaccaggagggcacattgctggggtcagaagaggggacaggcaccgaggcaggggctgggaggatgccgccgtggggctgcagggtgttctccagggaccttaagcgggagctccccgcatgccctgtagtcctggctgggttcaaggaggcgtttgggtcatttcagccttagcagctctcctcccagtcgctctgaggaactcctctcctgaccaaagtggagagctgaggcccggcgccagcagaggtttgctgaagactcaggcaagttgcagcccgtgagaagaggcataagggaagccaaggccaaggccgcctccctccactcagcacggccaggccttcccatgtgggagcccctcacgcccctggcaccaggaagggaggggattggggatctgaagatgactggcctcagtgccctgcttcagcccagaccctctgtcacttccatcctctgctttgcttgctgcccagagcgattttccaaaaatgcaaatagcatcatgtcgctccctagatgagagtccctggtgactcctcagtactctgaggatggaattcaaactccttaacaaagttccaagacaccctgagtgacagagcccctgctcagcacccaacttcgtcttaagatcactcttgagcccctcggccaacccctactctgctccagccgatgggaccacgggtgttctgggccacaccgagctccattcccctgtgggcctgtgcgtgtgctgtttcctcttctgagagctacgcaaacacacacaccccttctgtctggctctctcaacttctcctttttcacttttcagctcaaaccttctctcaggaagccttccctggacccctgaagctaaattaggcatagagtctctatagtaccatttagtcacctgtttccttaactgtcaccattaccagactgtcagttccttgaggtcaggaattgtgtgttatctatctttgtgtttccagagcttcatgctgcctggcacatgataggcacccggtaaatctttgttgtataaatagatgaaagaaagagagggagaaggagggaaacagagaggtaattagcactccagggctcatgttgcagttgtcaggggcacgtgagagcagggaaggaggaacatcacatgcccgctcgggcacctccccaggacacgtgtacacacacgcagaggcccagtgggggggggggagctcctgcatccccacacctgtgctcatgtcgattcatagaccacctgacccgtgtctgccgcatgccagaggaaggagcaggaggcaacagggcagtggtgcttcatagttgggagctgcctgggtgttgctgggcaggatgcggggcaggagaggggctggggggttgcatatgtagacacctggtccttggcccatgggggcaggtccatcccccagctctctgtgtggtttcaggcccagccccgccgccatccccacttccactcgtgggctggcaggagggcaggctcctctccaggctgcgttttctgcacccagggggtgcctcagtgaaagtgaactcgctcatttaaacctgactctgccgccctgcagccccctgcagcgctaattaccctgtagttctaaactgattgctgtacactaagcttaagccctcctttatttatttactgactacattaatagcaaagccacgctgcgttcagccgctcccaactgtacaccggctggctgcacccgttccctcatgtcttcccagggaggcagggtggagagatgcagcctggcacaaggcccccttacccaccaccctgactgaatctccagggccagacaacatgagaaatcactgacttcatccatacctactctgggacccgatggggctcctcttattctgactctatgacagagtgggaacatacaacacacaacagctcaccaagcagaggggtctgctattcacagcacactcagaatgctgcctttcagccttcacttgtgggatgagacgctgagcgctggcctcattttacagatgggtaaactgaggctgtggctccatagctggtaggtggtatctcaggcatgctgtccatcgcggagatggccgccccacttgtccccacccagccagctttgacaatttctgttgtgtgttcccataacttctaccccttgccacgagaaaggaagcccttccctatgtggaactgaaactgcttttttgctctcagcttttctgcctcattcacctgcttgtccagaatttgctggcaactttgggaatacagcctttccttcattctcagcctttaccaagcaggtctaagtcagaccttcgatgccaatccccacttccctccagcactcacacatccagggatgtctggggagaggaggcccgctccgggctccggtgtggtcaagccctgctggttctcccattctggggtacagaggtgctcataaacactgtccttgcctgcatctctgagtgccctcaaatcccctgaggcagagctgggccctggccttggggcacagcagctctctgaagaccagatgggccccatcagggtgcagcatacggacccacggaaccaagcacccaggctctactctgatgccaaatagcttggtggctgccgtgcggtgcaccctagaggaagaggggcagctgagatttggcagaatctgggattcagtcgaggggacctgggtttgaggccagctctgctgtgcaccgcgtgaccttcactgtatctcaaaggctcccgaaggcctcacttcctcaaccctaagactggggtcagcaaatacctagcccacccatcctcaggacaattgtgaagccaactagagtaacgacgtgaatcagctttctaaacaccacgatgctataaacgtgagttatcaatggggacaggctctggctggtctggaaggggagctggggtcctagacatttatttccagaacaggagcccacggagccagggacccaggagcctgggattctggagtagtgaggctgctgccggcatctccgggactctgtctccacctagtgggcactgactgcaggtgcttctgctgctaaggccgcctggaaagcaactggggttgcacatccccttaaaagctgccttggggccgggcgcggtggctcacgcctgtaatcccagcactttgggaggccgaggcgggtggatcacctgaagtcgggagtttgagaccagcctggccaacatggagaaaccccatctctactaaaaataaaaataaattagccgggtgtggtggtgcatgcctgtaatcccagctactcgggaggctgaggcaggagaatcgcttgaacccgggagatggaggttgcggtgagccgagatggcgccattgcattccagcctgggcgacaagagcgaaactccatctcaaaacaaacaaacaaacaaacaaacaaaaagctgccttggttcctttgggtcccctgctatcccaggtcagggtagggctgagtaaggagggaatgtggttcagatttgtgccagagaagaaacgctttaaactactcggggttgggggacggtgttccgctgggcctttccagaagtcttcctaagtcaatagttctttcttgacttttcttctcccatccaccaactggccatatcaaatccaactcctcccatccctaaaaagctgagtgggaagctgctgtcagtcagccctaaccccagggatacgcgaggcctcatcttgcactgagggaagatcaacctcagatggaattcagcttctcggaagctttgtgactgggaaagaagcaggcaggcctcgaagggtttgcagaaggagcccagagtgcccctagggctgggtcactgagaccctgggacgtgacagtaaaaggctacagggcaatgggacaaactcttacttcctgaggtcctgaaccttccgaaagcctagaaaacccataatggagggtcgctgaagtcagctcctgcctttaaatccaactgccctttttaaattttatttttattttttatcttcagcttttaagttcaggggtacatgtgccggatgtgcaggtttgttccataggcaaacatgcgccttggtggtttgcggcacagatcatcccatcacctagttactaagcccagcattccttagctattcttcctcatgctctccctttcacccccaacccaacacaggccccggtgtgtgttgttcccctccacgtgtccatgtgttctcattgttcagctcccacttataagtgagaacatgcggtgtttggttttttgtcgaactgcccttttaatgcagtgagtgagactggtgcctgtcctaaaccctccacaccccactttcagctctcagaaccagttcaccagccaacccctgcacttggcctacagatgatttgactggaagtgatcttaggacaggtcatcttttcactctccttgcctctgtgcgcttccagccatctcaaatggatgcaactaaatggtttggaaaacccctccaacacgaaacttctaggattctaggactctaggactctactatagagccaactataaagatcctcagaaaaacacatacccctggctccctatcacctgtcagcactttttaaagcagcagcatttcactttgttttcccctccacgccgaccagtgtggtcttcagcatagagtgagcttctagtgacacgagctggagggaaagaggaagtgcatcaggacggctcgtccaatggacaaggtaagggaaagatcttccctaataactctccatttgggaaggagggagtcacaaatggcaggggaggtggggacactggccctcaccagctcaacttgaggaatactcaccttactctcagaaatctgtcgattaccattcctccttcacccccatcccaagcatgggtacttgaccttttcctgaattctccacagctgacaccagctgaatgcttttcctgaattctctggcacagctgagaccagcctgggatatttaaattagatttctctgaagtctcaaggatggcaaaagaaaacaagcaccaatgaaactgagtaccccccctgtttctaagagaaaaaaagttaatttttacagttatgattattttctcttttctcttttctcctattccctgcttcctacttagctctttagaaatgattataacctttaccttcccttcaccagacactcccttctgggcaagcttatctgactgtgtgcttacttagcagctccagagctgagctctctcctaccaggagcttgcgtcgagagacagcagtcaattatttacaacctgaagggtgcccattacaaaactctttcccacctgaagagtatctcaaaatcatggccactttataacctagctctgcccacgatggcaccagctcaaccacctggcagataacgcacaaaccacgtagaccccacacctgctcgctccctcccctgtatgccgttcaaattaagtccccctttaaaagtcccgaatttctgccccaaaagtgaagtgctagccttaaaggcagaagcctggacttcctcccctaagctaaactttggaataaagtcagtgtctttataccagacctcttgttagttgaactctacaagtggcaagcaactgaacctccattttggttacaccaagaacagcataacattagatcatctggttcacaggcagcagcatggctcccatatcatgccttcctgcctggttctctgcctgccttcaggagacagggcctgtctttaatccctgccactgacaagcctgataaagtgagacccagagtgacgtgggcttcctgtttctaatggactatgtgtccatcctcttattaaaagtcagctcctcctcttgggctctggatcatatcctctcagtctttccaagccctttgctcctgtgcttgtcttctgtttgctacatccatttccccctctcttcctaattattcacatcagcatagaacacctcccattttagcaaacctttccttgagcccacatccccctttagcttccacccatatttctctcttccttggaagagcaaaattctagagagctgtctgcagacactgtcttccttcctttttcttacaacaatttccaatttgagttttatctctgttattcctttaaaattgtcttttcaagttcactagtggttccaccatgcaaaatgcaatggcttctttgctgatctgaaaatataggattaacaaactcagtttcttcctgccaccctctcacaacatagtcacatgcagcttctgacacctaatgtagggggcttctccccacacaccaagcaagcactcctccagtagctgacaccagctgggtgctctctaactcaattccattccaacactacctacctggagatagcatcagatcccacaggttaagggttcagtcccacaaaagcgcctcccacttccaatgccaatcacaagctccaggttgtttgatccgtgcttctgatgaccagctatatatcagggttcccacaacctcctcattgggtttgattaatttgctagagtggttcactgaacttagggaaacatctacatttacctatttactataaaagatattacaaaggatacagttgaagagatgcatagggcaaagtatgggaaggggcttggcacttccataccctccctgggtgtgccactctccaggaacttccagggatgtggcagtctggaagctctctgaaccctgtccttttgggtttttatggaagcttcattatataggcatgattgattaagttactggccattggaaatcaactcaaccttcagcccctctcccttccctggatgttgcagggtagggttgaaagtcccaaccctctaattctgccttggtctttccagcaaccagcccccatcctgaagctgcctatgggctgccaacccctcagtaaactcattcgcatatgaaaaggcactttttaacataaaatcactttgaagatttcaaggattttaggagttgtgcgccaagagacagggacgaagaccaaatatatatttcacaatatcacagctggctttatcttccttgatctcccaacagctttctacataactgacttgctccttttggaaacacttctggtttcccttccctcactggctgctgcttctcagtcttgttggctcaccccatcatcttcttctgctggagctctggatattagacagtctctgaaaagttccttgatgcttttactttgtctagctacattctcccccaccctgatgtctcatctatttctgttgcttttagagtgtacctctgggagattattccttaactgttccctggccacgtttgaagtgagtcctgggattgagtctgccttgggacagtgtggctttcaggaccagcccaattcctgcttgtgcaaatctgggagactgagtgtggttttaagctttgagagtcaaagacattatcaggccaggttcatggacttttggcaattcaatttctccgaaaatagcctttggctgtatttgcttccaatcgatttcttacgccagtaacccattaaccatgattaaagttctttcctcaacttagttgtccaatctgttattattattattattattctgcaccgccaagtctccttgtcaacttcctggtggttaccttggggtcatctgcgagtcagcttgggtgggaaaagcaacacctttaatctgatgtttgtcacagtactgagtctctttgtaagagaatttttaataatgagcctttaatgcttgaagccttttccagtttcattcctgtaatttagggtccagaagcaggtagctttcctatatccaagaaaacccaaatttttggattttcctcctacttacattcatttcttctcgggaaattgtcagttattacctgaacacatctcttcatagtaatatcttgctacaaacgctgaggagcaatcaacacgtactaatattatgtcccccaccccacctcgctgtttcccttagagctataggcttagtatatacttggcttagtctaccttttaagtagttgcactcaagagttttcctaaatgttttacttatgcctatcacagggctctttctaactagctatcttgctcttcttctgccagcaaaggctctaaataaacctgccactgtctacctttctgaccgtcttcttccactcttttcccacctctatacccagcctcactgtgattcatttgtttccagaacaggacaggcctttgcatgtgctgttcccactgccaagagctccttgcccacccccacccccagtcccaccccatatctttgcatggctgcctccttcacatataatttgggtcttagctcaaatattgcctctcagtggggtcttacctgaccatctgctatggtttgaatgtgtcccccagaagtttatgtgttggaaacttaattcctctgccctcttgaatggattaatattatcatgggagtaggtttcttaccttgatagtggctttgttagaaaaacaagctctctctggcttgcttgctctgtcttgccatgcaattctttcaccatgtgatgagacggcataaaggcccacaccagatggctggtgccatgcccttggacttcctagcctccaaaaccatgagctgaataaacttttattctttgaaaaatgatatttagttataacaagagaaaatagactgagaaaccatcccatctatagtttgttttcagctgggcacggtggctcacacttttaatcccagcactttgggaggccaaggtaggcaaatcatctgaggtcaggagttcgagaccagcctggccaacatggtgaaaccccatctctactaaaaacacaaaaattagctgggcgtggtggtgcacacctgtaatcccagctactcaggaggctgaggcaagagaatcacttgaacccaggtggcagaggttgcagttcaccaagatcacgtcactgcagtccagcctgggtgacagagcgagactccatctcaaataaataaataaacaaataaataaaaatcaagtttgtttttcctagcatttaccactgtttgatatgatcttctttatttgtttacttgtcatggttcatgtcctagtctcctgcatgtggaccctgtgagagccagggccttgtctgccaccatatccttgatgttatgaactgtgcttgccacacaattgttatgactacaaatgccaatacctacataatactcattgtatgccagccaccgtattagttcgttgttaaaaatattttaatatttttaatgaattacatatatttctaatatacataaaaatagaataatatgatcaaccccacataatgcccgtcacccagattcaacatcatccagattctgccacacttgcttcacctattcttctgtcttttgttccttttctgtctttcgtttctttttcctgtcttttgtttctgctgaaatattttaaagaaaatcccagacatcgtgttgtttcaccacgacatactccaattcatgcatttttcaaaatgaatttttctcatttaacctcagtgccatttatatctttccaaaattaggaatggttcctccgtatcctcactcagtctgtattcagattttcctgattgcttcaaaaataactttttaaagttgatttatttgaattaagagccaaatcatacccacatactgcatcgatttgttatttctcttaagtttcattttccccatgctgttaacttgttgtagaaagcggtgattattattatctattcagttatgagatgatgagggcctgaaatggggctgggtagtaggagtaaaaggaggaaacgatctgaagagaccttatggagcagagtcatctggttaacccagctttaggccagtggagtggcgacatcgctgacctttctgagacacctgggagctacaagatcaacagtgaccttgtttcctcttacagggtccctagtgtgacaactgaagggaacttcacagatgagctaattgtaccttttgttttagtcctttttccagcctctcccagctaggcagaacatctgtacagtcctcccacttgttcacagagttccctctttatcttgcatcctctggagcttgttaggagagggtcagcctccatacatgggacttaccatggttcccaaaccagccatgcaaccaagcttatgattgcttaaaaatatactacaacagaccaggcgcggtggctcacgcctgtaatcccagcactttgggaagccgaggtgggcggatcacgaggtcaggagatcaagaccatcctggctaacaaggtgaaaccctgcctctactaaaatacaaaaaattagctgggcgtggtggcacacgcctgtagtcccagctactcgggaggctgaggcaggagaatggcgtgaacctgggaggcgcagcttgcagtgagccgagatcgcaccactgcactccagcctggacgatggagcgagactccgtctcaaaaaaaaaaaaaaaaaaaaaaactgaaacagctggttccctgccttagagctcctgaatcagaatttgtgggcatgctacctgggaatctgaaagcagctgtgtcataggttttgtccggttttgtccagtttcgtagttgtttatggtgaaaggcaattccagtaattgttactctgtcatggccagaagaaaaatttctgttctgatttttaaatttgaattagttcatttaatcctttcacaaattctaagaggtagattattatccttgtgttttcacacattttaaaaaaaaaagctgaggcaaaacgagactaaataacttgtccatggacacattgtgtaagtgctagagccagattttgaatctaggccgtttagctccagactctgtgctcttatacatcaacctattatcttacataatagctgcttaattaatgtattttggatgaatgcagtgaaggctttctcttctatctttcttacccatttaacttctgttctccttgccagaaaagtctcaaccttaccttaatccattgtgttctcttctgcaccaagacgtctcagcacactgcagaaaatccaacttctgggcagactgagttcctgtcaagttatctgggctctcaacaatccctaataattctgtatttccctagtttttgccttctgttttccatagagttcttgtccgaatctcaaacacctgcacctccctattcattattttcaggaaaaacatcattttcagctcagttttctactcatcccttataaatttgacttgttttggcatctgtccttgcctttcctccactgtcaaaatatttagtgtttctctatcagaggctcatccacttttagctactgccctgtctttcttccctttcacagccaagctttcagaggtgttgtttgcattttctgtctgcacttcctcaccaccctctcacctccagctcactccatcactgcattctggcttctgtactcattactttattcgtttactagtgtcgacttttatctttattaattttgtcattgcatgttatttaaatgtacttgttattctttttttaacttcttggtttagatgcttaattcatgtattaattatcttctgttattaatataattaattaaggtcatagattttcctctccttagtgtcctatagattcttatgtgtagagtttaaaaaattctagagaattttcaatttttttggtttcttctttggtccaaaaatgtttaagaaaaaaatttaaaatttccgggtggtagagtcttttgtttttgtaatgaatatttattttgttgcaatttgatcagagaatattttgtattatttctaccttttgagaatttaaacaatttctttgaggctttttatataatcagtttttgtgaatattccatgggtaccttgaaaagaaggtatattttctatttttagattagagcattcaatacgtgaattaactagatttgaattattaattacattttaatatcttctatattctcatttacttaggaacgtgtgaacagaggaaacctgtgccctttccctgggcatagcctagaaagtgtcaagactccagactcatctctattctcaatgtggtgctggagcagaagcaatgctttgatggttgtttcacagcccagagtatcgtaagcagagggagagtgatttcccttactcccgtctgagtgtatgagtttggtagtgttgccataaaaaaagaccacagactgggcggcttcaacagcagaaatttattttctcactgttctggaggctggaagtccaagaccaaggtgccagtagggttagtttctagtgaggtctctctccttggcttgcagatggccaccttctcactgtgtcctcctatggccttttctctgtgtgtgtttccctcttctgataaggatagcaatcctactggattagggccctattctatgacttcatataaccctagttacctttttgtttagttcttttttttttttctcgctttgttgcccaggctggagtgcagtggcaggatctcagctcactgcaacctttgcctctcaggttcaagcaattctcctgtctcagcctcccgagtagctgggatcaaaagcatgcaccaccacaccctgctgatttttgtatttttttagcagagacagggtttcaccatgttggccaggctggtctttaactcctaacctcaagtgatccacctgcctcagccttccaaagttctgggattacaggcatgaaccaccatgctcggctccgaatgacctttgtaaaggctctgtctccaaatgcagtagtcatattggggccaaggggttcaacatatgaattttgggagtgggcagggaggcaggcacaattcagtccataaaagtagagaatgggaatagaagggagagggaaatttgttttaaaagagagaaagacattgagactgtgtaaaggggatgttgcaaccttttaaaatctgtgatctcagaccaaattatacaatataatctcagtaggtgccagtagtagggaaaagtgtcagccctcgtgtctggcactaagtaccacccaccccaaccccagtgatgggagcctctaaatgactgagatttaatgtctactacctatttgaatgaggacttgaagaagaaattcagtgcagttatagagcaggtgctttttgcacacttatccccactacatgtgtggctccagctcaggtctctctgtgagtttttgacctgcatctgggttagattcaattttttagcctcaagccaagcatgctccaaatgcaactcctcgtttctcatcatgtcatcctcttcaccctcctctaaacctgttcttcttcctgtgttccctactttatgaattaccagcatccactcagtggtctgggacagaaaccagggtgttgtgttcgggagctgaaaacactaaagactaaaacccaatgaagacatcttcatcctagtatctcacagctcctgggggttcacaggagattttgtttaaaaattaattaggtatgctacttaaaaacccaccgtagaagagagtgcagtacagtggagcagaagagatgggaaaccctaagctgctaaaaagcctgggggttggttgaggggggcatctgtgcagagaaggaactggaaggagggagaggtggttgtgacagaggtgaatacctgggagaggaaggttcaggaaacttccttcattggctgttcaattcttcacctaaatgtctagaggtggagctgggcttgcggggatggttactgagtctgaactctgtcaagaaaggcccgggggatcagatggtttgctccttcctggacaaactccctgccctccatgactcttcaggaacccacagcacctgacatcttttgggtggattgtgagcccatagcccgcctggactacttcaaatccagccggaatcttttgggaaatggattcctctatttactgtggaaggactacagtgacatgattaagtcagaagctcatctccttcaaccttgcaggaggtctgtgggtgctcagggtagctgtgaaaactttaaatcaggtgcagctctacttcaaccctggggcagggttagagagggaggtgggtgagacccaccaggtaactgacagacacgttggaccttcagagtgtgtggaactgccctaagggaaaattttagttccacttgatacatggtccatggtgggagaccctcaaagtctctgaggtttctgaggtcgagatttcctgcccccataaagtctaagagttgtatctttgatggtcctgagtgaagctgcgaaggcatcagaaagtaggaagcctctctccacctgcagggtggccttgactgctctgcccgtcaccagtgtggctcatgaaaacatcactgtggatggcttccagatttgctcctagggaaacaatggtactagccaggttagaccattgaaatcaaataacgggtatcttttcatgattaacaggagaaaaaataacataacccactagatagacttttcccacttacaatttttctgccataaacttttcttaaacctctgatgcctgcctcaacctacctgccactgtaccctacagataaaacaaatgagcagggagcaaatgaagagtagcagcagaacccaggcgtgaatgagcatgctaagttcaatagcctgtgtttctgtgttttcctggatctgcacgtatgtgcctctgattttatattgcctatggacctgactactgtagtgtggtatgtttcctgctggcaaaattgttcataatttgtgtattagaattaaagagatgactatttcctgtcgttctacaaaaaggaccaagatttccaggtgctctgccatctgaagacatttaaagaccagttacagctcagggataagagggtgaaagcttccagcttaggcagatggcgagaggcgcttcttgctgaacaagaggttggagactgggccagaggaggaattataacagattcagcttgttttctctcctcactgccttgttcattttggaagccccttgccagagtccaaatgatattgatattttgtgtcaacccagtctctccctagctggagagaggtcaagataggaataagagaccaagagttctgtgcgcagaccctatagtctcattttagtccccatgctgccaagcaagattcttagaacacagttgatacttaataaatgtttaaggccaggtgcggtggctcatgcctgtaatcccaacactttgggaggctcgggtgggtggatcacctgaggtcaggagttcaagtccagcctggccaacatggtgaaaccccgtctctactaaaaatactaaaattagccgggtatggtggcacgtgcctgtaatcccagctactcgggaggctgaagcaggagaatcacttgagctcaggagtcggaggttgcagtgagctgagatcgctccattgcactccagcctgggcaacagagtgagactttatctcaaaaaaaaagtttgagaccatgttacagatggtctcagtggggccatacagcacttcagtgaagaacaattggaataggaaagccagtgtcctcatgaatgtgaccagttatctctgaacaggtaatttacagtggtcaattggcagttgaagtgacaaagcttgttctctactagttgctgccacacccctcagtgccttcctgctcctaacactcccctcctacccctgctcagtgctggggactgtgctcagtcatgtctaaggctgttagtgcagataaaattccaaatcttagagtctgcattcccaagtggttgactctctacaccccaaacaaacgtgtctctctaagaagtctagagaaagtagaaccttttgggaaaggtggacctcagagccatgcttcgatactgacgatttagaaatattcttgttctaaaacaggtgggctgataggaaagtgactaattggcattggccctgaggccaccattatcagctcctctctgcctgtgagtctttctaggagaccattgcctccaactacatggacaagaatgtcctggagctgaacaggtagcagagacagaggctgcagtcatttgactggtctccagtggtaaaatatgtatgtgagcttgaagggattaggcaaggagttcggtgtttgtttttgcaccttgaggatgccagagcttcacgtggctctctgaactaagaattttctgtggggctcatgtagaaatggcaagaaagatggagactaagaaagaaggatgtcagtggaactgcaggaagaagaaaggaagagtgagttctataaagccccaaggagggaaccaaagtagatggctagagacaagcctggagccagaaagaaactgtcccagatgccaagatctgagcccaagcatatgcataacaggcaggatgacagtcagctggcttttgatggcaggcaaccgttctgactggtcagtgttcctgttgttccaattgcaacctccagacttttgaccctaaacctgtggaagctttctgtgggtctcctgaggtgacctctcactgctgggaacagggaaacacagagaaggccatcgctgggattggagttgggaatggaattaagaccaatctaactttgaggcagaatagaatttacttaccttgcgtaatttcaggcaccaggaaagttctccatagcatcttcactcccaaaataccccacatcctagttaagtaagaaggttgaagttgttcattaggtccttcttcattttgcttaagacaataacatttgtaatacactattgaagagctgtaaagagtaaccctttaagtgctagtccttattcatacctcagtatgaatgagcctcatagcctatactaggtatttaagaagagaatgtgacaactgagtggagtgtgtagccaggagccactggaagggaaagatgatggaggtactggatgtcctcaacaacatctaccaagctcactttgtattaatagttttgctctgctggttccaggcagactttccatttccctttgcacttggctgacttgttttaagtcatggaccaggcagagaaagaatgggctgattgtcagaagcacattgcagagacagccggcaagtggaaagagcactgactgcagggttggcggtccctaggcttgcccgtgccaatagctgatgtcatgactgcatctccaggactcagtgtcttcatctgtaaaaggagtgacctgattctgatattctgagattctgtgagtgtgtgtatggcttggggttagggttatggttaggttttgtgttagaatattctgatatcttgcgagtgtgtgtatgggtttagggttagggttagaatattctgatatcttgtgagtgtataggggttatggttatggttagggttaggatttgaatattctgatatcctgtgagttgtgtatatgttaggggtagggttacagttaagattagggttagaatattctgttatcctgcaagtgtgtgtatgagatgcagaaaatgaccaggagtgatctatatgtcccatgaggtaagcttgacccagctggccactctttccatttccttctttccagagagaagtgggctgaaaaggaggagtgtttaaggaaagcgactcaaatgtgcttacatgtgacatttggaaagaatggcctctgaaacctgcagtcctgcccctggccgactgcctcgttttctccctgtggtttcaggctgcccccccacccaccctgggtacctgccaaggcaccttgtgccaacttgggaccctgcttcaacccagggaccgtatgctgcaagcagaggctttgagaccagtgtctacatggtgggggacaagaggttctccacactgcccctagagaggaatttctgcaggagcccctgcaggagacaggcttggatttggagaagttggagaaggctcagcaggcagctgagagccacttccacgactgcccagttgacccagagatgttctctgtggcccggcgaagggactgatgcagcagacttggtaggagctaggagtgcacaggggcaggatttccagatgccatcctgctacctcatttgctttcctcttcgtttagtctgttttatttagaaaccttaccagcaaatgcttttagagtcttattatacatgattgccaggtaaataggaatgttgatctcaaacagagaggtttataatatgctccactcatggcccagggagggagagaaagaattagaccagagaaataaagctgtgcttcttcttgtttcaagggctctgcagggttgcatagagagaagaggggagagccccccatgatctcctagtttaggccatttgtcaccacacaacttctgagcccattcagcacctccatcctcacccctgcgaatactgcagccctaccccatgaaatgagaagaacagaggtttccgcatcaggagacatggcttttcctctttggctctctgacttacttgctctgtgacctttggtgggtcactaacatctcagagcctcagtttcctcatctctgaaatggaaataattgccaggtgcagtggctcacgcctgtaatcccaacactttgagaggctgaggcgggtggatcacctgagatcaagagttcaagaccagcctggtcaacatggtgaaaccccatctctacaaaatacacaaaaattagctggcgttggggctcatgcctgtaatcccagctactcgggaggctgaagcaggagaatctcttgaacccgggaggtggaggttgcagtgagccgagatcttgccactgcactccagcctgggcgacatagcaagactctgtctcaaaaagtaaataaataaataaaagaaaaagaaaagaaagaaagaaatggacataataatacctatccccagggttatcgtaagaccccaaagatataataggaatgcacttagtaaataattatgtgtgtgatgtggtatgtaagagttttggctgactttatatatatgcatgaaatgagtggttctaaagagagctggataagctgtcttctttcttgatccaacacaaaccatctaacccagtctgaggcagggaggaggtacttggggaaagactttttgaaggaagtagcagcacattggtgagatgtaaaggatatttgagggtaagccacgtgaaggaatggggttgaggggtgaagagcaggaattcccacatgctgagacctggagaagaaataacatactatgttaggtgaacttcaagaaaagtgaaagaaccttagatgtaattgtggcactatccctagagggcactactaaggctgtggtagaacaggacagtgctccaagccagcagagaggaccagaggtaactgttgataggcatgggtggtgggcaggtaagtgatcgattcattcaacaaatatttgtggagtactctgtaaagctcagtgctaagctcagcatcagaacctttgcccagggttggtcctcatgctaaacatagttgcaacacgtaagcccttgaccacattctgcctcatgcacctactctgcctctttttctctccgttagttctgacatcggtagtttttaccttaccctttacccattactaaaagaagaaatatgttggctgctatgttagtccattttgcaatgccgtaaaggaatacctgagactgggtaaatttataaagaaaagagctttatttggctcatggttctgcaggctgtacaagcatggcgttaacatctgctcagtttctgttgaggcctcaggaagcttacaatcatggcggaaggcaagggaggagcaggcatttcacacggcgagagagggagcaagagagagaggaggagatgccaggcttctttaaacgatctgctctcttgtgaaagagctcactcgttactgtgaggatggcactaagccattcatgagggatttgctcccacgactcaaacacctactaccaggtcccacctcccacattaaggattacatttcaacatgagatttggaggagacaaatatccaaattatatcagctacatcaagaatgttctctttgtacttaggtacaaaggttgtggcactgtccctagaaggcactactaatgttctgggcacctggtgtgatagaacaggccagtgctccaagcaggcagagagtaccagaggtgactgttggtaggggtgggaggtggacctaatactcatgtgtgtgtgtgtgtgtgtgtgtgtgtattatgtgtgcatatgtgagtgtgtgcacatgtatgtgtggtgattcaggtagtggagagtggctagatctgtcagtggtgtcaccacatgggtgatgaatgaggttgtatcccaggtgctggggtcagatcagaagttggataccaggagaagcttgcagcagatgggaccagaggctgagtgttaactccttccaaggggagctccaagtgtacacaggagtgtgcagccagaaagctgctatgggatgggaaggcataaggcaaagaacaaggcagccaggcacatgtgcagggtttccagggcaggtgccctacgcaagactgggttgcctggtgctccccttgctgcataaagtaggatggaccagcctgggccacccaggacgagggtgtgtgtcctgcgataggttcttctaaggacctggtgttagttatgtgaacattcacattgggagactattggctcctttgatcctcaagtcaccatatacacgtgggcccagtgtgagtaggtattgctattggcctcacgggagagagggtgatactgacatgtacaaggcgtggctagtgacagtgaagagcttacaattcactgaatttattaaaaaacacacagcgtgcttttattaagtccccactgagtaggcatgggactctactacaaggcagaatttgctaattctaatacaaggggatgatgggaagcacagaagagggagggattagttcctgctggggaactggagaagacttcatggaggaagctgcagcgaagatgaatcttaaaggagggtgatggttggaaaggcattcctgctagaggaaacaacactgctaaaagcatggtgctggggtcagatcaggagttggataccagaagaagcttgcagcagatgggactagaggctgagtgttaaccccatccaaggggagtttaggaagatgctgggtgaatgatgtgatgtttcatttggctcatttggctcaagggtgggctccctatgccagagcagaaggagacagtgctaggaaggtagctcaggcgtggctctaggagcccctgcaatcagacttcaccaataagtattcatatatcatttgccaggtactaagaatgtgaggataacaatttttgccctcgctgggcttgcagacagtagtggcagcagtttataggaggtgagagcgcacagaaagaaatgcctaatttgggggagataatggagtctttacaaagaggtaacatgtccacactgactttgaactaacaggaactagcaggttgccaggcaggtggtgagatgaaggtggtggtggactagggcgtcgaaggtgtttcaggtggaagaagccacgtgacaaaggtggggtcacggaaggatgctgagcgtgtttgggaaacctcgatcaggaaacatgtactgagagtctgctatgtgccaagccccattctgcattctgaggccatggagaatgagtcagacagggagggccctgctctcattctagttgggaagggaagggaaggcagacaatgagaaaataaacaaataaagatgaggacatgattttcagaatgggagaagccctaaaagtagaaagaatggcactgtggagagtacctggggcagagggctggagggagggctgagtacaagtgcctgggatagacagacctgggctgggctcacacagccagatggtggtgtgtgagccgggagcccctagggcaagggtgctaagcccagtagtcaccctttcactggaccagagctctccaaaggtggagcagagaacacctctgaaagcagaatctacaggcagacaggagctgatcctgcctgttgcacaccctgtctgcccgccctgccccagagaatccccttattcattttcaagcccttcctttttcccttccagagaagggtcttaggtactcagaccttcaggggaaggtacaggcagtgactggggtgggtggtccattcttggggacaaggcaggtcatcctgctgaatgtgtgtctctgcgatgtgccctttgggaaaaggaggaacaaggacagcaggatggctgcaggcacctgaccaagacctgtttttggattatttcccttgtctttcactctctgggcacaagagggcagccaagtcttgagcttgggggctgcagggccagtggggtgggagggctcttccctcctttgcttgtccccggcctgctcatttgccggcagcctgcactcctgttctcccagatcctgaccactgaatgagggaaccaggaagaggaaggccgcagccagcgcagagtgccctgacctccacccggccatgtattctacatgttgcctcacctccaccacagaagctgaggcccaggaaagccaacccagacctgctggcccagggtcccactagggacgtaggctagcccatatgctgcctggatgacagaccgagggaggggcacactagctggcctctggaggagaattcttccagcctctctctgctgtagtaaaaacctccttaaaacccacgaagctggggcagtaggaccaattgcagcagatggggcacaattagctcactagatccgttcaatggctattaaggccaatccgtgcgttagggcccatgcaagtgggaggaatacaaagatgaatgggattcaggctcttccaaaaagcttaccttctagtggacaagtggccattggagcataatgtggcaagtttagtgagagagagatgttcagagcactggggagtatagaggaggtccattaacctagccctgggggtatggtggagggaggtcaatgaagtcttcctggaattcatgcccaagctgactattaaagataaaagaatttagacaagcaaagggagggagggcttttcaggcaaagggtcagacagtgtgagcaagaaatcaaagtcaagacacaacatgagagggattagaagttccagtgtgtttgagaaagttccagtttggcactgtttactgttgcaaccattttaatagatacacactccatgagctggctcttgtctccctcttcagccagttgaaagggcttcttgaacaggtttgcacatttccacaggggctttggagaactgagtttttctaggctagggactacaggattaggggaaattggatgccaaaaaagagaattagaggcagggaaattagctttctggcaggcctttttctctgggggaatgtcttcttcactgtgcctgaacaagtgactcctgtgcgaactagagactgatgaggaaattgacaaaggaaggtaaagtgactaaagacttctgtgcctgaaatgaagtacactcaagaggaatccagaggttaagatcataaaccccagcctgggcaatgtagtgagatctccactctactagaaattaaaaacgccaggcatggtggcatgcacctgaagtcccagctactcaggagcctgagatgggaggatcgcttgagcccaggaggtcaaggctgcaatgagttgtgattgcaccactgcactccagcctgggccacagagtgagaccctgtctcaacaaacgaacaaacaaataccccaaaattgtaaacaaatacaaaaacaataaaaaaattagattcctgcttgataattagattcctgccaaagtgatcaggtggacagactggaagaaatatttacagtgaataaaaccaacaggggacagatattttctagaatatacaaggaactactgcaaatcaacaataggaaaaagtctaaagacaaaaaggagcaagaatatgaccaggaaatgtatagaagaggaaactccaaaagctagcaagcattttgtgacagagattgtctaactcctccccaatttgcatgtccttttttcagcacacatccaggctgtatttcacagcccccttgcctcaggccatgtgatggaattctgacccaaagaatattaacagattaatgtatggcactacttaggctgtgtcctcaaaaccctcgcattccaatctcctccgagagctctctcccctcctctgagggctagatgaagagaatccaatggaaggctctggggccttagagccacacaatggaagaagtctgagtgccgaaaggaccactgggggagtacccttcccttgcctgccatcatggtctgtgatgtgaaaacaaacatttattttgttaagccactgaggtttgaggtctgttacatcacttagcttatctcactgatactgatatgcatgtttagaagtgctcaaactcatcagagaaagtgtacaacttcacttattctcattagactagcaaaaattagtatagcagatcattctaaaaattgatggtagggatgggagtgggtgtgccgatacagggaacctcatgcactgctgatgggggtgtagactggtatagccttgctgggggcaatctggtggttcttactcaaattaaatatgtggataccttaggattcaccagttctactactgggaatgccccccataggaattctcacacaggtctctatatgaaggagacatggatgtctctggaatcattgtgttggggagttggaaacaatctgggtatctgctcctgggggtgtggataaataaatgaggggtgcaaatcatgaagaacgatgcagtggcatgaagcagtgggtcacatacacacgtaatgtgatagggctttaatgcatagtgaaaatgatgcaaatacaaatatatgcatacacagcagcagcacacattttaccaaaatgcacataaagaatagacatcaaacaccttgggatggttgtctatgaaagggaaatgagagtggaaaataaaaggggaggaagaaaatataatcatatgagtgaatttccttccactgtacagattctcagttcattccgaaagctttttgacaagagattgaagactgacaatcacagctgttttacttccgaggcttagttttctttacagaatcttatttccatgaggttattacgtctatcctcaatttttaaaaaagcttatattctgcctttgttgcttttttttcaatttaataagcattttcttttaaccacctgacctcatgctttttcaaaaactaaactaaacaaaacaataaaggaagaagagaattacaagatccaatcttagtcctaacatcttttaccctgaacataaaacgatttgctttttacataggtaataaacagagggagaagagtgaacttcataatcttgatatttgtatagcattagtagtgataggacagatgtcctaaataggtatcgtaccgttacagtaattagtaggaagcaaagaaaaatcaatggaacagagcagatagccctaaatcaggtcccagtaagttttgtaagtaagcatgtgacaaaggagcaacaagccgaggaggaaaggaaacaaagcaaaatagtgcagatagcacagaagccactcaggttttcagcttttgccagcaggatattagggaggctccaccctgatttccagcctctctgtgccaggcagatgtggatctccagcaagctggccacctgccacagcaacactgctggtacctggctctgccaaaggccctatcaccctggatgccatctgcctgcaatttacaaactgtataggaggggtaggtcaggcctggacacctcgtggctggactatggaaactggtcctggctgaggctcaggaattgctttcctttccaagtagtcctcaaccaccttcaccccaacatggttttttttgtttgtttgtttttgttttttgttgctgttgtttttcttgagatggagtcttgtccaggctggagtgcagtggtgctatcttggctcactgcaacctccgcctcctgggttcaagcaattctcctgcctcagcctcccaagtagctgggactacaggcatgtgccaccacacccgactgatttttgtatttttagtagagacggggtttcaccgtgttagccaggatggtctcgatctcctgaccttgtgatatgcccaccttggcctcccaaagtgctgagatgacaggcgtgagccactgcacccggccatcttttttttttttttttttttttttgagcagagtattgctctgtcacccaggctggggtgcagtggtgtagtctctgctaactgcaacctccaccttctgggttcaagtgattctcctgcctcagcctcccaagtagctgggattacaggtgcataccaccatgacgggctaatttttgtattttcagtagagacagtttcatcatgttggcgaggctggtcttgaactcctgatccgcccacctcaacctccaaaagtgctgggattacaggtgtgagcgactgtgcctggccccaacatgtcttttctcccatcacgcttcttcttcctttagccaagaagcttgccaccttacacccttcctctccctccctccttggcatccttctcaaagctttctgtaacctgaacaatggatttagaagccagtgaaaatatttgagacgctggagtattgataaccagataattagataactagagtttctggctgaatcagtgtctttgtggctatggattttcaacccaaagctctacgagagggcacactgtgagaaccaggcagaaggcagccctctgcgtacatacagtgacgcccttatggtctgcagcctcatttttaccccaaaggtagccatgacttaagagtgacaaaagagagaagctgacaggttgtggactccaagaaagggttctctacctccctgcaattaaggctcatattaatcagctctggactcaccatatgcatccactaaaatctagagcaggccctgcgggagcacatcaaatttgatgggttatagttttggtgataattttgtttatttgttattaattaccaagcacatgaaatgctcccaaattactgatgcctcttactccaggagttgcttaatttggctctgccttggaattctttcctggcgactcacgcctgccacaaggtatggtttgagcagagaaagaggaagaggctcagtagttgcttctctgcaacatatgtgaataccccacccacaattgcagcaggaagaggtgaagggagcaggctcctaattgctgtggcgtacccaggggtacatttctttcttggagataagcagaaggcaaggagtgtcaaatgagagatcactgcctacagaagtctgtgtcatctctgaagcatcctggggccctctgatctacagtaggccttgatgtcatctgaggcacagaaggacttcttccagcattggaaagaaaagcttggaaggaaagcttcagctgcagtttctgtaatgttctcctccatccttgccccatttttgcagagatcgttgtttatcctttagtaccattgagtaccatttagccccactgggtaaaattgagtgaaaaagaaacactaggtcctgcctcagagaggaaacttgggaagaccaatattatcaagtagacttgatctctaaatttgtgcttgtttcgagggactctgcgtctggatatgcaggatgttttttaaattgtgagatgcatctacagaaaagttcatagaacatttacatagagcataaaggttaatataaaatgcatgagcactggttagcattgcaggatttttgaagcaccctcttccccctgtgttctgtaacctgagcacaactttgtcctccccagtcacccacaggcaaccactatcctggcatctaatgaaattatctcattgtttttctttagttttcccacccacttgtgcatcactaaataataaaatttacttttgtttgttttggacttttggactttatagattgaataaaaaggaagtctttcttgggactttcttctttcgccctacatcatttggagaatcatccatgctgatgcttgtagttctaattggttcattttcattgctgtacactccaatttattctaccattgttggacttttaggttgtttctagttgggggctgttccaaacaatgctgctaagaacattcatgtttatgtgccagatttttctctaggtgtgtacctggactgtaattactgggcatagggtacgcagcaactcaactctaccagtcaatgccagactgttttccataacgctgcaccaagttacatgcctgctagaaatacacaaggacatctattggtcaaggcctttggtgctggtcagatgtgatttttgccagtttgatggctgcataattgtatctcattgtggtttaatttgcattccactgatgagattaaggatcttttcctaggtttattggtcacttggatttcctttctcagaaagggtctgttcaagttttttgttttctttattttcatattgattcacagaagttctttgtaaattctgttgtcagaattcataaattcttgcttgtcagtttcatgtgttgtagtatcttttccctctctgtagagtgtctcttcactctcttaaagtgtctttggtcgaacagacattcttaattgtaatatactagcatttacaaatcttttattcatgattcatggcttttgtgtctggtttaagaaatcgttatctgcacccaaggtcataaagatattcttctacattaccttctaaatctttagagttttgcccttcatatttagttttttaatctgcctgaattgttttttgtgcataatgtgaggtggggttctaattccttattcctccctacagatacccaattatcttagcactatttattgaaaggtctatctttttccccactgatctaagctatcacctcaatcatatatcaactgttcataaaagtacaggtctgtttatgggctctctactctgttctattggtctatttgtcaatcctactaccaatactactctgtcttaattactacagctttataataagtatttatatctggtagagcaagtcctcccaccttatttttcttctttaagagtaactactcttggcccttggcactgtcatataaattttagagccagcttgtcaagtttcaccaaaaaactattgggattttaattgggattttactgagtctataaatcaatttggagacaaatgacatcttcaccatgtggagtccccccatccatgaagtggcgtatttctccatttatttaggtcttctttaatgtctttcaataaaattttattattttctccattaatgtcttatacatagtttgctggatttattcttaggtacttcatatttttcagtgccattgtgggcaatgtctgttttaaatttcattgtatagctgttgctgattagaaatgaatttaatttttatattgatttcatatccagatattttgctaaactgttatattgtaataatttacttgtagattatttttcattctctctctatatcatcatgttatctgctaatagtaacagttttttctttttcctcctcaatacttacatttttaacctttttttaacctgccgtactgtccaggatgttgaatgaaattggtatttgttaacatttttgtctctgttcaacttgaaaggaaagcttgtaaatgggtcatcgggaagagtgatgtttgttgaggtttttgtaggtaatctttatctgattaaggaagtcttattctatttccagtttggcaaggattgtttttgttgtgaatggatatagaatttaagctttttcttttttttttttctgcatctgttgaatggatcagaagatatttttcctttaacatgtacatgtgatgatttgtattaattgaattttgaatgttaaatcactttgtattcctgggaaacactcaccttggccattgtatagctgctagaaaattaggctcttgagttagattgcctgggtctaaaacttggctataccactgtctagcagcgtgacctgggcaatttactttacatttttgtgccttgattttctcatatgctgaaatggggataataatagcccttaactcacaaaacttctgtaaattttagtaatatgtccaaaatgcttaaaccagttcctgaaaaatagtaagcaccatatacatatttgctactttattgaccagacaataacttgtttaggatttttatactcatgctcatgggtgatttttagcttgtaatttttttcttctcataagtaaccttgatattaggctttagctagacttataaagttagttgaggggtattttctctttttgtattctctgagtttgtgtaagattagaattattgattacttgaatatgtggtagaattcactggtaaagccatctgctctgaagattttgtatgaaactaattttccatttaaattctttaatggttataaggcaattcagattttatatgtgttatatatttatttggaaacctctaaatttaatgtttcaatgtataggcataaagttatttgtaatatcttgttattatcttttaaatgtctgcagcatctgccatgaggttcccctttttattcctgacactgggcatatgagccttctctcttttttgccttgatcattctagctagaaatttgttaattgtatttatcttttcagagaaccaacttttggacctgttgattctcccattaattcttagcttttgtgctctgcaggattctcttctttctacttttgtctattttgctgctcctttcttaacttcctcagctcattaactttcagtttttcttctttactagtatgcatatttgaggactagagttccctttaaatcctgccttagctgcaactcatgagtttttatatgtagtatttttattactactcagttagaaatattttataatttccattatgatttcttctttgacccataggttgtttgtttctttatttccaaacaaataagggtgttttagttatcttttattttttacttttagcttaaatgcattggtcaaatagcaagccctatatcatttcagccctttgaaatatgttgaggcttgcttaatgggctagtatgtaagaatttattaagggcctatgtattcttgaaacaaatgtgtgtcttagaccatttgggatgctctaacaaaatgccataaacgaggtggcttgtaaacaacagagatttgattctcatagttctggaggctgggaagtacaagattgaggcaccagcagattcagtgtctggtgagggcctgtttccttcttcgtagatagcactttctcaccgtgtcctcatgtggtgaaagggtgaatgagctctctcgggcctatttcataagggcactgatcccattcatgaggcctctaccttcatgacctaccacctcccaaaagaccccacctcctaatactgctatgttgagcgttaggattttaacatatgaatttgatggggaacaaacattcaaatcatagcagtgggtgtttgggtgcattatgttgtatatgtccattaaatcaagttggttaatcctgctgttcatgtaatacatattttaactgatgcttttgtctgtttttaatcctcaaccaaatatcttcttattttacgctttgtatttgtccttaaagagctgtttctttttctctccattcttatcttctttcgaattgatagtattttgtcattctagttcttctgctctactaatttggaagttaatacactttgattatattattttgtggtgtctaaaattggagtgtaagtattttattttggatcccactaagcaccagtgagggaatggggaagtgagacagggaaagcaagcaatctgatgcaggggggattaatgtggaaaactagggctcagccactttaattccatctttcttatttttaaccacacaaggcattattttttatgtctattagaatcacccacatgttggccttctcagttaattcttcattccttcttgcatttcagaccttccactggggttcacattccttctgtctgaaattcatcatttagaacttcctttagagaggacgtactagtggcaagcttttagttttgcccgctactttctctattttgtcccaattcttcaaagactttttctggttgtagaattctaagttgacaattgctttgttttagcacatttacaatatcattctcttgtcttctagcaagcttcctagtcctgcaaagtcagctgttagtgtaactatcacttgtgttttttctctagatgtttttaacatcttttgtagtctttggtgttgcagttttttatcagtaaaatgtctaggagggaattgcttttcaaatattttgcttgtgattcactggacttctaaacatagtccttcctagactgttacaatgattaaatgagttaatatgtgtaaagcacatatagaacagtacttgcacaaataagtgctcaataaatactacctattttggattctgtgtattgatgtctgtgtcagttcttaatacattccttcatagctccaacccacccttctgtactctgtggtgtgagagctagtctatgtctcttagctttctcttttattttttccatttccctttctccctctgctacattttgcacaatttcttttagcctatcctccaattgcaaattggacagatttacaaattggattttgcacacacaactttcctttgccagtgtctctatgttggttccaccagtgagagattctggagggacatgcaaggcttgaggaggaggaagggacttaccatgtcctgtttttttgtttgtttggtttttgttttgttttgtttctgaggtctggttgtgggcttatgatcctgtgagcaatcttggcgatggttgtctgcatgcagctgttggctcaatgcacggctcatctctgcggtggcattccttgggttcctcaggtgtccagcattcccgcagcagctgtgctttctcatcagagctttttgatgcttggttctgtggactcgtcctctaagtttctaagtttctcctggtttccttgttctgtcagcccagtgagtttctgcatttgccacctctgttacactccagagtccacctttactctcttagccattaaccactttttacttagtcaattctttatactaaattttatattaataatttctgactcaagtttaaggtgggtttctgtctcctgactggattctgatacagtatttatcatcagttctggaaaattctctgtctttatctgtttaaatattattctagtccatttgatctctcttatctctcagaaactccagtctgacatagagcagatctttctcctctatgctcgatgtctcttagctttctctttcactttttctatttctcttttgccctctgttacattttggataatttttttttagcatatcttcctatttacaaatctattcaattacatataacattctgtcaaactcctctactgctaatatatacaaggtattttatatctatatatcagcatgtttagctttttagcattttaggctttcaggaaaagggtgtatcttgagagttagccagacatattactggaacctgatatgtcaatatttggaatcttttcttccagcaaacataagcaatgatggtgttcacacttttggtttgtatcgtattttctagcaatggatttggtgtagcacctctggagtctagagtgaggtattttctaggagaatgccccactacattgattttttgtgcattaagtattgtagcattattttctcatgaggtcatagcctgggacgatgaatcaaattctttaccagcagaccgtgtgggaagaacagccaccagtgaaccaaatacccagacaatatggaaataacatgtttttctttcttcttgccttccttctcaccctttgtttcttcccttatatgtgcatttatttacttataacaaacatttatttaagggtgggtagagggtcattacaaggaaacagattcctatctataataaaaaatctgattctgactgtaaatcttggaaatttctggagagggtagaaaaaaattaatgatggagtgaggggaaatgggtacaatatcaaggccacatatatgctatatcaccactatgtctaaaattccctggtaaattgacccatgagtgggaatgaggcacatttcccaaggtaaggattcaatgtaaggaaagctatcattgaaattcctcaatacctcagattgaatagtaaaatacgtactgttaaggccattttactcaccaaaactgaggcttaagagtctcaaaagttagtttttccagttgtccattttacaaattgctagtagcaaaccaggataacaacttacatctttggactttctggatgtctcctgctgtgctccattactagggcagtcagcagaagcagggagtgtctgtgctccagcagcagtgcctggggtcagtccacaaagacaccctgcttccattctacatctcctaggtctgtgaattgacatttgaagatacaacagttgcaataatctgagacaatttgcctgccacatgcaacttcttgcaatgggcaatcttaataccacacaggtttcctttactccctttccccaccccaacacacttggtgagcaggatcaatgactgatctaagttcaagggcagaggctaccatttggaattgccagaatagagctgtgtgcactccaaccaacagtgtacaagggtccccttttctccatatccttgccagcatttgttattgtctgtcttttggataaaagccattttaactgaggtgagatcatatctcatagttttgatttgcatttctcaactacgagatatgatctcacctcagttaaaatggcttttatccaaaaggcagacaataacaaatgctggcaaggatatggagaaaaggggacccttgtacactgttggaatgtaaattagtacaaccactatggagaacggtttggatgttcctcaaaaaattaaaaatagagctaccatatgacacagcaatcctattgccaggtatatacccaaaggaaaggaaatcagtatatccaagagctatcagcactcccatgtttattgtagcactgttcacaatagccaagatttggaagtactctaagtgtccattagcagatgaatggataaagacaatgtggtaatacacataatggagtactattcagtcataaagaagaattagatcctgtcatttgcaataacatggatggaactggaggtcataatgttgagtgaaataaaccaggcacagaaagacaaactttgcatgttctcacttatttatgggagctaaaaactaaaataactgaactcacagagatagagagtagaaggatggttacgagaggatgggaagggtagcgaggtgggtaggggggatgtggggatcattaatgggtataaaaaatagttagaggccaggcgcagtggctcacgcctgtaatcccagcactttgggaggccgaggtaggcggaacacctgaggagttcaagaccagcctggccaatatgatgaaaccccgtctctactaaaaatacaaaaattagctgggcgtgatggtgtgcacctgtagtcccagctgcttgggaggctgaggcaggagaatcgctggaacccaagaggtgaaggttgcagtgagctgagatcgcgtcactgcactccagcctgggtgacagagtgagactccacatcaaaaaaaaaaaaaaaaagttagaaagattgaataagacctaatatttgctagcacaacagggtgaatatagtaaaaaataatttatttgtaccttcaaaaataactagacaagtataattgggttgtttgtaacacacaaaaaataagtacttgaagtggtggataccccatttaccctgatgtgattattttgtattgcaggcctctatcagaatatctcatgtaacccataaatatatacacctactctgtacccacaaaaagtttttaaaaagaaaaataaatagcaaccgaaaaaaaaagagagggagaaaagaaaaaagaaaaaaaaatcaagtgcctggctgggtagaataaattctaaggccacaatgttactgaccatgggttttttggctctcagtgtatagaaattgacacaaggccaatagtcttcccaaacatgctttactggaacttacgccctggcataagggccacaacaaaagagagagcgaattctctggcttgctgactccttggaaaaaaccggtagggatttttttattaggcaaagcacaggaattgacgtcagaggcaggatgtgctgctgggcaaagcatacgagaagtggggtatgcaggtcagcattacttggttgcaatggttatcttgaggaatgggccaactggtggtctggccagtggcaacaaggctgtaaatcaattattcagcattccttcccaaggtgggacacccggcaacattgtttatctcctaaggccagttcctggaattaagtgaaaggatgactaatggacatgttgtcagtgaggtagtggtgtgggttttgtgaccagtgggaatgcacgaaagaatgctttagcggggagtgagctgaagccaagccccatccctactctgtctcaaagtgagttcagaaaaggggatttaaagaattctttttttttttttttttttttttgagacagagtcttgctctgtcgcccaggctggagtgcagtggcgccatcttggctcactgcaagctccgccccccgggttcatgccattctcctgcctcagcctcccaagtagctgggactgcaggtgcctaccaccaagcccagctaattttttgtattttttttttagtagagacggggtttcaccatgttagccaggatggtctcgatctcctgacctcgtgatctgcccgccttagcctcccaaagtgctgggattacaggcatgagcctccgcccccggccttaaataattcttaaaggaagtaaagttaactttgaaagaactatcaggatttggattgactgaaaggagtggggaagcttagggaggaggtgcttgccagacactgggtcatggcagtggtcggtgaagctgcagttgcctagggcagggatggagagagagtctgggcatgaggagagggtctcgggatgtttggctggactagattttacagaaagccttatccaggcttttaaaattactctttccagacttcatctgagactccttcttcagccaacattccttagccctgaatacatttcctatcctcatctttcccttcttttttttcctttcttttacatgtttaaatttaaaccattcttcgtgaccccttttcttgggagattcatggcaagaacgagaagaatgatggtgcttgttaggggatgtcctgtctctctgaactttggggtcctatgcattaaataattttcctgacgagctcaagtgctccctctggtctacaatccctggcggctggccttcatcccttgggcaagcattgcatacagctcatggccctccctctaccataccctccacccccgttcgcctaagctcccttctccgggaatttcatcatttcctagaacagccagaacatttgtggtctatttctctgttagtgtttaaccaaccatctgttctaaaagaagggctgaactgatggaaggaatgctgttagcctgagactcaggaagacaacttctgcagggtcactccctggcttctggaggaaagagaaggagggcagtgctccagtggtacagaagtgagacataatggaatcaggcttcacctccaaggacacctatctaagccattttaaccctcgggattacctagaaaaatattacaagtttggttctaggcactctgcagaaagccagattcttaagcaccttctgaaaaatcttttcaagatattctgcctaggtaagtctgttgtctgcatgtctccccactaatgtgagtcatatagatggagtctcagggcacgactgggttttgtgtctctcgttgttgcttcacagcccttttggcatcacccatttatttaactaggataaaaacgaatattggtatagcgattccacagtttacaaagtgcttttgtatccactgtctcacttgatcaagcaaaaggaaaccagaggaccggagtgctgtcctgagtctaccttgatttgctaggcgacttgagggagacttttagcctcaaagggccacttaagtggaaattctaaaacagtacctattctgatcctaactcaagggaatgctgtgaatatgcatgagataaagacctcccaatatatgaagaactgggtgatttttggagaaagacattatatactcaatttcttttttaattaactttccttgaaagtattgcttaatagtttttacattctccatgtaacagactttctggatctggtgttcagtctgtacaccagatgtagatcttttttaccttctcctagaccttaaaattcctggcaacatgcctccaccctggattggggaataaaaaatgaaaagttttttttttttctttttgactttaaattttattaaagtttgaggtttttcaaactgatgtgctttatttaaaattcaagtgagacatttttagtctttttgatatttatattttctttgtcactatgatgtaaattacagggatttggggaaaatatgggattttttttttttttttggagatatagatctcactctgttgcctaggctggatggagtgcagggatgtgatcacagctcatcatagtctcgaactcctggactcaagggatccttctgcctcagcctctccaataactaggtcttcaggcacacgccaccatgcctagctaattttaaaatttttttgtagagatgaggtctcactatgttgtccaggctggtctcatcctccaggcctcaagtgatcctcctgccttggccttccagagtattgggactgtaggcatgagccactgtgcctggcccagaaaagatgttttaaaaaaacattttgagggaaaagttgtgaacagtagtggtctgtctttgaggatcgccagcacagtcccagggaagacaatgtaaatttgactctgcccactgccatgagatgcctgatctctcctctttgttcctcccactaatccagacggtgtgaagggagacctgctgattgacatcggctctggccccactatctatcagctcctctctgcttgtgaatcctttaaggagatcgtcgtcactgactactcagaccagaacctgcaggagctggagaagtggctgaagaaagagccagaggcctttgactggtccccagtggtgacctatgtgtgtgatcttgaagggaacaggtagagaaactggtgtctacttcttggcttttgaaggtacctgagtgatggttggcaaaagcaacagacagatagggaccaaagagaaatccaaatggagaatgagtggtaacgagagagcgagagcaagagagatgagataggcccatgtgtgtgcatgttagtaaatttgtgtatgtgcacgtgcatgtgtgcaccagagtaatggaagacacagggagagggttgaagaaatggatactgagcaaagaggagtaaacccccaaattttccaggcctttggggacaagagcagtgtgcagtcaagtaccttgggacctaggtttaggacagctgcaagtaaaaggctaacccagcttctcaccagcagcttttggatgtcagtgcttgtcccttgcctcactgccatgctgctgtagccatccaagcctatagaacttggctgtgagtgtggctaatgctgacatcaccagatacaaccaaaatctgactaggtttttaaactgaggtaagaaacataaaggaattacttgaaaagaatttattaatcaccatccatgaaagtagactttgtatacttacaactaatggtcaagatcttacactaccacatctacatgtaaatttatgcaaatgaatctcatttgttcatgtaaattttaatttcttccaacacgagaaattggcaatagcctattagccagaggtagccacgcctgcaattcactgtctttctcatatccttatgcacttccatcttctgctgattgtctgacaatatccagtctgttccccaactgaccattcactcctggagcaacatttctctgctgctatgcatattgctgagaccccacagacttctttgcaagctgcataaaaagatgaatgtttgcaattatagtatctgcaaataaaaataggttttgttcttctattccaactttatgctttttatttatttttctgcccttattatgttggcaaaaactttcaatacaatattgaatagaaatgatgacagcagacctctgtgccttattccatattctaggataaaaaatgttcaatgatttatcattaagtatattaactattggtttttcatagatattatttatcagactaagttctgcattcctagcttttttgaaattttaatcaaatgttgaattttgtcaaaatttgtttgcatttattaagatggtcttatgattttcctcctgtattctgaaaatgtgaattacattggaaaattttgaatgttacaccaaagtggcataaactacttggtcatgaagtataattgagctataattttcttctagtgtgcttcacaaattttgatatcagcatgatgctggctggagtcataaaatgagttgggagtgatatcccctcttctattttctgaaagagtttgagtattattagtataatttccttcttaaatgattgatagcatttaccagcgaagccaggtgaatctgaaatttttgtgcgagagaagactttattaaaaacagtatttctttaatggttacttggattttccgtttgttcttttgtctgttttggtaagtggtacttttcaagaagtttgtcctttttatcttggttgtcaactttattggcatttttttttttttacaatatccttttaataccttattatgtctgtaggatctgtagtgatctctcctctttcattcttgatattggtaatttgtcttgttttctttctgttgtcttgatcaaccttgctacagattgatcattttattaatcttttccaaaaaccaacttttggctatgttgatttttctctattgtctgtccattttctatttcattgctttctgctcttatttttgatcactttctttcttctagttattttaattttaattcttttctagtttactttatttttttctagctttctaaaatgtcttgtttttaattcttcttttagcttcttaagttggaaacttatatcatttatttcacatatctctttttctaatgtaggcatttaatgctgcaaatttcctttagcactgttttaactgcatcccatgattcttgtatgtggtatttttattattttcaaattcagcatattgtctcatttcctttgtaatttcttttttgaccatgaattatttagaattatgttgcttaatttccaaagtattgggatttttctagctatcttattgttattgctttcaaattaaattttgttgtagtcagagatttattttgtggctctgcatatggtctatctcagtaaacgttctatgtgctttctacattgaaaagagtgtatattgttcagttgtagatatagtttctataaatatcaattaagtcaggcaggttgatagtatcattcaaattttctacatccttactgacgttttgtttactttctctgtcaattactgagagtgttaatgtctcaaactatgattgttgatttatcctttgctccctatagttctgtcaacatttgctatatgcattttgacacttgtttttagctctgttatatacatttttaggattgttatgtcttcttgatgaactgaccactttaccattgtgaaatatctccctttatttccagcaatgtatttgtcttgaagtctactttttctgatgttaatatagctacatcacccttcctatgcttgctgttttgcatggtgtggtgggcagcctctaagatggcccccaataatccttgtgtcagtattttcacctttgtgtaatccccttccctagaatatccactggatttagtgattcagtactgacaagtttggtagaatgcagcatagtgatgggatatcaattgtgatattaaattaaaaggactacagcaccactacacacctattagatctaggccagaatctggaagactgacaacaccaaatgctgatgaggctgtggggaaagaggaactcttatttattgttcgtgggaattaaaaatggtgtagccattttggaagacaattcgactattccttgcaaaactattcaatctagcagttgcactccttggtatgtaacccagaaagctgcatgtattacactcctcagtatgtaacccaaaaagctgtggtatgtctacacaaaaagctgcacacagatgtttatagtagctatattcataattgccaaaaattggaagcaaccaagatgtctttcagtaagcgaatgaataaataaactgtggtacatttagacaatggaataatatccagtgctaaaaagaaatgagctatcaagccacgaaaagacatggaggaaatgtaaatacaattactaattgaaagaagccaatcttaaaaggctacatgtatgattccaactatatgacattctggaaaatgcaaaactagggaagaagtaaagaagataagtggttgctaggggtcggggagggagagataaataggtggagtatagaggattttttagagcagtgagactactctgtacagtactataatggtggacacatgtcattatatatttgtccaaatccatggaatgtacaataccaagagtgaatcttaacgtagattacagactttgggtgataatggtatgccaatgtaggccttctgcttgattttgcggtgaacctaatattgctgtaaaaaacaaaatcaatttttaaaaaatgacagctttttattgggtattctgtctctatctcactctcttgtcctggggagtgagcttggaaccaaatttcccccagttgaaccagaaaaaacagagaaataagtgtttgtcatttttagctgctaaattttggggataatttatcctgcagttacatataactaatatacatgatatatctacatatctttttctacccttctgttttcagattatgttttctctttttaatccagactgacaatttctgcctctaactggattgtttagtccatttacatttaatgtaattactaatattacagggttgaatttaaatctaccatcttggtatatgatttctatctgtcccatctgattgttgttcacctgtgtctttcttcctgttttcccttggtgaatgcagtaatttttagtattccatttagtataagtgtacatatttttagtatttattttttatctcccctgttaacctcttctgtgtcttgtgtgagtttgtgtggtttttctaggaattgcaatatgcatccttgacatatctattgtctcatgaaggatgtaagatattccaaaagtgtaatttccttaaccgactttcctggcccttatgttcttgtcatgtattttatttctatgtataacactataatacatatattgttattagttttgctttagttagtagtgattttatttatttttattgtcttatttttaattttgatttttaaaataaaatttaccatctttactatgtttaagtgttagttgaatagtgttaagtatagtcacataagtcagtatacagttttaaacaatgtatataacaatatatattaaacataggaattttggactgaatgtttttatccctccctcccaatttctgtgttgaaatcctaacccccttatgatggtattaagaggtcggggctttgaaaggtcattaggtcatggaggtggagacttcatgaatgggattagtgcccttataaaaggaaccccatagagctctctagctctccttctgccatataaaggtacaatgagaagtcagctgtctgtggcccagaagagtcctcatcagaccctgaccaggctggcatcctaatctcagacttccagcctttagaattgtaggaaataaatttctgttgtttatgagccacccagtctatggtattctgttacaggagcccaaactaactaaggctatattatgcatatatttaagatcttttatatttacccacatatctttcttctctagtgtttttcattcctttcccaagatctgttcttctgtttggcatcattttccttcacctgaagaacttattttagtattagttataatgcagttctgctggagacaaattctcttaacttatcaagtcgggtaaaaagttagtaattgttttcctccctgctaacttgaggaatttaacaatttttgataaccaaagtcccctggcatctctcttaccagtatttattattgaaatctgagattttaaagttcaaatattgtaatttaaagtattatttttatattttctttcaagatcagtttggacatttgcttttggtttgtaatcaaatttagaattatttggacatatttggtgctcattttatacaatttttctagatattgagtctttaattttggttcatctgtcaactgaatagatcttcaaatatttatttcaagaggaacatacagtgacgtgttttctaagtccatgcatatatgagaatgtattttgtcactcttacacatgaacaaaatcataaaattgtttaaatattgccccactttttttctgacatgtagtaagaagttgagagaggctattctattttttttagacagggtcttgctctgtcacccacactggggtgcagtggtgagatctcactgtagccttgacctcctgggctcaggtgatttcccaccttagcctcctgagtagctgggactacaggtccacactgccatagctggctaattttttgtagagatgggagttttgctctgttgcccaggccggtgagagcctattttcatatgcattttaacctgtatacccctgacttagaattttatattggctatagccttcaaagtggggctatattcttcaatataaaaataatttcatacaccttttttttctgttgactatgtgattctacagaatgaaattgatattaactagaaacaattgcagctatgacaatttggacaatatctaaagttatttagtaaataaggaaattcccagggtttgtagaatctcagggaaactttgtaataagtaaataaatcttcagtcactgttagacaacacaccttgccaaagtccaaatcatctgtcaagaaggcctttgaaactttgttctcactttctgtatccaccaccggcctttccatctcattcaaaaataaacccttacaatctagcaggatagtaaaagcattacttatctcacacctgaaatgtcagcttggaacaactagctcttgagacactgtcccctcccaatcactctgttggacattgcatttttggcagtaaatttctgcattcttatccttatccttgtgctagatcctgtggctttaattattttaagaatgataatgatcctatgcaactcatgtctttcctgcatcttcaagtagctttatcaacctacaacctatttccttcaagatgatttcttctttatctgaagttttttcttgtgctaaaggctgccaaagacgtatgtactgtctcctgttcttctacctctgcatttaaataccactcattttaaattagctggccatagtggtgcacacccgtattcccagctactggggaggctgaggagagaggatcacttgagcttgggagatcgaggctgcagtgagctgtggtcacattccagactggctggcagagtgacactctgtctcaaaaataataaaaaataataataaaaataaataaccctcatttttacaactatccaaaaaagttttaagaaagtcaaacactaagatacaattactcaagcttatacaatgaacagaggaaaatgagctctttccttaagaaattgtagaagctgcattacttaacctatggttcctggaacttggaatgcatagcttaggcttgtggtccctggactagtagtttgacaacacgtgggagcttttagaaatgcaggctgtcaggccccactagctacctacagaatcagaaccttcactgtaagatctgctaagggtggtatgcacattacagtagaagaagcactggtgtctggagcagggcttccctctaggtgtgccagggcacacacacaggtgggtgggaatcagttgcaggcatgctgtccaagctgttttccttggccctcttgacagcaggtggggcatggaccacctcctggttgcctctgtagagagtggctcctccttttttttttttaattttttattatactttaagttctagggtacatgtgcacaacgtgcaggtttgttacttatgtatacatgtgccatgttggtgtgctgcacccattaactcgtcatttacattaggtatatctcctaatgctatccatgccccctccccccaccccacgacaggccccggtgtgtgatgttccccaccctgtatccaagtgttctcattgttcaattcccacctatgagtgagaacgtgtggtgtttggttttctgtccttgagatagtttgctcagaatgatggtttccagcttcatccatgtccctacaaaggacatgaactcatcattttttatggctgcatagtattccatggtgtatatgtgccacattttcttaatccagtctatcattgttggacatttgggttggttccaagtctttgctattgtgaatagtgccacaataaacatatgtgtgcatgtgtctttatagcagcatgatttataatcctttgggtatatacccagtaatgggatggctgggtcaaatggtatttctagttctagatccctgaggaatcaccacactgacttccacaatggttgaactagtttacagtcccaccaacaatgtaaaagtgttcctatttctccacatcctctccagcacctgttgtttcctgactttttaatgatcaccattctaagtggtgtgagatggtgtctcattgtggttttgatttgcatttctctgatgaccagtgatgatgagcattttttcatgtgtctgttggctgcataaatgtcttcttttgagaagtgtctgttcatatcctttgcccactttttgatggggttgtttgattttttcttgtaaatttgtttaagttctttgtagattctggatattagccctttgtcagatgggtagattgtaaaatttctctcccattctgtaggttgcctgttcactctgatgctagtttcttttgctggcagaagctctttaatttaattagatctcatttgttaattttggcttttgttgctattgcttttggtgttttagacatgaagtccttgcccatgcctatggcctgaatggtattccctaggttttcttctagggtttttatggttttagatctaacatttaagtctttaatccatcttgaattaatttttgcataaggtgtaaggaagggatccagtttcaactttctacatatggctagccagttttcccagcaccatttattaaatagggaatcctttccctatttcttgtttttgtcaggtttgtcaaagatgagatggttgtagatgtgtggtattatttctgagggctctgttctgttccattgttctacatttctgttttggtaccagtaccatgctgttttggttactgtagccttgtagtacagtttgaagtcaggtagtgtgctcctcttaacctcagcatacctgacagaagaaagcttaggcccctgtcgaggtggcagttctctgaggtaaatgctctctgtgcaaagacctccatttctatttaaaaagatgtttgtatgttgtccaaaaatagacacagttgtgccaaatgtgttccacaaactagtgaaccacttctattccaaagcatctctggactttcacagcttgcaaaaggatattgataagctttttcaaaaccaggatcttgatgatcatgatgattgtttcagtgatacctaggaaacattcccgccttttacaaggatgcctctctcttaaataggtgctcttgccaccttatctccccaggaaaattcacagggcaggttaagaaaccttcaactagctatttcctcaattgtaaacatttctactcacaggtctcagagcacttcaaactcagtgtgtccaaaacagagctaccatctgctccagatctgctttatttctggtattcttagctccttgaatggcaccatcatataataaattggacaagccagaacctggaagtcaatttgtcctttccctctctgtcatgttccatatctaacttaacatcaagctctgtccattttacttcctgacttcctctgtaacccatttcttcccgtgtttaccatcacctggtctcagctacccctgtctccctcctgactggcctcccacttccactcttgcccctccactcaattcttctctgttctgcagcccaagtgaccctctcaaaatgtaaatctgatcatgtcactctcctccttagtgctccctagtgactctccagagcttttggaatgaaaagcaaaattcctgtcatggtccacaaagccctgcctagtctggctctgccaacctatttccccacaatccagccacgttggctctctcctcctgtgtttcctgccaccacgtggcctttgcacttgcggtttcctcttactggaatttcctcccgccctccctgcttgcttcagtctggttaactcctacgtatttatcctctatatctctgcttgcccgactcctttttggaggagcttttcctgatcctctaggtcaaggggagctcccaacatctccccattagtgccatgctcctttccttccttgcatttgtcagttttaatttccactcctatgagtgatcactgggttaatgctttctcccgccacccacccgtctacaatctccatgaggttagaatctgtttctcatttgttcatccttgtgtccccagtgcccagcctatttcctgaacatagtagaggttcaaaacatatttggaaaatacatgaatactcacattttgcttttcagacttttcctcctagaatatcattcacctgattcgggtgtggggtgtggtctctgtcaaagatgcactaatgattgttccttgcccgtacaattctcacagtgacctccacgcttacttagccttgatttccttgacctgttttgatggttctttctcaggagagcctgcaggaacttctgaggatggggctttggggatgtgaggacaatgaaaaacagcttgtcagggagattctgatgcactgccagccttgctgagacagggcaggaggaaccgcctctaaatctcaggatagttcacctggaatgtgggaagacattctcagaaagggttcttcccggggccctcctcttcatcctttcttgcctccctcccttcctccccatacccctcaggcttttatagatgcatatttacagaggacagggctacctttttttgcatattgattcttttgaaagggcagacctttagaactaaagaaatgaccacaccgctgttagctttctgcaaaacagcatagcactttcccggtgtgtgtttattacctaccccatgagctaaacatgaggcaaagtagtaattggctgggtctctggtgagtccatttccctgcgttgccccgaggtgtatgcaggctttacacagctaccttggcaactgacttccccaatgtttgctgtgtgtccaaggacaagcagggatctatgacactgggtgtttctagcaaatttccctctcaaattggcacattctctgtgagctttggagacttcacagtgtggctcacagtttgggaacaatttgcatcatcatctgactggtaagttctagttctgtggtaactcaagtgtttcaaatagcttaatacgcaatagggcacggaggttcgttctgcttctgttggaatcaaacacacatttccacaatgttcccgttatacaggatcatcccgaaacacatcccccagaacactatgttgtcactactctaccttttgatatacactttattattattcctatgtgcagataggttacttaagtttttctgttctagattagtttgtctattcaaatacatgtttctcacacacttctacagtgtttttctttttgttgttattcttaaagtgttctatgaaaacttccatgttgtatcaaggctgggtggtagctttgtaactagtttcccaccttagaatgactgtctgctttgtccaggactgcaagggggacttagaatatgggatttttcagtgctaaaactagaaaagtctgagacaaatcaggacaaagtggtcaccctgctaccatttctagccttgataaaggagcaggtagacccaaccaaggataatttttgttttctatgtagataccagtttagtggttggtaggaattcccccaaatcaacaccttgctaagctcatctctctctctctctctcttttaatatgacagcttattgagataaaactcacataccatacaattaatgcacccatttaaattgcgaaattcagtagtttttagtatactttcagagttgtgcaaccttcatcacaatcaattttacaacattttcataattctcaaaagaaatcctgtacccattagcagccactcccatttctctccaaatccctcagctcctggcaaccactggtctgctttcagtctctgtagctttgccttttctggacatttcatataaatggaatcatacaatatgtggccttttggttctggcttttttcatttagcctgtgtctagaaggtccatccatgttgtagcatgtgtcagaatttcatttctttttgttgccaaataatattccattatatgtatatatcacattttatttacctattcagaagttgacggttgcattgtttgcaccttttagctgtttataaacattcattacaagtttttgtatggatatatgttttcatttctcttgggtatatacctagacagatttcctgggtcatgtggtaactctatatttaaccttttaaggaactgccagactgttttccaaagtaactggactattttacattgtcagcagcagtgtatgtaggttccagtttctgcaaatccttgccaacacttggtattatctgtcttttttattatagccgtcatagtgatgtgaagtggtatctcatggttttgatttgcatttctctgatgactgacaatgttgagcatcttttcatctgctaattgctaagctccttaaatggaaaattataggaagcataaagcatgtttgcaaagaagtgattatattcgctaggattaagattttaagtgaatatttaagatgcccatgactagtgtccactctctcgaatcaagttttatttaaaccattgacttttcctcataactggaaatggtcccagtgaaagtctccctcacttgctggaatgtggggccatctctgctgtctgtcaagccttgatgcccaagtggccattttctcctggagtctgcatcagatggtagagtgtgtgtttcctgagtgtgagactggatctgctccacaatgctttgctggttaactccttccaagagtgcaatacccaggggtcactcctactcttagtgctctggggcctgggcccttaacacactcaatgtttcttccccttttctcacttatctgatcttctgctacttctttctcctttgtccgcccctgctctctggtttctcttgtacactctgtttatttaattttgatcatttgtttgtttgttcctttcttcctcctttaacaaattcaaataggatacaagccactctgtcccatctcctgcccttgccttctcttctttcattcttttattaactgatttttctcttgagaaatcaccactgggtcaggtgtggtggtggctcatgcctgcaattccagcagtttgagaggctgaggcaggaggatcacttgaggccagaagttcgagaccagcctgggcaacatagggagaccctgtctctataaaacataaaaaaattagcctggtatggtggtgcaagcctgtaatcccagtgctttgggaggctgaggtggggaggatcccttgagcccaggagtttgaggctgcagtgagctgtgatggcgccactgcgctccatcctgtgcaacagaacaggaccctgtctctagaaacaaaacaaaacaaaaaacccaaaacatgccattgatttggcagaaaaggacagggttcctggcaaggctaccaaaaacatgatctctgtcagaaaacatactatctgcaatatttgttggaatctgagaatgggaaatgtagctttcttctctccaggagtgccctgttcacagctgtgggataatgatcaatagttcctaaaaatatctatggaagacctcaccactcttattgatcagcaactactgcaaagataatgtttcagcatttgaaaccccttattattaatacttattctgtatgggtcaagtagccgctaacttacagtttggcagatggatcaagtataataataataacctataaatactaataaatgagccagtatagtataagtgagtactatactaagcagtgaaggaagaataatttcatggagggaagtccacggtagaagcaggctgctaggtattattatcgttttcacatactattcactttatgaagagatttaacatagctcagggtaatatggtctcattcaaatgccaaaatgacccctcagttcttctttctctcctttcccgatagaggtggccctaaggacacacatctgggacaatacggccatttttagccttgacccaagagatctgggttccccatgactggagtggaaaacaatgtctgtgggtttgtgtttttcagagtcaagggtccagagaaggaggagaagttgagacaggcggtcaagcaggtgctgaagtgtgatgtgactcagagccagccactgggggccgtccccttacccccggctgactgcgtgctcagcacactgtgtctggatgccgcctgcccagacctccccacctactgcagggcgctcaggaacctcggcagcctactgaagccagggggcttcctggtgatcatggatgcgctcaagagcagctactacatgattggtgagcagaagttctccagcctccccctgggccgggaggcagtagaggctgctgtgaaagaggctggctacacaatcgaatggtttgaggtgatctcgcaaagttattcttccaccatggccaacaacgaaggacttttctccctggtggcgaggaagctgagcagacccctgtgatgcctgtgacctcaattaaagcaattcctttgacctgtccagttgactttagtccttgtttctaactgccaagtcatgtgctgagtagaggctcagtggttggggcccaatggttcatctaggacgggactagagaggtcagtctacaagcaatccattgaccacttacttggtgctgcacacaaatgttggtgctatgggacccaaagatgagcaattagtattccagtcttcattgcctgtgcttacaaaagaagacctcacttccctaaacatctagttatggcggctcaagcccgtacctgcctacagagaagtgtctgcagttactcactattagtttcctaagggggcactgctggctccttctctcccaggaatgggcttctcctattctttaactcttgccttctccctggagaggctaccaaaccctggcctctgccgctgttcaggctgccatgtgggtatagctgtttgctagactccactctggcctcaggggccagagaacagctgtccagcatttctgttcatcccagcaatccaaaaaaaaatttttttaagctacaaagatcactccattttcaaattcagactctgccacttattagctgtttctcattaggcaagttatataaccttgcagtgcctcactttcctcatctataaaatgagattaaaatagtctttttattaagagaattaaagtgaattgtggccaggcactgtggctcatgcctgtaatcccagcgctttgggaggctgaggcagacagattgcttgagctcagaagttcgagactggc

SEQ ID NO: 63 - DNA, 60692 bp, Homo sapiens
gccagccccgccagccccgccagccccgcgatggcttgggccgcgctcctcggcctcctggccgcactgttgctgctgctgctactgagccgccgccgcacgcggtgagtgtcctgctccgctcggccccgccagacaaagggggcggctcccgcccgggctgcagcccaagggtctcggagcccgcggccggcccggcccgagtcccgctccagtatcccgggcaaggcgagaccctcggaggtgggagtcccggggccccgcacgtgggtgagggggccaggccgtgctccccctgccaagaaggtgcaaggtgggaaggtgcggggtccggtaggtcccccggggcgaatcgcccaccgcgacaagtccgagtctggcccttagcgcgacggcagggacctaggagggggtttcaggtgaggaccgagggtttgtgggtggggagccgtgcggggacagcctctgcgtggcccgggtggaagaagcgctctccactctccagcctctgcctgcacctggcacccacctacgcgctgtcaaaccctgccttgctttcggcagtcctatagggatagcctcgctcctcaacccattacacagatgggagtgttgagccagcggagtgtagagcccctgggggatgtcttgatcatgccctggaaccacccaccccgggattccccgtctggaagacgggggtcggtgggcttagtaatttcatttgccagggagaaactgaggcctatgaagtctctaccttcccctgaggtcccacagcctggacagaacggagccagggtcagatgtcacagcctcctggtcccaaaggttttccagctccattgagcatctgtgatttaggagaaaaagtaaagacagcctcaaatcaaggagatagctgtagctctccttttcataaaatattttttaagttaacttgaattgcataaggaatagctgaatacattcgacttaacacaaatatttatcctgttataggtaagaccgaagccccttaaccctcccccagcccctgaagtctagtcctctctccctctctgggcctctcctgttgctgagtctgggtagaaccttccatatttaaaaaaatatactttttatttgagactagtttgggatttacagaaagttgcaaagatagtacaaaaagttcctgtatttctctcaccccgttttccctattgttaacatcttacattgttatgggacatttgtcgccactaaaaaccaacactggtccgttactcttaactaaacttcaaacttcacgggattttatccagtttcccattactgtcctcttttgttccaggatccggccccaagttaccacattgcctttagttttcatacctcctcagtctcccagatgttttaaaaattactcttacataaaaattactcttacatacatagacatgagcttgtagctaatacagagccacgtaagagagagttagtttacattcgtgtctgaaaattccggaaaccttgggaactttttgatttttaaacaatatggtagttgaattttcaaacaataagctcactgtatttttcttcaacctccagacatcttttcagctgaaatttacaactgtgtagtcaatcatttgccttaaaacaagaaaagaaaaagacagtgaataaatgtctcagggaagaaatgaattatttttcctgtcaggctttctcaatacactgtatagaaatgttttcagacattatgttgcttgctcttttcactccagattttagttttgacatctgttctttttgctacaagcagatctttttgctacaaggagatcgaatccattcttttgatcctctctggagtcttccatcatgtgaatacgttatgggctctttttttgtttgtttgtttgtttgagatggatcttccctcttgttgcccaggctggagtgcaatggcacgatctcggctcaccgcaacctctgcctcctgggttcaagtgattctcctgcctcagcctccccagtagctgggattacaggcatgtgccaccatgcccagctaatttttgtatttttagtagagacaggatttctccatgttggccaggctggtctcgaactcctgacctcaggtgatctgcctgcctcggcctcccaaggtgctgagattacaggcgtgagtcaccgcgccctgctgagcctttgatttttatacctgtgggcaccttggaagggtcaacagtgggtagtggggagaagtgtgggaatgagggtcactggcagcttgagggtaggtgcatggaccctggggaccccagtttagatccccaatctcactttctccttccagttcagctagggacactctggttatctccattttacagaggaggaaacaggctcagaaaggctaagcaacttgctcaaggtctgtctggattaaaactctgggctgtaagaatttttagcttttacttttagtgataggatctcacactgtggcccaggctggagtgcagtgtacaattatagcttactggagccttgaactcctgggctcaggtgatcctctcatcttagcctcctgagtaggtgggactacaggtgtgtgccaccatgcccagttaattttaaaaattttgtagagatggcatcttgccatgttgtccaggatggtctcaaactcagctcaagcgatcctcccaccgcagcctcccaaagtgctggaattaccggtgtgaaccaccacgcctggctttgcaagaatttttaattcacaggaagaatgaattctcagtcttcccacacattatactggtaatctgaacactcaaaagtcttagaaccatgtgacttttagatactaagaaatgcaactacaagcaaaaaattcttaaagaaggacaatggccgggagggcggatcacgaggtcaggagatcgagaccattctggctaacacggtgaaacctcatcgctactaaaaaaaaaaaaaatacaaaaaaaattagccgggcgtggtggcaggcgcctgtagtctcagctactcaggagactgaggcaggagaatggcatgaagccgggagatggaggttgcagtgagctgagatcctgccactgcactccagcctgggcgacagagcgactccatctcaaaaaaaaaaaaaaaaaagggcaaacaagtgaaacaagtgggtgaccctgatgccgtctgaatggtgatccagtttgggttaaaataagcaaggctctccagctcccttgtctcatttctttatcctgaccaagccttgaggtaatttccatcacccttatcatacagctgaggtttaaaaagatgaagtgactttcccaaggtcatacaaaaattatactccacatctaggcccctccaaaattcatgcttatcccagtaagacaccactacttctgggagtgagcaactccgtctttacctttagaatttaatttaaaacttttaaattaggaaacatttcaactatacagaaaaagaaaaagaatacggtaagaagccccatgtacctataccttgatttgacagtcattaacattatttaaaaaatattagacataggctgggcacggtggctcacacctataattccagcactttgggaggctgaggcgggccgatcaagaggtcaggagatcgagaccatcctggctaacacgatgaaaccccgtctctactaaaaatacagaaaattagccaggcgtggtggcaggcacctgtagtcccagctactcaggaggctgaggcaggagaatggcgtgaacccaggaggcggagcttgcagtgagcggagcttgcgccattgcactccagcctgggcaacagagcgagactccatctcaaaaaaaaaaaattagatgtcatgatattccacccttgaatatttcagaatgcatataaaactgacaactacaattctattttcttgcctgagaatataaaaagataattcttaatgtcatgtagttcccagttcaaattcaaatttctgcaattacagcaagaattttcgagccccattcggtgaacatgagggtggtgagctgagagttaggagtatggcttgtgggccccttgaaactaattgatttgccttgtgagtatcagaagcattcttcctgcttcccaggcctcagtttatctgtacttcgaggtggctcatggaggtggtctctcaagccccagccatatcaccaggctactgcatctcttcctttgggcttgtgtgaccaccacagggagcactgagagagatctcttggttgggaggctccttttctgggggtccggaaggcatagtggcatcaagcgagggtcactgtggcccagtggctggtctgggcccttgcaggatgcagaatttgtaggcacaaataaatctgtctcattctaacatgcactgaccagaggtcacccaacagtggtccgtgactggattcagccctggatgggctgggtttgtgctgtgtgggacatggggagaaaattgggggattccatacacaaaaatctagatttccaacttcttctgaaaaatgggaagatctagcaatactttcctgggactcagtggtagcaccctctctaaatcttgccacagtccccactactccctattgcctctccagcatgcagctattctagttaccactgtacttcctctgctgttttttcctgtgttgagaaataattctgtgaatttgtgtctatttcaaaaaccagaaaacaaaaactagggcaaggccacgtgctttttatgcacagtggtagcagtgcggggcaggtatggaagagcatctgggaaaccctgttaatggcagactgaaaaccctggaggcctgtgggtgagccctgggggaagaatgggttaagcaggttaaacagaattttgggttgctccagctcacctgtgcaactaagcccccttttgttccccattaaatcctcccagagcttaaggccctgcattgagttgaaatgattgaacagagaggttgggcagtctacccaacattgcacagctgaaccatgccagcctctgctctggacaatctagaagatggactctgtgtcaagtgcttaacctgcattggctttcttaaccctctcagcaactctgggaggcaggtgctgcccattgagcaccgactgcatacatgattcattcagaccagccactgttctgagtgctggagtgaacaacacgccctcccttcatggctcttccatctagtgaagatgcgatacgtcagggggcatggaggcgggtgacatcccatccttgactcctttccctggttcacaaagggtcaagtgggagagagatccagggcaggcgacaggggtcagtgagtgaggaataggccgtttttagaggaacccatgtgatggggctccagtcggaaatcagaaaagatgccttgggatctgacccagggtgggcaggaaaccggctgtgtgggcaggagccggggatggaaaggtcagggcccaccgccctgcccgccagggcctggcagtacctaaaaaaaagtgagagtgtccgtgggtggggctagagcccacagtccccaaaacagagcctccttcgcccccgctggctgcaggctgagtcaccctggaatgtgaccacggcctgagttggattgagggcccaaggctggaggagccaacatcaggggtcaggcgcctgggctccgggcttcctgcctttgtctgcgcctccttgggacttttctggggaaagaggaaagctgccaggaataacacctggctcgctggggagctccggccacagccaggagaaaggcaggggaagaaagcctgctcccgcctgcaaagatgttttaggagaaaatttcagggcctgcatttgagtaggtctctggaatatctctgcaaaatggaggtgaaaatgcccacttagggtgactgggggccagggtagtgtcaagagggtgggcactgcagccagacctgtctggattagaaacccaagtcctctatgttggaccctctggcatgtgacttagccctctgcacctcagtttcctcctctgtaaaatgggcctggcagtaataattgcttcctcataaggttagggggaggattcattgagtcactgggataaagtcctcagtgtggtgtctcccacaccatcagcgttcattaaatgttagccattatttccaaacaaggaaacgtttggaaaatgccaagtatagctcctgatgtgtagttggcactaggtaaatggtgcccaggaatcttactgctcctgcttctcagctgcttcccagctactaggtgccaggtgctctgtaactcccctcatccttggcacagcccaatgcagtcagtagcattattgcttccattttacagatgaggaaatagaggcatggagaagctaagtcacacagccagcaagaagcgtggctgggatttgaagccaggaagtatggtgctaaagtttgggctcatcgtgaccatgccctcctgcctcttatgcaaaaatcactgcttctgggtccagtctgccaggctctgacctgggctggaagggggctgccatgaaccagttattccaaggctacttgggcagcacgacacgtggagacttcaggagaagtggccttagcccaggggctcacaaaaagatgaggcacaaggcaaggccctgcacctccttagactcacagagctcaaatttgcaagtctcctctttgactagagaagccgggatgggctggggagaggagggaatggttgggagaggcacttcctaggccctcaaatttcatctttgcttctgctcccatccttcccagccttggccctcaaatctggccatttgctcctgcccacgagctgtcccaccctttgggttatactgggggcagccaggtagagggaaaaagggagcaggagacaggggcagagggaggtagagagggagggggaaaggaggaagagaagtggctgcttccctgaactgctgggtgtggaacaaaaggccctgtgctgaaagtgggagactcagatgttaggtctggctccccggggaccatggccattgcttccaccacattgctctcctgggggggtcacggtagttccctgacacatctccttccttcctcttgtctttctctggtatgaccctttaaaggtgtggtcacatcacttactggctcctgctgcaaaccctccagtggatccctgccacgcgtggcataggagccggactcccaccttggccttggccctcgtggtccacaaagtcatctccagcatcatcgcctacgtctcgtccccacattctccactccagccacgctggctcctgctgtctcgaaaacctcaccgagcatgctcccaccccagtacctttgcacttgctgttgcctctgcctgtaacactcttctccctgcccctcccagagcactcccttcacatccttctggtctttgctcacgtggcatctcctgaggaggccctccttgaccaccttttgtaaaccagcccccctcactgtctcacaccaccctgttttcttttttctttaatggaatataattcatatcccatttagttcacccttttgggctgggcatagtggctcatgcctgtaatcccagcactatgggaggctgagacagggagtgcttgagcccaagagttaagatcaacctaggcaacacatcaagaccctgtctctataaaaaaatagaaaaacaaagtcaggtgtgatggcatgtgcctatatatagtgccagctactcgggaggctgaggctggaggattgcgtgagtccaaacgtttgaggttatagtcaactatgatcatgccacggccctccagctccccttttaaagtgtataattcggccgggcatggtggctcacgcctgtaatcccagcactttgggaggctgaggcagatggatcacaaggtcaggagttcaagaccagcctggccaagatggtgaaacccatctctactaaaaatacaaaaaattggccgggcgtggtggcgggtgcctgtaatcccagctactcggcaggctgaggcagagaattgcttgaacccgggaggtgcaggttgcagtgagccaagatcgcgccattgcactccagccttggcgacagaccaagattccgtctcaaaaaaaaaaaaaaaagtgtataattcaatagtttctagtatatccaccgggttgtgcaatcatcaccatcatctaattccagaatattttcatcacccctaaaagaaaccatgtacccattagcagtcactccccatttccccctcctccagccctgggcaaccactaatgtactttctatctctattgatttcccaattctggacagttcatataaatgaattaatacaatatgtggccttttgtgtctggcttctttcactgggcttaatgtttttaaggttcacccacatcgtagcatgaatcagtacttcattcctttttgtggctgagtaacgtttcgtggcattgatacaccacattctgtttatccgttcgtcactcaacgaacacttgagttgttttcacttttcagctattacgaataatgctgctgtcacccgaaagcggtcctgatccagaccccaagagagggttcttggatctcaggcaagaaataatttagagtgagttcacagagtaacgtgaaagcaagtttattaagaaggtaaaggaacgaaagagtggccacaccatagacagaccagggcgtttccgaaggcaagaggaggaatgtgtctgccttagttacaattcttcttgtttatatagaagataaaaatcatgggagaggtgtgctcttctaccacaagggctggggacaaaagattgttacctaacaatcttccataagaatctatattattatctttaaagcaaaacttattcttaaactaagaaggcttttgttcataaaatatcgggacagcaggatgtttcctgggtctgttaagtcctggatctgttaagtcttgggtctgttgggtaagcatgatttaacgtgttcccttgatcgtaaacatcctgcgcttaagaatgcctagcttcctggcccagcatggtggttcacgcctctaatcccagcacttggtgaagcggaggcaggtggatcacctgagatcaggagttcgagaccagcctgaccaacatgatgaaatcctgtctctactaaaaatacaaaactagccgggcatggttgttcattcctgtaatcccagctacttgggaggctgaggcaggagaatcacttgaacctgggaggcggaggttgcagtgagctgagatcgcgccattgcactccagcctgggcaataagagcaaaactccatctcaaaaaaaaaaaaaaaaattgtctaacttcttcttgggattgcagcccagcaagtctcagcctcattttacccagctcctattcaacatggagtcactctggtttgaacacctctgacactgcttacgaataatagtgtatacatttgtataagatccaacgttttcaattctttagggtacattgctgggtcttgtagtaagtctatgcttgacgttttgaggaactgccagactgcattccaaagcagctgcacgattttacattcccaccagcaatgtatgagggttctcacttctccacatccttgctaacacttattttcttcccttttttggtggtgggaacagggtctcgttctcttgcttaggttgtagtccagtggcacagtcacagctcattatagcttccacctcccaggctcaagtgatcccccaaactcagcctcctgagtagctgggactacaggtgcacaccaccacacctggctaatttttgtattttttgtagagacagggtctcaccatgttgcccaggctggtcttgaactcctaggatcaagagatcctcccactttggcctcccagagtgttgggattataggcatgagacaccatgcccagccttattttccttttttaaaatttttgtttttattatggccatcctggtgggtgaagtggtacctgtaaaccaaaaagtgtctgagacaggtctcaatcaatttagatgtttctttttccaaggttaaggacatgcccagtagagaggtctgtgcctttctccaaagacgactttgagggtttcaatacttaaagcgggggaaaggtgggctgtaagagaaagagggaaggtatggtaatccccatgtcacaagagaaaaggaacgggtagggcgatagtcaatgatgtatttctctcatgcacagtaaatcagcactttacataaaataaggtgaacatagagtagctgcctatggagatactgaaacttttatctgtagctatctgcttaggaatagtaggaaaggcagcttcttgcatgactcagctttcagtttaattttttcctcatggcagagtgaattggtgtcctgagtttttattttcctttctccccggttttcttttctccctggttttcttttcttttcttctttttttttttcttttctttcttcctgcacgttttttgctctgcagcctcaaccttccagactcaagcgatcttcctgtctcagcctccctagtagctgggactacagacatgtgctaccatgctgggctaatttttttaatttttagtagagacggggtctcactctgtttcccaggctggtcttgaactcctaggctcaagtgatcctcctgtctcagcctcccaaagtgctgggattacaggcatgaaccaccatgtatgcctgccccccttttctatttaagatcttttggagaaagcattttagaagaaaatgaatctccggtctcaggttttgtctgatctctcatgtctaggatggtttatttctagacgaataggtcccacattgttaggaaagctcagttttagtaggttgtgaagtctcacatcacacaaagaaaataagagagaaagaaaacaggaaaaaaggaggaagtaagcagataaacaaaaaagaaagaacgaacctggaaaactgatagaggccatattactctcaagtccgtatatcagtaggcaggtatgaaaatgatttctgcatataaagagattgcttttattttcttccaaagtttaagttcagtttatagggctttaagaaaagcacagcttaacttttagtgatttcacatcaggaaaaatgaggggaggaaaaaaaaaagaagggaaaacattgaaaacattcttttggagacttggagccaggagaatttttagaattcagtccaaattgtggaaaataataaaaatggaaaaacattagacaagtctagactctaataacaggtgtactatagttaattttgaaacatgacttttctctctccaattccccaattttattaaagacaaaatcatagtaggaccaacttatttgtaaaataagttttagttatattatacttggcttgattattttcataaaatgcagcaagactgatcatttgccatatgagctctctcttctttttaaaattggctttgctggaagcttttccataaggaatctgagtctagacctttttaaaagcctcacacccagccaaggatttagctgtgcctgcagatacctgtatgaattgagtgaattcaaaaagtgacattctttgctttccacaggtcaggaccctgtaaacgacagggtatatgaagccagtttttccaaggtgcttttattagctctatagttcagccttattttctcaaagtagtctgaaaatatgtcattccagttaaagccttggtaaaataaccagtgtctccaattatgccctgttataaaagaaaaaagatacttaggcaaataactacattgccataaattaagaatactcacaaatagtttccaagttttggaaaaaataggtaaagagaaagaaattctgttttaaatttttctcatgagagtatactttactgaattgttaaaagctataaatagcttaaaagaagagaaagttttcttgactctgtaaaacaaaacaaaaagaatcaacaaatgttttaaacaaaaactcataaaagattatttcaatctcctgttagttcagttcatgcaattaactcctgttctgctcaagatgggattagcagtcctcatgaatacatcagttctccatgacagtcctggaagtttttctccctattccaatggcacaatctctaaggttgtcagaagcccatgtttaagagtactcctcagagttctatagctgattataaatcacctataaaaagatcaaactaaaacaactgtggatgacaaaagtcttagaacagccatagttaaagacacaattgacaaggaaatttggttacgtctgtggtattcaatagttttacataataatcataattactactgatgatgtatactaagtcatatcagaatcacaggaatctcatacaattttggaacacatactcatttatataagcaactcatttatataaatataatccaaagaagattaaacaccatttcatatttgacaatgcttcctgtatgattttattttaccaaataagccgaatatgtctcttttggacttcagaggacctaatgccaaaaaattaatgaggtcaaaaggactgaattgactattttattttggaaagtttgtcaaatatagaaagtttaaaacacttgacatcacaaaatagaatcacaggttattgtaaaataagtcattcatttagccaaaggtataactcagagatttcagaaaaaaggcaaaaacctttattctttttttttttcgagacactctcactttgtcgcccaggttggagtgcagtggtgcaatcttggctcactgcaacctccacctcccaggttcaagcaattcttgtgcctcagactcccgactagctgggattataggcacctgccaccacacccagccaatttttttgtatttttagtagaaacggggtttcaccatgttggccaggctggtcttgaactcctgacctcaagtgatccacccgcttcagcttcccaaagtgctgggattacaggcatgagccaccacacctggcctaaaaacctttattctttgagagaggagacttaattttccaaataataagctctaataaatacagcatgaggccaattaaatcctgtttctcaaatcttataaacaaatctattaaattttaatcatcttgaccctaagatgtaatttccataaaccattttctaaacttttataattttttaaagggtgggataatgcttcaagaaaaccttgttaatctgacacaggagcccagatgctggtcttgcatcagtgtgcctttgatgttaatgtttaattaatagagaaactctgaactaatttaatctctcagaatcagcccttacaatctcatatgcccacctcttccatgatagtccctgggcctagagaggttgaatagttttcatttctggctccatgtctcacaaatgcagcttattttgaatgtcatctcctcctaggtctgaagatgatgctttaactgctgtcagtgtttaagatttagcaggactcagtgtcctttttagacccaggagtcaaagccctgtaactaaacagcaccaggactttaaaaacattacagaaagttacaaggatgtaataaccttcattaaaaatttttttatatcagctttcctaggcaaatcaaaacacagaacaatttagacatattaagaaatgccaggagcacagaatgttatattggatgaaaacatttcctttagacctttatgataaagcatttttagcatcaggctacaacagttaggacctgagggaaaaaatttatatgagctgacgaaaatgttgatggagagaattattctctcagtccttctcaaagaggagagaaagctgaaaatagcaagatgcaataaaagttgaacttttgagttaaaaaaattaaaatctcatgtaatgttattaacagtaaaataataccttaagaaaattttgttctaaccaattctttagtgtattagtgcatttttaatatcaaaacccaatctctagaaagactattataaataatttccttttaattatagtcaacttgttcacataaaatgtttttcataaattctctttttataaaccttattatgacttacacaaaccatttacaacatgcttcctgttttatcctaaacatctctctttcgtaaatgatcaatcattttattttaggacaaaaaatttttacgggattctttccatatacaattatttttcttttaacctttcttgccaaagatacccctttataattttctttacatgcttcttatttacttattctttttacgttgtttaataaacaacctttgaattagacaaaactatttccttttaataagaacacttttttaagaaaaatgtttttctgtaactttttaaggaaaaattggaaatgacccagacatttaatgggtatctattatttaatttaatatcactttagattctgaattatatgacatttatttataagcatttatttcattacatttacctaattaattttttaaaatagtttacctagattacttatgaaaactgtgatagtcactatttaaagttatttccctgttaatcatttttatagctgtgaatttcagatgtttacttaagtaagaactttaaagttaaatacatgtgtgttttttgttttttgccaataactcaggatttaactgttttcattaaatgaacaatattaaatgccttatttatcaaaaagttacacaatgataattctcttttgggctggatttatagcttcataatcctcatgccaaattttgtcaccttataatatctagcagagataaatatataaccccttgactaatacatataaaacaataatgtatattgacaattctgaaaccatttctaattttattttaccaataattttaaaaccagcttatttgttaaagatttacttaagtcatgtgagcttgaaaaaccatttgggcttaaagtttctatttttctgataaagtatttgatttttttctttaagccaatttattagacctcttatgtatttttttgtagtgaaacattatatacaggacatataaatacatagacagacaggcagcagtagatctgataagattcataagacccctttttttctcctgttataaagctcctggcttttcttaatatgtctaagttgttttatgtttttatttgcctaggaaagctgatataaaacaattttaaataaaagttattacatccatgtgactttctgtatcgtttttaagtcctggtgctgttaagttatagtgtttgactcctgggtctaaaaaggacaactatcttagacttccaatttcttgataacctgtttcattaccctaggcaattgtcagccaaacttgcatactaaaggaacaactcttgggtgaaaatcagatagggaaatgtatatctctaaagagagagagagacagacagagagagagagagaaagaaagagggagagagagactgggtgtgttagagggagattaaaaatggatgccaagccacaagccaaacataaaattatagaaatcttctgtaggattttatgaggagacaaactttatttagataggtagatttaaatttagtctctgtcttttaactggacctctgagctctgggcagagtccacactgaatcctgggtctctaaaaggagagagatatcatgagactaagccatgtaatgcttttacagtgcactttgttacaaaagcatttctctaagtattttaaccactccctctcttaaacacacaagagtagttcctgtagtaatagctattttagttaataaaaaaaaaagaaatcagataacgcaatacaaaaacaatcagtttaagatctgagaggaacttgtctttttacactcttagggtttcataaggaaaaacagaggtttctccccagaaggagtctggcaccttctctgttttctttaaggaatcccaggctgttagaaattattttaggtcccttatgcagcagagggcggcaagaggaaggagagacaggcagaagtaaatggagaaaacagaattcagtcgactgggaagaaaaaatctttttctcaaaaaacaagaacctaggagagaaaaaagaaagcataaaggcatacacacacacacacacacacacacacacacacacacacaaacacatacacatgcatacacacacatacacacgcatacacacacacataaacacacacacatacataaacactgctgacaaaaagagttaaactctgtaaaatatttgaggagatttattctgagccaaatatgagtgaccatggcctacaacacagcctcaggagatcctgatgacatgtgcccaacgtggtcaaggcacagctcggtttgtacattttagggagacaggagatatcaatcaaatacattgacaatatacatttgtccagtccagaaagacaggacaacttgatgtggggggtgcttccaggttataggtggattttaaaactttctgattggcaattggttgcaagagttattgtcaatagaaataaatgtctgggttataataagaggttgtgaagaccaaagttttctcatgcagatgaagcctccaggtagcaggcttcagagcgaatagatgtaaaggtttcttatcagacttaaggtctgtgttgatatgaatgctggagggtataatgagtcatgtctgacccccacttcccaccacggcctgaaccagtctttcaggttaaattttattttattttttttgagacggagtcttgctttgtcgccctggctggagtgcaatggagcaatctcagctcactgcaacctcctcctcctgggttcaagcgattctcctgcctcagcctcccgagtaactgggactacaggcatgcaccacgaccatgcctggctaatttttgtattttcagtagagatgacgtttcatcatgatggccgggccggtcttcaactcctggcctcaagtgatccacctgccttggcctcccaaagtgctgggattacaggcatcagccactgtgcctggcctgcactttaccatctacaaagcaggaaaaaaaacttcaaacttgccttccttgttggaagtgagttgaaactccagaagggagttacgtgctctccatcgtcatggaagcaggaaaacttgccttccttgttggaagcaagtaatactccagaaaaggagttgtacaacaaaataaaacttagctctcaaattgtagctctcttagatctcaaattttcagagattcgggattctctgcagcagggagctcccagccctactggtttgaccaatgaagacagataccaagctgttaccaaacaccaacaggagatttgtcaaaggccagggccacctacatggagtcccttcatggtcgccaatttgtaaactaaaaagtatctaagctaggtctcaatcaatttagatgtttattttaccaaggttaaggacaatgccagggagaagaaaaaccacagaatcacagaaacagtctgtggtctgtgcctttcttcaaagatgactctgagggtttcagtatttaaagggggaaaagtgggctggaggggaaagagggagggtgtggtcatccacatgttacaagagaaaaggagcaggtgaggcaatagtccccgagtgctccattcagattacctccccgactgctccattcaaaatcacactctgcaacctacactctttatgcccttccttgccttatcaaatggtgacaagtgccatggcttctgtaggcgacctggtgagcctcccctggacctgggcagcatcccctggttggggtatgccttggactttggaaaagatgctgccagcttcctcacgaggatgaaggagaagcacggtgacatctttactgtaagtgcctcttgtgcctcgggagggatggggatgagcagctgggcctcatatctggtttctgttgattccttcaacatatgtccctatgccaacccccccaccccaccatccaacatccatctgagtggtcgagccaactttctatccagctgcctgtccagctgcactctcaatgctgacctaacatcatcccttcagtctccctcttgctcttcccagcgtggagttatgcagtcactcaatatctatccaatacttgtatatccatgcagctgacctccatctatccattccatttccatccgttcaacatccatcttcccatcccattcttctgcctgtccacctggtgtctactaagcgtccttccatccttatatctactcagcattcattcgtcaacctccgtctatccactcacccatcagtttttccatagattcacccgacatctgtcaattcatttatccatcttctatcccttcatgtgtctgcccagatctacccagagttcttccactcatggatccaatgttcatccaactttcatctgtatacagttggccccctgtatccatgggtgggttccatatctctggattcaaccggccacgaattgaaaatatttgggggaaaatgtgttggtactaaacttttttagacttttttgttgtaattcttccctaaaaatatagtttaacaactatttatttagcatttacattgtgttaggtattataagtaatctagagatgacttaaagtatatgggaggatgcatgtaggttatttgcaaatattatgccattttaaatcaaggacttgagcatccatagattttggtatctgcaggaggtcctggaaccaatcctccatggatactgagggataactggtcagtttccaccaactttcatttttctgtttatctacgcatctttctgttcatctgccactatccacccaacactcagctatattcagtattcgatgtctccccactggatatacatctatttatatctcatccatccatccttacaacatctattcaaacgaccaccacccacccaccttccatgtatccttccaacttccatccaatcaacattcatccttcactttacccagtatctacctagcattctctcatccatgtacccaacatttattggtacatttggtttccaaccaacctctagctgcccttccatccatctttccatccaacatagattcattgatctatccttccatttatccatctatctaacattgtatccacaagtatttacccagcaatttccttccttccttccttccttcctccctcccttccttccttccttccattcatttacccattcaccaatccatccatctgcccatttactcttctacaatccacccactggaatttacccaacagcatccatccatccatccatctattcatccatgtatccattcattcttccttccatccatccatccattctttcatccatccatccatccacccatccattcatccatctacttatccatccatccttccttccatccatccatccatccattcttccatccaaccatccatccatctatccattcatccatccattcatccatccatccatgatgtgcacaggatccatctgccgccttctctcctggctactggagatatggcaataaccaagataatcatggcaggtgcttaagagtgaggtggtagagaacacagtctttgattttaaaaagcctcaatattcccaaattccagtcctagtcctgccacttctcagctatgagatcttgggcacatttcttctcctttctaagcctcactttttcagctataaatgggtgagtgatggtccctacctcacagggtggtaggtggtagtgaggcatagataagagaacatagtgtgttactgtccagtggggcagtgcctggcacacagtaaggccctgaccactgagagcggctgctgttcacagtgacactcctcactctatccctggcaacttcccacagatactggttgggggcaggtatgtcaccgttctcctggacccacactcctacgacgcggtggtgtgggagcctcgcaccaggctcgacttccatgcctatgccatcttcctcatggagaggatttttgatgtgcagcttccacattacagccccagtgatgaaaaggccaggatgaaactgtgagtggctggagatggcacctgtgggagggccagggtgggcgactcatttctactcatgtggcccaagttattcttggttccaaagcaaatgttcggtaaagacattttgtcttgagaacacaaacagaaacaaaacaaaaaacaacccaaaagaattgggtggaagaagaactctttgtctctcatctctggcgggtttttttgtttgtttgtttgtttgtttgtttgtttggaggcagccctgattttagtaggaggagaccagggtttgggtcagccacacctaaattcaaatcccagccccatcactccctagctttgtgactttggacaaacctctttccctctctgagcctctgtttcctcctctgtaaaatgaaggagagaggtggaatgatgaatatttctgagtccatactctgccaggcagcatgcattatctcattagtcttcacaacaatgctggaggctaagtaacttacagccccatttcatagatgcagccactggatctcagagaagtgacttgtctcaggccacatagccagaagtggtacagctcctgaaacatatggaggaatcattttattttatttatttatttttgagacagagtctctctctgttgcccaggccagagtgcagtggcataatcttggctcactgtaacctccgcctcccgggttcaggcgattctcctgcctcagcctcccaggtagctgggattacaggcacgtgccaccacacctggctaatttttgtatttttagtagagacaggatttcatcatgttgtccaggcaggtctcgaactcctgacctcaggtggtctgcccgcctcagcttcccaaagtgctgggattacaggcatgagccaccatgcccagccacatatggagtcatcatatcaataagagaacagatgaacatgtttgctctgcattcattcagcagacatctgaggacccattgtaccctggtcattgccctggatgtagggtgtgcagaacggtgccaaccaccatttgaaggcagctattataggccaggtgtctgataggctcactttcatatctgtgcattagcctaaagaggtgggcatttttatccttattttacagatgaggacactgaggctcagagaggtgaagtgacttgctcaaagtctactgctagtaagtggcaggactgggatttgaacccaggtccactgacttcacagcgcattctccttcatctaagataccaaggctgataagaccctgtgtccgcccctgcagagttcacacagtccaatggcgatcttcagtgatctgtctccaggaggaataccctctggaggttaggaagagcatctaggaaactgttttgcaagatagttaaggctgaagcaaggccagcatgatgaagtggatgttgatgagacatgatgcctcctctgaaccttggcctgggggcagctgcttggagcctgagtgtcctgggtcctgacattccagggggaccctgggggtcccattagcaataggaatccacagctcactgaatctgcccctgctacccagggaggatcccagtttccttcagtgtttgcctcaggaattttctggaatttcttacaagctggcgtgatgtcttctgggcacagcagccacatctgttgagggcttgtctctgctgaggaccagcgcttggagtggggtggggagaagagctgggtcagggtccattgaaggccagatcccatgtattgagcacttacaatgtgccaggcaccgtgcggaacccttcacatgcattgtcatacatgagtcatgagccatgtctgtcgtttttcccactatgttccaacttgaacatcccaaaccttttcatacccaggagttcatggacgccctgtgcaaaccctgccctggtggattacccaggcacttctggcttactcagtctaaaggtgtccatcctacttcccaaacagcagtccatcctacttcccaaacagcaggcatgacagatcagggccctgattggcactctcccactgttcttgttgctgccactaggtgttgctgttgaccatgggctgtgcaccgcccatggacaccccacttcacttgctgtagggatatcctttttggtccagatcctacacaaggagcagagaggccttagacttagatgcaagatacccctttcttggcttctaatcatatcctcagtcatggctcagtgtagactccatatcatggaggctcagtataggggagcttccagcttctgccacactcttccagacggggcctctcctcactctgtgcaggtccacacgatgggaccagatctccagcccacatccctttttccttgtgtcactctcatgtgaggtcatgtcttttttttttttcttttctttttttaagacacagagtctcactctgttgcctaggctggagtgcagtggtgtgatcatagctcactgcagcttcaaactcctggactcaagcaatcctccccacctcagcctcctgagtagctgggactacaggcacctactacacatctggctagtgattctttgtgtatttattctatttttgtaaaggcagaatctcactatgttgcccaggctggtcttgaactcttagactcaggcgatcctcccacctcagcttctcgagtagctgagactacaggtgtgagccaccacccctggctaatattttattttttgttgagatggagtctcactatgttgcccaggctggtcttgaactcatggacttaagtgattctcccaccttggcctcccagagtgctgggattacaggtgggagccaccatgcctggccagggtcacatcttattggcagtcctgagtcagggaacaccacagctattccaacagatcttcctatctttagatttcagggagagatgagttgcttttcagttccttctcttccagaacgctatgggtcccttatccaagctgtgtgccttagggagggaaagactctcctggttaagaattcagatgctggagttgggcagaccaggatttcagtcccgctttggctgtgtgaccttgggcaagtcactttcctctctgtttctgagtttctccatctgtaaaatgggtgtcataatagtaactcttattcccaggtttgtctgaagacgaaatgagattaggctcagtataacagatgggaactattgttgacgatgacagtcataataatatcctcttatttaagctactcttccgcaggacctctttgccaatggggagcttgagctctgggacccttaggtttggggagggaggtgcctgtaggtgtgtatttccctttggaagccaaattttcatgcttttgtttcctgcctcaggactcttctccacagagagctccaggcactcacagaagccatgtataccaacctccatgcagtgctgttgggcgatgctacagaagcaggcagtggctggcacgagatgggtctcctcgacttctcctacagcttcctgctcaggtgaggctgtgcagcccccaccctcctgctggggcccggcactttgacctgtgtcagccatgagcagtggccaagggaaccgtgaggactctgtgggtgggggaagcaatttgagacacccaaagcaaagactgtaggaaagacgccatgcaccagggccccggctgttcatctgacctagctcatgaactgtaaaaggagacactggctggaaatgggaccttacaggtcattcagagaggaagtcacagagcaagacttcagaggtcatcttgtcctgtggcttccagactttgggatttcacagaacagaaaacaaaatgtttgggagatcaacttgggaccttaaccttttatctggtcttgtaaatgtatgttaaaaactgcacaaccgaacgttccttccttcagcagtgccgggcactaatccaggctctggggatacagcagggaacaggacagatgaagtccccaaattcacacagctgacactccagtgggggaggccgaattgagttatgtcagagagtgataaacacgatgacagagatccacgggtggggtgacagcatctggggggctttcttaggccgactgacgaggcagggtcatgctctgggggtctggcttctgagccaagacctaactgcaaagtgcccaccacgccaacactctaggcaggggaaacagcaggtgcaaaggcccagaggtgggaggaagctcagagagacggccagtgtggctacagcataaagagccaaggagggaaggtggacaggaggtcagagaagtgggcagaagcaggcctcaggcagtcgggaggtcagggaaggctttggaaattatgctgagtaagatcgggtgacatcaggggtttgcacaggggcaggacatgatctaacttagtttgaaagccccctctggctgctggatggaggatggactgtaggggtaaggaggggtggagagggaggcaggaggacctagcaggaggctgccaggtgtcaccaaggtgagagaatggtggtggcccagggaggtggtgagaatttgggtagcttttggagatagagttcactggctctgccggaagatttgactggggcagcggtggggatgggggagcgtgggcgtgagtgagagggatagagtggtgttaaggacagctccctgattttagtgatgcccttaaccaaccagaatttaatttaatttaaatttaatttaaaaaaggacatttcaacccctccaagaaattagagcaacatagttctaggataaagggcagtcattcgttgacacatatgggcatgtgggtatatttatgatatgtgtgtgcatatgtgtagactcggcgtgtctcagctcttttaatgctcacaatcgctctaggaggctaggactttacatattccatttgacagatgagaaaactgagacctggagagcctgagtcatttgcccagaggcctgtgttggggtcaggacagggctggtcccagagtctgcactctcagccacagctctcagcacacgaacagtccccattctttttgttttgccctggggtggtgcaaacagtgtcaagggctgtaattggtgtgggtgatgctggtctggtccaccctgcattgtatgatggggactgaggtccagagagggccagctgaaaccacccagcaagttcacagtagtgatcctcccaggtctcctggctcctgggtccctgtgcagacaaagaagtcagagagagataggctggggagaggcaggctcaggggcagctgggtctggctaggctccatggtacagcggcaggcacaggggaatcagctcagggggaatcagacgtaaatccatacctgtaacccggtaactgtgtcttcagggcctgaggcctgggctggagctcctgccccctggcttggcagctgtaggcctttccactgccatcaatcagcagcccctgaaatacaaagagaatgggccagttggatgggagggacacagaggtgaaaggggtgccggttcaggcagcccgaactgtgaggtgccacctcttacacccaccagcctggcctgtgttggccctggcctcactgagtcacacccaaagttctcctctgtcctcaccttgtagccctggcctcccctcctcccacctacctctctgctgccccttgagcaggtcaggcacgctctctctttgtggcctttgctatttctgttcccttgcctgggaatgctgttccccacaggtctgcgtggctcccaccccacttcgtttaagccttatcgcgagcgccacctgctcagagaggtctttcttgagtcccattttcgtgatggctccctcctgtgacccagcttggttcagctttatttttctttgtggctctagcgccgcctgtgggtcgtgtgtgtatttacatatgggattatcctgtcttcagccgtgctcttttgatatggagctgccggcttcgcttccacagagcaaaaccttgtggtcctctgggtttactttttctttttgttttcttttccttcattttattttattttattttaaagacaaagtttcgctctttcgcccaggctggagtgcaataatggcgcgatctctgctcgctgcaacctccgcctcccagattcaagcgattctctcgcctcagcctcctgagtagctgggactacaggtgccgccaccatgcccagctaatttttgtatttttagtagagagggggtttcaccatgttggccaagctggtctcgaactcctgacctcaggtgatataaccacctcggcatcccaaagtgctaggattacaggcgtgagccacctctcccggccggtttacttttttggtttatttttcattgcctgttttggtagaaatatatgtaccgggaaatggttctctgagttagcaaaaaacaacagtgcaagtgtgatgataaatgatgaccagtgtcaactgcagtgtcaccgagaccacagggccttgggagtaccgcagtggcctggcaagcacgtgtctgtctaaaaggggcggctgcaactctgctcctgctaggtttccaggtgggaccgcaggtcagccagattcctttttcaagatgagatgagcaggaaatccggattttgtgtgagtttccccaaatgtttgaaggaagctttagtttgtttttaggaactcccttgataaaacacatttgtggactgaatccagtgtgtgggctgcacctttacaacttctgccaccactgtgcaggtgagggacagagcagggaccacgcaggcctctctcggcccccacctaccctcattcctgcttccattctctcttcatctgggaaaacccctctcctgagagatcctggtctctggtctttgtctgcacagggatccaggagctcaaggggagggtgagagggtgaggccccggggctttggttgcgtctctttgttgtgactctctgctgaggcagagatgacaaaatgaaagcctgcagtttccctcccaggactgaggtcagcccgctgggctggggctggactcctggggcatttaaagggggctggaggtgaaggcgcgtcctctgagcgtggtcctgtgtgtgtgcgtgtgcgtgtgcgtaagtgtgcctcagtgagagcacatgagagctcatgctagctcccatgtcttaccctttttcacacttgaccaggccctgacctccttctcgggcctcccagagcccctcagatcaagcacaaccttctcactgctgcaaatgcctgccttgcgtggccagccctgacagcccaggccctcccatcctctgcctcacaccccggctccagtgcctgcaccagccacagctggcacctctcccaccaggcacggttgcactctcagctctgggcctttgcacaggctgtgcctgttgcctgaacacgttcctcttctgcttcccccgatcatcctgcagatctcagctcagaccctcccttctctaggaagtcttccctgaatccctccctgggagcaggcatctcctccccttctctgtgcccccatctcagcaccgtcccctcgagctctctgctgcagcctcatcagcctccttgctgctccccagcaccgggctccctcctgccccaggacatcacacctggtgcttgctctgcttcctacccctccctctgctctgcccatggctgactccttctcagccttcagctgtcagcttgacaccagcccctccctcacctggcacctgacaccacagcccccgccctcccatcctgctacccagctttgtgtctgacagtgccgcggggcaccagctggcgcattattcattttactcatcctctcgtctgttgtctgtctccctgtgctgagaggtcagctccttgaggacagggatttttgtttttttcactgccgactgttcagtgcccagaatggtctttggcgcacagtaggattagtagttgctcactgggtgtatgaatgaagctcttgtgagtagctgtggccacacatgagtgtcccaggaggacccctgaccctctgtctgccgcccccagagccggctacctgactctttacggaattgaggcgctgccacgcacccatgaaagccaggcccaggaccgcgtccactcagctgatgtcttccacacctttcgccagctcgaccggctgctccccaaactggcccgtggctccctgtcagtgggtaagcaccatgggggccccagtgggtgggggggaggatggaaagacccagagggggagcccaattcaaggtagaggaccagaggcaacacaggcagaaagacatccaatgcccagggaggcagtaagatccccatcactgggggtatgcaagagcgcaatggtggggagccagggcttggaccagagcttgggttcctggtggaaattctgattcagcacatttagagtggggctggagaatctctgtgtgtgtgtgtgttcctttttgtgttttaaggtttgagttgctttaaaagtttttacaagtagttcgtgctgattataaaaaattcaagccatatagaataatttacagggaagaataaaagagcgctccactttctccccagcctcagcccaccacttccctctacagaggcaaccaccatcactagcttggagtacatcctgggagcactttctctaaacagacacacagatgtgtgttatttttatttttattttatttttgaagcttttaacttcttgttttttactgaggtataatttatatacaggaaagcacacacatctaaacgcactgagaggccaggtgcagtggctcacacctgtaatcccagcactttgggaggctgaggtgggcggatcacttgaagtcaggcgtttgagatcagcctggtcaacatggtgaaaccccatctctactaaaaatacaaaaattagccaggcatggtggcgggtgcctgcattcctggctactcgggaagctgaggcagaatagcttgaacctgggagttggaggttgcagtgagctgtgatcacgccactgcactccagcctgagtgacagagccagactctgtcttaaataaataaataaataaataaataaataaataaataaatgcactgagaagtggatctaaacattttatgctctttcccagccagtattcacccctgcgaggtagccactggactggtttcttttacctccaattagttttgcctattcttcagcttcctagaaatggaatcacacagtatgtgcccttttatgcctggcttctttcactcaacttgatgttgggagattcatccaggttgttgtatggatcaatagtccagtttttatttattttttgttttttgtcttaaaaacaatttttttgagacggagtcttgctatgttacctatactggtcttgaactcctgggctcaagcgatcctcctgccttggcctcccaaagtgctgagattatgggagtgagccagcatgccttttttttttttttttttttttttttttttctgaaccagggtctcactctgtcacccaggctggagtgcagtggtgcgatctcggctcactgcagcctcaatctcctgggatcaagtgatccttccccctcagcttcttgagtagctgggactacaggcatatgccactaggcttggctaatttttaaatttttttgtagagatgaggtttcactatgtttcccagactggtctccaactcctgggctcaagcaatcctcccacgttggtctcccaaagtgttgggattacagacgtgagccactgtgcctggccaacagcttgttctttttattgccgtatagtatttcattaaagaaatatgccacaatttgtttatccattcctggttgatagacatttgagtagtcccccatttggagctgttaggaagaggttgttgtgaacattcttgtacgtatctttcagtgcacacgtgcatttcttttagctgttggcctgttttttgttttgtttttgtttttgtttttttgagacagagtcttgccctgttgcccaggctggaatgcagcggcacaatctcggctcgctgcaacctctgcttcccggggtcaagcaattctcctgcctcagcctcctgagtagctgggattacaggcacgcaccaccacgcctggttattttttgtatttttagtagagacagtgtttcgccatgttggccaggctggtcttaaactcctgacctcaggagatctgcctgcctcggcctcccaaagtgttgggattacaggcatgagccaccacgccctgcctagcctgtacttctataacttagatatatcacactagaagaattgttgtaccgcttacagctttcactcaactccctgtctacagcatttccacatcgatttgtaaaaatctacctcatctgtttttgtggctgcagagcgtacttagtgttggtagagtgtcctggctgattccgtgtgcaggggccgtaggaaccactgggcggcgccattccctgggccatgtgcccccaacttccctgatgagcagaatcctctcaggcccttcttcataacgtaggtccctcagccccatccaggtccataggaatccaggtctccaggggagagcttggaaaactgcatgtctgacaagtgtcctgagaaggctgggaagtgctgtgtgtgctgggctcagagacttgcagcagaggcctggatttgaattcctgcgctgctgcttccttgctggtgactcggagcaagttacttctacttgccccagttcctttctctggagggaccgtggaggggagtggctaagacagagtctgggctctgacggcttgaagagctttaccagctccccctcccagcatctgtgtgttttctctgtgcctcagcgatctcatctgcaaaatggggggaacagcaggatcttcctagagggcagctgttagaattggctgaggtaacaagaaaaagcactgtggccgggcgcggaggctcatgcctgtaatcccagcactttgggaggccgtgacgggtggatcacctaaggtgaggagttcaagaccagcctggacaacatggcggaaccctgtctctactaaaaatacaaaaaaattagctgggcgtggtggtgggcgcctgtaatctcagctacccgggaagctgaggtaggagaattgctagaaccctgcgggtggaggttgcactgagccgagattgtgccactgcactccagcctgggcgacagagtgagactccgtctcaaaaaaaaaaaaaaaaaaaagaaagaaagaaagaaagaaagaaaagaaaaaaagaaaaagcactgtttgctgagcacttactatgtgccagatacgaggttaagcattgtcatagtcagtgctcaaacacttcatcacccatttccttttgcttatatatttttaaaaagccaaactttaatgcattattgattttgtttacattatgagagaatcataatcttgtggttaacaattcagagttacaggttgtataaaatataataccccttcttccaagcccagcttcctgtgaagccaatgttagcatggtggtattatcccttcatggtattttgtatgttctcacaactagagacaaatatgcacatctacagtgtctctgtgtttacaaagaaaaattgtatctgttatttacaacctgtttttaacctaacaatatagctgtacattcttctctgttgatataaacatcttttagagatattagctgatgcaattaaacaagagaaaccaattatagacatcagaatgggtaaagaagtaaaactattcctatttgcagatgatctgatattgtacctggagaaccccagaaaatcaataataaaacaaactccagcaataaatgaatccagcaaagtagaaggatatgaaattaacattaaaaatacaagacatctggccgagcacggtggctcatgcctgtaatcttagcactttgggaggctgagacaggtagatcacttgaggtcaggagtttgcgaccagcctggccaacatggcgaaaccccatctctaccaaaaatacaaaaaattagccgggcatggcggcaagcgcctgtaatcccacctacttgggaggctgaggtgggaggatcacttgagcctggtgagacagaggttacagtgagccaagatcacgccactgcactccagcctgggtgacagagcaagactccatctcaaaacaaaaacaaaaacaaaaaaccaatacatttttttagccctcacatggctgtttcagtagttagccatttccctctgacagatgtcaatattctatctttctttctttttgcttttataccatttcattgtacttgtatctgttctaccatctggttatttcatttctctctgcccacttcttagaagtggttttgccaggtcaaaggccctatacattaaaatttttatctgcttctgccacatcatttccaaaaccacagagcaattcatccgcctacctaaagggaagaaatctgctccaccagatgccatcaatctttccatttatttgctaatctgatgggcagaggtgggtaacttattgctttaatttgcatgttaccacaaccttgccaacatgcagttatcagcctttaaataattgccaatctgatggaaaaaaggacatctggctctatgtggcatatcactgactactgtgatgaaacatctctgggtgtgtgtggtttttttgttgttttgaaacagagtcttgctctgtcacccagactggagtgcagtagcgagacctcggctcactgcaatcttgacctcccaggctcaagcgatcctcccaactcagcctcccaagtagctgggactacaggcacgtgccactgagcctggttaatttttgtatttttttgtgtttcagtagccatttgcatttcctgtttatgagccggctgtttgtgtcctttattatctttttagaggaactcatttgagcttatcaaatcttgccatccatgctggaaggttgttattcacatacccatgttgcagataaggaaactgaggctcagagaggtgagatcacttgtcatagacatgcagctggtaggtggaaacttggtctgtctgtctgcaaaatcctgtgcataaagcacctgccacatcctagcactgattgcttccccaggaaaaattgggtttctccattaccatttcctccacacagatgctccagaggagtctgattagacgcagaggaactccccccatcactctgggagcagccctgggctggctataggaaggatgcatttctcaatatgagcagcaggtggcaatgtgggacggtgatttctcatcttaattgggaccagaggcatgtgggcaaagcagcccccgaacattgctgtggggtgcttgaagcattgcagcctcttttggcagaacctgctgaaacataaaataaaatgcacattcctttgatcctgtacttccacttctaggaatttatcctacataaatgcttgcacatgtctacagatacacaaacatattcattgtcacattgcttataattgcaaatgctagaaacaatttaaagtccatcagtaagggctgattaaataaattatgcattcatctaaaggccatctatgcatctaaaacagagtgggacatactggtagtgaatgaaatctactgttacaaaaaagagcaagctgcaggcagagggtatactatatcactatatatacatacattttatatatatatatatatgtttttgcttttgagacagagtcttgctctgttgcccaggttggagtgcagtggcacgatcttagctcactgcaacctctgcctcccaggttcaagcaattctcctgcctcagccccccgagtagctgggattacaggcacgtaccaccacccccggataatgtgtttgtacttttttagtagagctggggtttcatcacattggccaggctggttttgaactcctgacctcaagtgatctgcctgcttcagcctcccaaagtgctaggattaccggtgtgagccaccacacccggccatttttaaaaatgtgggagtatgtatagatttttgcctttgggaaggccgagaaggggtggagagaaaatcattttttacaagatgtggacttgaactcttagattctttatttttcttcttttttttctgtatgcatacattattcttccttcactttttaaagtataaatatattttaaaagaaagttaatcctttgagaacccttaggccattgagtctggtgtttctcatacagtagggagttgggggcaggggacagttaaacagaccccctagctaagcatagtgcttctgtctggaacatttattttactggattattttggggggctgtttatttgaacattgttttggggaaaaaggcattcttatatcaaagaatcacagagtctgatgcaaaactctgatgcatttcaaaggtaaaacacaagactttaaagacatgtgtcttctgggggcctctctgtactatgcccccaaatctagagggcctagagggctttcccagaaaaaacttgagaggtattcaagtctgggtcctcattttttggatgaggagactgaggtccagagatgggcaggggctcagccgaggctacatagcatggggactctgggatttaaaccagatacaccaatctggtttaaattggtgggctgccaatcaccgtgggcctggcagccctcattcatggcatccggttatcacaccaataagaaatacctcgtaataatggagagaatgtagcaagtagcattttacaaacttctaccgataccaagtgtgttctgtgtgtgatctttctgaatcctcctgaccatcctatgagctagatggccctcattttacacatgggggaaactgaggctcagagatgcaaagtgacttggccaaggtcatctcgttagaaagggaagagctgggatttcaatgctctctgtcttcaaactttgtgctctgtatttcgcaatttattattgtttcttaattaaagaagcaattcatgaacatgttctccttgggctaataatttgctaacattcagtaagatttgttatttaataatatagcgtttattaggactgtgtcagtcatctctgtgctttagatgttaataacgcatttgatctgtatataaccctctgtggtgggtacttttattatcccaatttacaggcaagaaaactgagatgctgagatgtgaggtgacttgttcaaggtcaggcactctgctacagcactgggcctcttaactgggctcctctgacttttgttaaaaaaaaatcaaatatttcaaaaaggaaaattctcttttgaccacattccctctaaatctatccccaggtaactattgctatctgtttgctgttatccttctagaacagtgctgtacatagacaaataatgggaatcacatttgtaatttaaaattttctattagacacactaaaaaagaaaaatagaagtgaaatcgattttaataatacattttatttaagccaatacatctaaaatattattagcattttagcattaaccaatgttaaaattattgataagatattttacattttgtttctcatgctgactctggaatccagtgtctcccctaccctatattaaatgtggctgcattcgagccagccgcatttcaaatgctccataactccctggggcttgcggctactctgtttcccagaacaacacttggcctttatgcagacattaaaatacagcatgaggctgcgcacagtggctcacacctgtaatccagcactttgggaggccaaggcaggagaatcacttttgttcaggagtttgaggccagcctgggcaatatagacagaccttgtctctacaaaatataataataataattagccagttgtggtggctcacacctgtagtctcaactactcaggaagctgaggtgggaggatcacttgagcccaggaggttgagggtgcagtgagccagactacgccattgcactccagcctgagtgacagagcaagaccttgtctcaaaagaaaaaaaacaacaaaatagcaaattgtactggaatcccaagtagacagcaagcctctgttttcccagtgggaagatttttaaaattttgtctttttttgatttttggggcaacctaaatattgaaataattaggaatggaagtaaatagttgcatttctccgtatctgttttgttgaacgtctgtagtgaattgtataaatgtgctgtaaccatttcgaacatttgctttcttcccacgaccacatttcaggagggggctttatgcagactccccctttaactacacagctttgctcatctgcagggccccaggttgagccaccaagctcagttttccagaatcttctcttcctcactcccatatgcactgaattccttgaatctctacagtatatgatgtttcactggaaattatttttggggggtttgccagattttctattattttattttaaaaattatttcgcgtggtttaaacattaaaaatgtaaagtagattacaaaccacatacccgatatggggttaacatccaaaatagataaggaactcatacaactcaataccaaaaattccaaataacatctgggagcggtggctcacacctgtaatcccaacactttgggaggccgagttgggcagatcacgaggtcaagagatcgagaccatcctggccaatatggtgagaccctgtctctactaaaaaatacaaaaattagctgggcgtggtggtgcacgcctgtagtctcagctactcgggaggctgaggcaggagaattgcttgaacccgggaggtggaagttgcagtgagccgagatcacgccactgcactccagcctggcgacagagcgagactctgcctcaaaaaacacaaaaatccaaataacctgactgcaaaatggacaaaggaccagaataggcatttttcccaaagaagacatacaaatggcaacaggtatgaaaaggtgttcaacatcactactcattggggaaatgcaaatcaaaatcacaaggagatatcaccacacacccgttagaaatgtcaaaagatgacaaatattggcaaggatgtggagaaaagagaactctttcgcactggtggtgggaatttaaattggtatagccatcatggagaacagtatggaggttcctaaaaaatcaaaaatagagctaccacatgatccagcaatccctcttctaggtatatattcaaaggaaatgaaatcactgtcttgaagagatgtctgcacctccaattcattgcagcattattcacaacagctgagacatggaaacaaactaagtgtccatcagtgcatgaacagatacagagatagtggtacaatggccccctcttaacctcaggggatatgttccaagacccccagtggatgtcaggaaccatgggtggtactgaaccctgtatatactgttttgtcttatacatacataactatgacagagtttaattttttttttttttttttgagacagagtttcgtttttgtctcccaggctggaatgcaatggtgcaatcttggctcaccacaacctccgccccccagattcaagcgattctcctgcctcagcctcctgagtagctgggattacaggcatgcaccaccacacccagctaattttgtatttttagtagagacagggtttctctgtgttggtcatactggactcgaactcccgacctcaggtgatccgcccacgtcggccttccaaagtgctgggattacaggcgtgagccaccatgcctggcctgataaagtttaatttataaatgaggcacagtaagagattaacaacataataaaatgaaaccaattataacgatatactgtaatgaaaacaaaataagggttacctgaacacaagtactaccataccatgacagttgacgtgataactgagacagtggctcccaagtgactaatgggcaggtgtggtctacagtgtggatacaccggacagagggatgattcaccccccaggcaagatggagcaggatggcacaagagttcatcatgctactcagaatggtgtgcgatttcaaacttagggagtttttcatttaatattcttggaccatggttgactatgggtgatggaaaccttggaaagtgaaactggataagacaggactgctgtgtatgtaaatccacgaaagaatgttattcagccataaaaagggagaaatcctgccatttgtaacaatatagatgaacttggaagacaatattgtaagtgaaataagccagacacagaaaatcaaataccgcattatgtcatttatacgtgggagctaaaaaagttgaattcagaggaacagtagaacagtggttaccagggctcaggaggtggggaaatgggggtgtgttggttgagggtataaactttgagttataaaatgaataagttctggagatttaatatacaagtatacaatgtattgtatacttgaaatttgctaagagagtggatcttaagtattctcaccatgcatgcacgtgtgagtgtgcacctatgtaaggtgatggatatgctaattagcttgattgcagcaatcatttcacaccatatttgtgtatcaaaacatcatgttgtacaacttaaataagaattttcctttgtcaattatacctcagcaaggctggaaaaaaattaagtaataacagtggtaagtctccttccttttcttgtcacatccccttccaccaattcccactgctcataattgattagttttattagtttcaaatggatccttctagagttccttcacacaagtgcaagtgaatgtgactatattcttatttttctttttttccacaaatgcatactaaacacgtggttgctggcactttgctttgtgctaacaatatatcacagcaatagataactcttgggtaaggtttagtgtgtcctctacactgctctaagggatatacaaatgtaaactgatttgatccatgatccaatcactgctatatatatattttttttgtttttgagacagagtcttgcttgctctgttgtccagcctggagtgcagtggtgcaatctccgctcactgcaacctctgcctcctgggttcaagcgattctcctgccccagcctcctgagtagctgggactacaggcgcccaccaccatgcttggctaatttttgtatttttatatttttgttagagatggggtttcaccatgttggccaggctggtctcgaactcctgacctcaggtgatctgcccgtctcggcctccccaagtgctgggattacaggagtgagccactgcacccagcccactgctatatttttatcctgtgttttttgccaggcaggacagagcaggatggcacaagatttcaacacactactcagaacagcatgtaatttaaaacttatgactgtttatgtccggaatttttcatttaatatttttggaccatggttgaccatgggtaactgaaaccttggaattcaaattcttttgtattttgagtatcactctgtcacccaggctggagtgcagtggctccatctcagctcactgcaacctccacctcccgggttcaagtgattctgctgcctcagcctcccaagtaactgggattacaggtgcctgccaccacccccagcttatccttttttgtatttttagtagagacggggtttcaccatgttggtcaggctggcttcaaactcctgaactcaagtgatctgcccaccttggcctcccaaagtgttgggattacatgcgtgagccactgcacccgcccagaatgcaaattctttgttatacaacactatctttgactcatttttgccaaatgaccttcatatgccttttaaaaaaattgtggtaaaataataaataacataaaatatactattttaaccattttaattgtataattcagtggcagtaaatacattcacaatgttgtataaccatgccgttatctatttccagaaacttttcatgattctaaacaaaagctttgtgcccattaaacaataattccccacctgcctttcctcccagcccgacatatcttctattctactttctgtctcttctattctactttctattctactttctgtcgaatagtatacttctattgtactttctgtctctgaatttcctgttctaggattctcattatatgagattttggagacagagtctctgtcgcccaggctggagtgcagtgtcgccatctcagctcactacaatctccgcctcccgggttcaagctattcttgtgcctcagcctcctgagtagctgggattacaggtacacaccaccatgcctggctaattttttttttttttttttgtattttagtagagacagggtttcaccatgttgcccatgctggttctctaactcctgagcccaggaaatctgcccaccttggcctcccaaggtgctaggattgcaggcgtgagccaccatgcctggcatatgcgtcagaatttcattcctttttaagagtgaatacattgtgtgtatatactgcattctatttatccattcacctatcaaccgacatttgggttgtttctgccttttggctactgtgaataatgctgctatgaacattggtgcacgagtatctgtttgagtctctggtttcagttctttgggctatatacctagaactagaattactggatcatatggtaattctttaactttctgaggaactgctaaactctttttcacagcaactgcagtattttacattcccaccagcaatgcataagggttccaatttctccacgtcctcaccatcacttatttcctatgttttaaatagtagccatcctcatggttgtgaatggtatcacactgtggtttttacatgcattttctaatgactaatggtgttgagcattgtttcatgtgtttatcagccatttgtatctcttctttggagaaatatctattcaagtcctttgccaattttcaaatcaggttgtttgttttttattgttgttgagtcgtaggagttcttttatatattttgggtgttagacccttatcagatatattatttacaaatattttctcactttctgtcagctgtcttttcatactgcattaccttttttgcttaattattcattgattgtgcaaatatagagtgcctcctatgtactcagaactgctgtaggcacaggggaaaagtggagaatggtcctgccttgctttttaaagtcatctgtaaacgccgtgtttacagtgatattcaagattgcagttgtgtggtcagacttcaaagaatgccagttatttctaaagctgtgttaaatttctttgcctctttttttagccatcccatcagatgatgcttagaagtatccagagttggcatcaactgaggtggtttcaacactgcccgcgccctgcaggcctaaacctctggatgcccagttcccacgcacgtgattttgacatgatcaatctggggttggcacctgggcatccagagatttaagagctcccaggtaattcttcagagagcctgaaaagtggagaaacataggaagataatgtatttcagttgaacacttaagcttattgctttacattgaaatgtcacccgaaatggtgacattcatttcaatgtaaaacaatgagctcaagttgaagtctaaaagttaaacatattcagcgtattatttgaaaatgaagccaacatactttaaaaaaaaaacatagtctacattttcgaccctttcaaatgccctgtgaggtgcagccaggtttagaatcgctggtggggcgagtcttcctgaaacacggcttgtggttcagaagagtcagtgagggagtttccaatactttgaaacttcagagcaatccaaaatgactctcacttttccaaggggtgatttcggagaaaaccaaattttatattttatatttttgttttaaactttatatttgtgcatataaatagcattaccgtggagctttaaaacaatgtatattaaggctcatgtatggttcatgaaaatattttaaaaaaaaaaaaagaagtagaaaagaaaacaatatctaaatagtgtcattcttcagtgcccggctttatccccttaccagtctgcccttgggaactctctgtgtctgtaggtaaaatgtactaactcactttcactgctgtatgtttccagaacataaacacaccattgtctgtttaatggtgatgcacgctagtgatctgtgggccaaagttgaccttcagagatgcttctgtggtctgcacagtgattaaaaactttttacttggatgctaaccttaaaaaacatcagaaggttatacataattgtctggattatcagcttcctttgaaagcacaggccttctggccatgctggggtgtttccctctcctgccgagggctggttggtgggctaagtgccatggcccctttctggcccgtctctcttttacttggcctgccttctctggagtgagttgagtttgagactccagcccaatctgccagttaggttgttgctgatgtctttctgtgattgctgctgtgctgagcctgctcacagtggcctcctcctcatgcacatgggctggcattgctctggggttggaccctggggagggagaatgctgctcagtgtttagtgttccttctcctgctctggaaagaactaccatttatttaatgcatgatatagttttgctgtgtccccacccaaatctcatcttgaactgtagctcccataattctcatgtgttgtgggagggacccagtgggagataactgaatcatgggggtggtttcccccatactgttctccttgtagtgaataagtctcatgagatctgatgattttgtaagtggtttctccttttgcttggctttcattttctcttgcttgccgccatgtaagatgtgcctttcaccttccactatgattatgaggcctccccagccacatggaactgtgagtccattaaacctattttttaaaaaataaataaataaataaattacccagtctcaagtatgtctttgtcagcagcatgaaaacagactaatacaatgcatatttattgagcacctgctacgggccgggtgatggggacatagaggtgattgaaatagatcaggctcccacctgcaggagacaagaccccttgcttctttttactgggggtaagacagataataagcaatttggtattgaaagggcttcctgctgtgggcctgtcctgcagcttctttcccacaggaactccccaccctcaatgagtgacattcagaagacccttggcctcatgggaggtcatgcctggccagccctgggtgtgggatggtgaatctgtaacccctactctctgtgctctgtccctgcaggggacaaggaccacatgtgcagtgtcaaaagtcgcctgtggaagctgctatccccagccaggctggccaggcgggcccaccggagcaaatggctggagagttacctgctgcacctggaggagatgggtgtgtcagaggagatgcaggcacgggccctggtgctgcagctgtgggccacacaggtgggtgtgaatgtgcaagtgggtgtgtgcaggtgtgcatgtgtggttgcgatatgaacgcatgtgtgtgtgcatgtctgtgcacctgtgcaggtgtgcacatgactatgcctgtgtgtgcatgtgtatgtaggtgtgcatttgtgagtgtgtgctgatgtgagtgtgggtgtgtgcacacatacccactgcccaaaccagttccctgacttcctttactgtcaaatagcatcacgaacagaaacattcattcggtattcttttctttttttttcttttgagacagagtctcgctctgttgcccaggctggagtgcagtggctcgatctcagctcactgcaacctccgcctcccaggttcaagtgattctcatgcctcagcctcccgagtagctgggaccacagttgcctgccaccatgcctggctaatttttgtatttttagtagaaatggggccaggctggtctcaaacttgacctcaagtgatctgcctgcctcggcctctggaagtgctgggattacagtgtgagccaccacgcccagcttctttttgttttttgttttttgtttttgtttttttttaatttggaaaaatgttaaatttatagaaaagtttaataaatagtttaatgaactcctatatatgcctcaccttgattccccagttttaaacattttaccacctttgctttctctctctctgtctctctctctcttatgctctcttttccccactgggattattttattgaaataatttgggaataagttgcagatatcatgcttttttatccctaattgcttgagtgtaagcaagaacatctcctgcatgaccacagtacaataaccaatttcaggataatgagcccaaatacatgatcattatctaataaacaatctgtattccagttttgccagttgtctcaataatgtcctttttggttcatcttggtccagcatccaatccagaatcacacgttgcatttagtcattctgactcttctgttttcttttcttttaatttttttatttttttgagatggagtcttgctctgtcgccaggctggagtgcagtggcataatctcggctcacggcaacctctgcctgctgagttcaagcgattctcctgcctcagcctcctgaatagctgggactacaggcgcatgccaccacgtccagctaattttttgtatttttagtacagatgggagttcaccatgttggccaggatggttttgatcttttaacctcgtgatccaccagcctcagcctcccaaggtgctgagattacaggcatgagccactgcacccgacccattttctttaatctggcacggtttctgtgcgtttcattgtttctcattacatttacattttttgaagtgtgcagaccagttattttgaagaattgtttagaagttccattgagacactgggcatggtagtgtgcacctgtagtcccagctagtcaggagggtgaggcaagaggattgcttgagcccaggagtttgagaccagcctgggcaacatagtgagattccacctcttaaaaaaaatcctttgagtacttaccgtagacctcaaagattctgtgttgtgtcgattaccatttggggggtcaggaggacagggggcagagagtcaaggaaacatatacaaggtgattttagatgatgatatgtagagtatgaaacagggctgtgaatagagagactttcgggtctgctctagctggggtggtcagggaggcctccctgagatatttgagatgagccctggatgataagaaagctagattcagagacttggagaagatatggggatagaagattccaaataagggaaacagcaagtgcaaaggccctggggttggatcttgcagagtagagttggatcacacagctgaagcagagtgagggagggggcgtgagaccgagggaagaggtcactgagggccttgtgggtcctcataaatgaggacttgggatttttctctgggcgagatgggggcctgggagagttctgagcagaggagggacaggatcttgggggcaaaagcaaaaacagggcaacaaggaggaaactgtggtggcagggtcaggtggtggccatggaggtgatgaggacgtggatagattttggaaatttcaggaagacagagtcagtggacttggtcatggaccagatattggagtgagagaaagatggtagccttccatgctgcacagctccaggcctggttcctgccctctctcctgatccccaagccccatctttctcttggccccacttcgacggtgacagttgcacaagctgacatttctgggtaattcctctcccatcgacttgcagcttatttttagtttcctcagagccattaactgtccttgcaggcagagactggcaaggggtggggactgggatcaattggcagttgtcccccacatcagtgcctaataacatatttatgtgcagagatgacttggagctccaaagtgtctccagaactctcgtgggaatgactggtgtcagcaaaactggatgctggctgaggggtttgagtggcagaaagtccagggaacagcctttggcagggccaggagagctgggcaggagctggggacaagatgtcctctgaggttgagtcgttgacagcgtccagaattcaggcaggtgggaaaacttttcaagggccttttgggagtggagccaagagggtacttggcctaggagtttctggcacaggctctgtgacctcccagcctgagtttgaatcctgattttgacacttcctggcaagtcagtcacttaacctctgagcacctcggtttactcatctgtaaaatggagatggtagcacccgtttcaagacgtggttgtgaagatgaaaggaggcaggaatacatgtgcaattttgtaactgtgccttgcagataacaagtgctcaagaaacatcttcaacaaatatttagagcacctaccatgggccaggccccattctagaagctggggatagagcggtgagcaaaacagacaaaaatccctgcccttagggagctggcattctggtgggagaagatagacaattaataaacacataagctgtcatcacagtgctttgggaagttagagaggaacatcatttgagtcctagagttcaagaccagcctgggcaacatagcaagaccccatctctgcaaaaactaccttattttttttgtagaaaagctgggcgtgatggtgcgcacctgtagtcccagctacttgggaggctgaggcaagagcattgcttgagcctaggaggtcaaggctgcaatgagccatgattgtgccactgcactccagcttgggtgacatagtgagaccctgtctcaaaaataaataaataaataaacaaacaagtaagcatctaaaatgtattagaagtcaggcgcagtggctcacgcctgtaatcccagcactttgagaggccaaggcaggcagataacttgagatcaggagtttgagaccagcctggccaacatgatgaaaccctgactctactaaaaatacaaaaattagccaggcatggtcgcacaggcccgtaatcccagctactcaggaggctgagacatgagaatcacttgaacccgggaggtggaggttgcagtgagccgagatggcaccactgcactccagcctgggcaacagagtgagactcccatctcaaaaaaaaaaaaaagtattagagggaatgtgttctatggagaagagatgcagcaggaaggcaggcccaggaaggcctcactgaaaggtgacatctgagcagagactgaaggaagtgaggggtgaaccatgtaaatatatagaatgaagtttcccaggcagggagcagcaagtgcaaaggccctgaggcaggactaagggtgacacggtggggaggcagagctgccggaccacacaggtccctgtaggccatggggagggctttggcttttactgtgagtgagacaggtgcctgctgtagggctctgagcagaggaagaacctggcctgtctttcgctttagagggatcattctggctgcagcgctgacaagagactgtagggggtggggaagcagaggcagggagagcagagaggagcagcaggatccagacaagagagggtgctgctgggccagggtcaggggtggttagattctgaacatatatcaaagtaaagccaacaggatccgctgttggatgggaccttgggggaggccatcaaggatgaatccaggtttgggcctgagtgacaggagggatggcagagccatgggcagaagagggagatggcgggaggaggaagtttcagggagaagatcgggggttgggctttgggtatgttgaatttgagatggagatgggggagtggacacctggagaagagagtctggagttcaagtttgaggtccaggcttgggagttgtcagcatagaggagtttaaatcctcaggactggaggagatactgcaggcgagggtgggtgaagaagggggcatccctggggctctccagtggtgggaagggtgaggaggaggggccaggaaggtgggaggagagccgggagtgggaagctgggtcagatgctgcagagaggctgaaaaatggtagctgtgattgctgctgtcaggtcggagatgatgagtcaggaataataatctcaaaagatactgagcacttaccctgggccaagcatcctgttgagcactttgcaaccaccatctcataggatcctcacaacagcttcctgaatccagaacccctgaacctggaatcgagagtgatggaaggagcagtgggagtctcaggcatccagggaggactctgtgggccgagacctaaggtccaggcaaggggaagaggaggctgtaagggaaggtggggtggggtggtggggggcagacggaggagagtttccaaacacaggtcaggcttccctgccagctctgagcccactgatgctggtaatgccaggactgaaaccattgattgacatgatgtccctcagccccatccatcacatctgatccttctcttccttcccgatatctggcttggccttcaccccatcacatcctcagcagccacagccacacatccctggaaattcctgggtggtcctgagaggtaggggagggggccacgggagctgctgggcctgcacatagctccgctgagatagtgatcatcgagaagaatccttgaggcatctgacaacggagtagaaagcaaaaccacagtattgagagtcagacagactcgggtggaatctcacctctgccactaaactagttatgtgacctcaaacaagtcacttttctgggcttaagtttcaccatctgtaaagagggttggtttttttgtttgtttttttttttgtcttcagtagttttatcttgaaataattttagattataaaagagttgcaaagatagtacaggagttcccaaatacccttcacccagctttccctaatgttacataaccacaatacattcatcaagactaagaaattcacattgggacattgctagtaactaaagtctatactttattcacattgccccagtttttctactaatattctttttctcttccaggagccaatccacaatcccacattgcacttagggcttttgtttgtttgttttaaatagactctatttttacagcagatttaggttcacaacaaaattgaaggaaaggtgcagggatctcccttagcccccttctcccaatgcctcgcctctccatcgctggtgtccctcagcagagtggcacatttgttacaatttatgacctacactaacacatcatcacactcgggatattcttttattccgttggaatcttctaaatcataaaaattaaaagaaacacaatctgtgacccccatccctcaggtctcccttcttctgccaggctacatcctcagagggtctccccctgggggatgactacaatggcctccagtagctctaggcaatttagcaatcccatggaggagggcttcccttcccctaaattctagcacagctcccaagactgatactcactggcccagcccacgtcatatgccccactctgcgtggatcactcagtgcctccgcctgggtcccatgcccacacttgaagtctggaaggatgggtcagtcctggatggcccacatggacttagacttaagaggaggtggttctttgaaggaaagtggggtgctgttaccaacgacaaggaagcggatgcaggcaggagcgggcagcggaagtcccccacttccactgatgggccatgttgtcaggaggcaacaagaaggagcatgtgaatcaccaagggtgtggtctggcccgcagtcagtgcctcccagaggtcagccactgccattcacaggaaagctagaacaggggtggcactgcttttgggtcatggcctttggctgcagtaggagggaatgaagacaaacaagaagtgtcttcctgagtaaacggaggcaaggctccgtgggtgaaagctcaaattccagggtggcaaattcaggatctcttatggttgtgtgtgcacacacacacacacacacacacactcacactcacatctgtgcagttgggtaaaaggcggtcttggtcacctccctaacttgccacagctttttcctgcaggcagagatagccaagcgcccatgtgttccactcctgcttggtaattaatgagcggtggcccccatctaaccatctgggccagataaaatggccttggcgctgagctaagctggtgttgaattatttatcatccgcatttgcctggctatttaagtgatggacagcaggtgaccttgctgtgtcagctggacctgaggtgctggtggaactctcagaaagggccggaggcccccccgacttgttttcaaatccaggggaggggccagtgggggaggagtaaccacttctgagcacctactatgggcgcagcacgtgtgggattgcttgcattcagcctcactggacccttgcgtccacccaggaggtggcaatgttacccccagtgttgagacccaaagggggacgtgacttgtccacagtcacagaaagtggggagctgggatttgaacccacctctacctggtctcagtccagggatcttctagcccacctcccaggctgtcttggagctccacctctaatccaaagggatgcagatgtttatttgacaaatatcagtgagcctccactatatgctgggcagtgggtagtgaccggggagtacttcgttttccttttcagtaaaaggcctaataatggcacctgcgtgatggaagtattgagcagaggagtgtggttcctcctggcctcacgggcactaaagaggaaggcaaaatctatctcaccatcactaatgctatggtgcatttctttccagcctttccccataggtttttcttctgtggttaagatcatgcagctgttttaatctaaccttctatttggtttaatattgtaacatgagcatctctcatgacattgtacatcactgtagaaatgatttggatacagcctgggaaacatagtgagacctcatctttacaaaaaatagaaagattagccgggcatggtggtgcatgcttgtatcagctacttgggaggctgaagtaggaggatcacttgagcccaggaggtggaggttgcagtgagccacgatcgtgccattgcactccagcctgggtggcttctgtttcacttaaaattagtgtgtccattaaaaaattttgaacagtttaaaaggtatttgcaaggaaagtcagcctccttcctccttatcctcttgtcttcccagcttctgtcccaaggtaacctcagttacccgtttctggtgtctcttagagatggtctgtgcttctttgggaggctgtggcaggaggactgctcgaggccaggagtttgagatcagcctgggaaacatagggagacctccatctctaccaaaaaaaaaaaaaaaacctagctgggtagcacatgcctgtggccccagctccttgggaggctaaggcagaaggatcacttgagcctaggaggtcgaggctgcagtgagctatgattgtgccactgcattccaccctgggtgacagagcaagaccctgtctcaaaaaaaaaaagagatggtctgtacttcttcatgtatatttctctttaaacaaacacacaaatggcagcatgctgagccaccaccctgcaccttgcgtttgcatgcttctgtgtgtcttggctacagtcccacatcggtacacacagagccagcttctttttaatgacttcctgcatcacatcatccaatggatggatcttcattgatctcattgatctcttattgatagacatgagattgtttccagcatttttctattacatgagcactgcaataattatctttgtgcatatgtccttttgcccatgtgtaattatgtctgtaatgaaattagtgggtaaacatgatatttaatgatgatttaatattccattattatgattgaatagaatagtcacggcagacaaaaaccttcccccaaattgagattagttggtattcttcccatatctggatcactaaagggtgccatatacacattttagccacataccaaagagctgaggctaaaatgtgtatgaaaatgttcagctaagactgaagccttgaagcaagaaattccactcgttttcctaagtgtttatctattgggaagtttaaataatttttattcatagctttcagtcatcaatgatgattgcggctttgttttatacgtacacaacacacacacatttattcttcaagtgactgatagaatttgaagatacaaagcatatagggaactttttgcttcccaaactacatcaagaatgattatatttggaagcaaatctttagatatcacaccagttagctattgttgcataacaaacatccataacaactcatcagcggcatacacccatcagcatttatttaactcacgggtctgtgggtctggctcattggggcagctcagctctgtccatgagtctctcatcctcctcttgggatcagtgggcttgccgagcaagtggaaacacaaagtctctcgcggcttaggcgtagagtggctgttccttcaattccacctcaatctattggccaaagcaagtccacggctgagcataaattcaaagggcaggggaaatacgctctggctcttgaataggaggaacagcaaattcacatggtaaggagcgtggattctgcgattggggaagaattggggccaacaatgtgatcattctcagatgtgaacagtcttaactgatataccctgttcctattactgacactgttttgctgattagctatgaagattacctgtgtgacctaggattagtgactttgcacacagtcagggatgccacgagtggccttgaagtaggtattttgggccacagggcagttttggccatgtcctgaggctggagatagacactggtcatgcctgggtgtttggcagcagtgggaacccaggcctactggcccctctgtcttggcccgagctgtgtccctggcagagacgagtcagctctgccctcataatggcataacaggggcccttctccttgcaggggaatatgggtcccgctgccttctggctcctgctcttccttctcaagaatcctgaagccctggctgctgtccgcggagagctcgagagtatcctttggcaagcggagcagcctgtctcgcagacgaccactctcccacagaaggttctagacagcacacctgtgcttggtgagatcgtcagaccctccaagatagcccctaagactgcgtcatcatggacccccaaagccctccccaacatggactcctgtcttccagggtccatcagtgtgtcctccgacctagggtctccctaagcctcctatcttcacacacctggcatctccatactccagcctcagctaggggtcaagtgacagaaaacctaacttcaattgactaaggtgaaaaggtactttgagacatgtcactaaaaagcccagaggattggcttcaggcacaggtggatccatgcactttaacaatgtcgtcaggactactcagttcctctccacctctcagccctgtttcccactgggttggctccagtctcaggctggcagtagctgttggcagctcaaggctgacttcctcctggctctgtgagactctgaatctcttacagtgttcccaccaagagtcccaagactgtgtctcattggctttctttgggtcatgtgtccatcctgaaccaatcacagggctcagagggatgctctgattggccagtcacagccccatcccaggagttgagcatagaagcagcagtctaacccctgagaatgagagaggggtggaccctagaggaaaatcaggggcccgtttccagaagagaaatatatgccgggcagacaggaacagagattgatggccctactctctccccagccttctgatatctccctagctcccaccttccctcacaacttctcttggggtcagacctggataccctcatgttcaaacgtctctgagggaccacagagaccacatgtcatcgtgtgtcctttttcaccttgctatgtgactgtgtgggcgaggcaggcaccctctctgagcctcttcatcttcctctgtaaaataagagctggggttggcatatgagcaggtgaagggatagcccgctgactcttccttgcacctgccccatgcagatagcgtgctgagtgagagcctcaggcttacagctgcccccttcatcacccgcgaggttgtggtggacctggccatgcccatggcagacgggcgagaattcaacctgcgacgtggtgaccgcctcctcctcttccccttcctgagcccccagagagacccagaaatctacacagacccagaggtaaatggcaggggcgcctggtcatatggggtctgtgggagaacaatcagtgactttgggatgagccagatctgagtggcagcctggctctgctctttgtttgctatgtgacattgcccagattgcttcacctctctgtgtttgcttcctcacctgtgaaatggacctcataatagcacctgcctcatgagattgataggaagattaaatgggatcatgcataagcagatattgatggccccactctctccccagccttctgatatctctttggctcctaccttttttcacagcttctcttggagtcagacccagatcccctcatgttcaagggtctctgaggaaccctagaacatgaggggatgttcattcacactgagtgctttgtgatagctcagccattttccttatttcagattgttataatgtcagtttctcaacacttttgccttgccccagactttgagaagaagtaaactttcacaattgctaacagattgggtgtttactgtgtgtcagaccctaaactacatgctcatctatccatccattcattcatctgcccatctactcatgcatctgtctattcatgtattcatccatccatccacacactcacttatctacctatccattcatctatccatccgcccatccattcatccatccacccaccaatttaccctttcatccacccatctacccattcatttatccatccagccacccatccactcatctatccatccatccactcatctacccatgcatccatctgtccattcatccattcacaaattcacccatccatccattaatctatccatccacccatgcatccatgcatccatccatccatccacatactcacccatctacccatccattaatctatccatccacccatccatccatccatccacccatgaagctactctttcatccacccacctacccatgaatccatccatctatccatccgtctgtccattcaatcatctactcatttatccatccatccacccactcatttatctacccactcactcatatgtccatccacccattcttctacttatccacccatccatccatctatccacccatctactcatccatccatccatttgtccattcatccatttattcatccatccacccatcaatctacccattcattcacccatctacccatccatccatccaccccatctacccatccatccatctatccatccctccattcatccatctttccatccacatttccatctcttagtctatccactggttcattcacctatccttccacccatctttcagtcggcagctactccatgccaagctctgtgctcagctacaacccttgccttaccactgtgcagtgtaaccaaaggaaattggcattttctttttaaaaaatattttaatttcttttattttacattacaaaagtaatatatatcatagaatataaagaaatacagagaaatatatacttaaatgtaaaaaatatgtatttcccttcttctccagttctacagagttctctgaccaaggtttggagtgtgccttgcgaattgttttcatggctttacaggcatacacacaacacattcacatgccatgaaaagattggtgtgtgtataggatcatgcaatatatactattctgaaacttgcttttttcactcaacaaccaattgtagaaattctttccatgtcagtacacacaaaccttttgccataattttttaaccaatcccctatcaattgacctgtatatggtttccagtttttccctcttataaacatgactgtcatgaacatcctcatacatttttcttggtgtgagcttgttctgggaatggggtcagaaaaggaccttcttcctatttcaggtatttaaatacaaccgattcctgaaccctgacggatcagagaagaaagacttttacaaggatgggaaacggctgaagaattacaacatgccctggggggcggggcacaatcactgcctggggaggagttatgcggtcaacagcatcaaacagtgagtggggggccagggcagggccagggtggctcctgatcccctggttggcaggcgcccttctctcctgggactgagggctcagccaggagaatggtttggcagaggcttcacatggacagcccgtgagccatctcttatttgtggttttacaactgtgtgcttttataaatcagaagagctcgtgtaaaaaagccagatttcggatttcttttgaaataatcagatctggcagcaggttcttccctccaagactggtgtccagattccaaatactggacattcctttcagctgaccgtagctacccgtctgcagctgctgccgcatgttcagaacttcatgttaggaactggccgaacttcactgttcccacttggttattttaatacctgtggggccgagagcctcataaattatctcccttgaaccccaggagctttggccaccaggatcacaaacagattggaccaggggttatgacatctgccctgtcctcctgtccagcccctgtgcaatcataagctgggttaccttctgagcctgtttcctcaactgtaaaatgagggttctgattataactataccccaggagtgtcaggataaatgaattggatctttctaagttcttaacccactgtctggctcattgtaggcatttgaaaaatgttaattattaccataattgttaatatcattattgtgcatgcattgtgctaagtgagtgggcacgttacataaacctttagcctcagtttcctcaagaaaatggagtcaattatgaacataatacagctcatatgcattccttaaaatcaccttgctgtgtgaaatcatgcaacaaaaactgcagggattcacgcctgtaatcccagcactttgggaggccgaggtgggcagatcatttgaggccaggagttggagaccagcctagccaacatggtgaaaccccgtctctactaaaaatacaaaaattggccgggtgtggtggagcgtgcctgtaatcccaactactcaggaggctgaggcaggagaatctcttgaacccaggaggtggagattgcagtgagccaagattgcgccgttgcactccagcctgggcgacagagtgagactctgtctccagaaaaaaaaaaaaaaaaaaaaaagaaagaaagaaagaaaaaactgcagggattgagggaaaagggggactggggccaacactcaaaaacctcatcagtgacataataaaaaaaaaagagagagagagaagaacccagtaaaaaaaatggtagtaaagttttatacatgttacctggctaagaactatgtaagtgctgtaataactgtggctgtagatcgatgcttagttgtgtgcatgtgtatattttatggatttctgcacacccaggttcagctgggtgcagtctttcgtcttcacctcatgtttctcacaagtgaaattgcacgtgagcaaatgtgaaacttgcattatattcaaatggtgccctaatatatcaatcctattggaacaaattcacctgttcaaaacaagtgttagagcagaaccgactggcattcctacctcatcaagtttttggacagataaaaagagatagcgggtactaaatgcttagatggtgcctagcgcacagtgttccaataaattagctaatttgttgttatttttatctcactgaattgtcatgacaaccctgctggtccatctaaaaccgagtctaggcaggtcagatcatttgccgtgttcccaggaagtggaggtgcaggagttcaaatccaggggtgggcacaaaaccgccatcccttagaaactcaccctctagtttcctacagcctcagagctggaagagactcaacatgcctttcccctctttgaccagatgggagaactgagacccagagtgggtaagaacttggcgagggccacattcccataagcggcacagcccagatctgtccagagtgttaactcccctctctcctcatctgccctcttcttcactccttcagtgagacaaaagaatccccaccatgtgctcagtgctgcatcgggcgcctgggttggggtagggaatagtggtgggaaaagagtcataagatattctcctgacccttacgaacatgggcattggtaagatgaggcagggaggcagcaaccgttgacatcccccgtagggctgcctccacatttatgggggcactgattacatcataggcatggcagctgcgaatagttattatgacagttttcccagaagatggcagtagagagtgcttgttcttgcaaagttggtctatttaggacaattttctcagagatggcagtaaaatgtcttgagagcgatgcctgtttctaatctcacaaagacacctaagggttagcagcagtcctggccaagatagacagtgagggttccaggagtgtggggaaaggcggcaaagtgtgtgggctggaggatccagaggagtcgccgtattaatcagcacaggctcagctctgcacctgccgagtctcagtggcttttaccaacagaggtgtagttccactcacacggtatcagctgtgggattggagggcttccccactctgtgcacagactcgggccaggctctttccctctttcggctccaccgtctcaatgtgaagcctgcatggctgccaggcaggagggacagctggagagccacacactggctcgcgaatgctttgacacaggagtgacacaggccacttctgcacacagcccattcaccagaactcatccacgggcctgcctaaccttacagggggctggcaaatgtggtgagcagcaaatgcgtttcttctacttcctcactcctctcctcactttactcaaagttggagtcagacttaggaggcagccatggctcccctgccttgttcccgataaccccctgccctactcctctccttcacaccttccatgccatctctctgcagatttgtgttccttgtgctggtgcacttggacttggagctgatcaacgcagatgtggagatccctgagtttgacctcagcaggtacggcttcggtctgatgcagccggaacacgacgtgcccgtccgctaccgcatccgcccatgacacagggagcagatggatccacgtgctcgcctctgcccagcctgccccagcctgccccagcctcccagctttctgtgtgcacagttggcccgggtgcaggtgctagcattaccacttccctgcttttctcccagaaggctgggtccaggggagggaaaagctaagagggtgaacaaagaaaagacattgaaagctctatggattatccactgcaaagttttctttccaaaatcaggctttgtctgctcccaattcacctcgttactctcacctcgtgatatccacaaatgctattcagataaggcagaactaggagtcttcactgctctgcccccaactcccggaggtgtcaccttcctagttcttatgagctagcatggcccgggccttatccagtcaaagcggatgctggccacagaaaggccactcaggatgtcctttgtgtccattgatgtcattcagcag

SEQ ID NO: 64 - DNA, 274283 bp, Homo sapiens
ggctccccgcgccgcccggtcggcagcagggcgctgagcgagctcggagcccgcgctgtgcgcctgcggccggggcgccccgccgagcgccggtgccccggctcccgggccgccttcgccgcgcgggtgagtgagcccgccccatgcttttgtccaggcgcgggccctggaagtcaaggctccgagggtgggagttctgggtgggggctgggacccccaccgtctgtgcctcccgactcccctaatggagaggggccccggggtgcggcgaggagtcaggggcgtaaggagacgaccccagtgacgccaggctgcacgagttttcttttggggagatgaagtgcttggggacactgatgcgattgcctttctaggaatcatccgaagggggtgcctttgatttgaggggcggaggagaagcggacccttctcccagctcccagaccctcgctagaggactcggtgacggcctctgggaagggggtgccacgtgaaggtccttccagcccaaatgtgattccgggaaggtagggcggggaaggcggcccgcgagtgccagacctggccatcccaggcgaagctggggcgcgggctttgcagacttgttcctactccatactcctcatttaagctccttacctcgctctgcctccttcgcgttaactggggtcccattgttgagggaccttgttcgccgatgattgcagttggaaagttttggataaacttctcaggagatgtgagttgtcaatggttgaggtagacccctccctggaacttatggaactaaaacccttcaagacccaaaggactgaatttctaggagtggcattgcagatgtgaagatgggctgatggggaaatggtttcaaggatatatattttttttagattggggtgtgtgtgttggggtgcggggcactttctatttcgtagccagaaggagaagacccagctctactagagtctagagggagtaaaattagctgttgtgattcagggagctgggtgggtgtagggaaacacctgggcagtgggcatgatgccagacctcaggccgttggtttttaccatccctcctctccccaagtgcaaagaccagagtatatgcaatgacccgcccaccccacagcctttgagagcctgccctggagctgcatcccccttccaagagaggctgtgttcttctccacctgaatggaatactttttgtcaaaatgcacttatcaataaattatttccagatggtgggcttaggaggaccatttggggaaccccgcccacacttcaaagaatcaggaatcaacaatgcaagtctctgggagaagtgtaggtgcatctggtgactttactaggttcctacaaggcatttagggttctaatagaactgttttcttttctcttaaattcttgacctccttctctcttccgtgattctcttagtctcttccccgcctgcacactgtgggactgtggaggatgatgctgctggcaccacagtgctctagggcagcatggaattttccttcctgcccagagtgaggttacccctttttctcccactctcagtgggccaggagccttgggtctgggaggaacctgagcagttggtcctgggtccggagtggttggactctggatgctggattgggtagcgggtactctggggacatgcacaagagctttttttgccaagatgtgcaggtctgtctcattgttcactgatgatacaaaggatgctggacctcatttgcagctaagcatgagcttggagaaccaccccacagtggggaagcatttatgctggtttatctcccatgttcagtttcttttgtgtaataactggctagctgaggaggagggtagctgcagcattgtagatgtttccttgtcttatttttatttttattttttattttgagacagggtctggctctgttgcccaggctggagtacagtggcgtgatctcagctcactgcaaccttgacctaccaggctcaaggaatcctccacctcagcctcctgagtagcagggactacaggtgtgtgccaccacacctggctagttttttggattttttgtagagatggggtcctaccatgttgtccatactagtctaatgggctcaagtgatcgcccacctctgcctcccaaagtgctgggttacaggcatgagccactgcacccagccagagtagttgctgtttgtgtgaggtttgctcaccccttcatcaggggctgcttccccaggggccagatcttagaaaacatatgcagagcagactaggccttggaacattcctaggctaactggtaaggccaggtggccccacctgctgcctgaaaatggtagacagacagctacagtcactgcagaggaggggctcctggctggcaggtggcgggggtaatctgctgagaaggcttgtcagagaaggaggtgacccagatggtgcagaggggagaggcctttgagttccaagggtggggaaaggttctgggtctctggctagggagatctttgctggtctcagaggcatagattgtgaatgcgctggggtcaccatatactcagtgtctttgagaatgaccccttgcttttatcctcaaaatataagatgagcctagagtttgaaacacaactagttggcttgtctgtcttttaggaagttcataaggtggggtgggggtttcagaatgcagccttgcttggggacatgggtacagtgtcccatgagtatggggtgtcttatttagtatctttctgagaacaatacttgggagtctggaaatataagcctacttggaagcccagctgcacctctcacagctcaaaccaacccacacaggctgggagattgttcattcttaaaagcttcctgtcctgtcttttcagcaaatgtagtaaaatttagaaacaacacttaaaaagtatcctttcccaacaaaagacaatgtcctcgctcaacttggccagcagagggtgcatgcagaggacatgaggcagggccatttgcatggaaaatgtccatgtggatgcttaggcctgagcagggtctattgggtggcctgagtgctcagaatcaaggaaccgtccagcagtgagccagagtgggacagaacgatgtcactgtgatgagctcctatgccatgtgacttctatctcttccctgtgctcccccagcctcctaccttacaagcaggcagacatggttgtgcggggaagcagtgcccatacaagccacgcccctctcccacctgcaccattctgcagatggattctctttattcttccttgagttttggctgcacacttttccattcgtttgatgccaacaggttgagcaaatgcattcccctcacaaactcaaggtgggtggacctccgtatttgcactgcgggccaacaggtgcatccctcctccttgttgcatgcacctggtgtgtgagggctgcagcccccatgaaatttactgacagccagcccagtcagctggggcaggaggagagccagcaacagttgctgcctcatgggctggaaggtaaggctgtgtttccagatgctcccaccaccttcttttccctgccctcctgctcactgtacttcagtgtctgagggtgaatgggcaccccactagggagctgtggaaatttttgtgtagatccagcttcttagatttcccacgttgtccccatcccccctctgttggtacttccttgccccccttccaccctctgctcctctccttccctgggtcttcagtgcagagccctctggagacagaaagcccctttggagacaaaagaaaagggatgaggagaggatttccttttctttcagacctgcttcttgattttttttcccttggctctgggcgctcagatctgatgctaatttgttaatccaggaccttatgggttatttctcataatctttgggggaaccgaacacctgcaacttggggcttttatagttgaggatgctgtttacctttcttgttttcagagatgaggatttctgatgtatagtaggtctcattcaggtttctggcaggaggaggcagccaggcagaatgtgatctttggtgttaaacttgggttcagttccatcccattcacttactggctgggtgttcttgggcatgggttttaacctctgtgagctgacttgagttttgtcatctgacaatgagggcggttataaaaattaaatgaatataggaatataaataggcacaaaacaaagaatagcttttattatatataccgggcagtgttctccaggtctatataatgacttgtaaatcaaccagcagacactaatgatgtctactttctattgagctctgtagaggcttataaaacaaaggtaaatgtgggccaggcacggtggctcacgcctgtaatcccagcactttgggaggccaaggcaggtggatcacaaggtgaggagattgagaccatcctggctaacgcggtgaaaccccgtctctactaaaaatacaaaaaattagccaggtgtggtggcgggcgtctgtagtcccagctactcggctgtagtcccagcaactcgggaggctgaggcaggagaatggcatgaacccaggaggcggagcttgcagtgagccaagatggcgccactgcactccagcccaggcgacagtgtgagaccccgtctcaagaaacaaacaaacaacaacaacaaaaaacaaaggtaatgtgtctatgctaagagactctgggtgggtagcaagagagctaacacataggtaattagaaaacagggacaacatgcaatttccaagtttcattaacagaattaaaggatgacaagaaattcaggggctagagtgatgcaggaaggcctcaaaaatggagaggaggaagggagggtaagcatttgccaggagagaggaaggcaggaacatttggctccggtgtctgaaggctgttagctccttccttgctgggccctggcacaacacctttgaccttgcagcgcactcccaaacatgcaggtgtgcttgtcctgaggtttattttgggggtggttttcattctggccttgttttccctctgctgccaataatatttctgaaacatctgaaattgttttattttatactcgatcaaaaatattaagaggcaattgggtggccagagtgaaagcccagaggcccgtagaagacttttgggtttctggggctttgtgttctcttttcatgcctcatatattgtagctcacttcctagttctggaatcacagggtgttaggactaagggtcaggtccacttgacctttgcattggactgaagaggaaactctggcctaagatgccaagtggtggctgggcaccgtggttcacgcttgtaatcccagcactttgggaggccaaggcgggtggatcacctgaggtcagggttcaggaccagcctgaccaacgtggtgaaaccccatctctactaaaaatcccaaaattatccaggtgtgatggcagcctcctgtaatcccagctactcgggaggctggggcaagagaatcacttgaacccaggagcagaggttgcagtgagctgagatcataccactgcactccagcctaggcaacaagagcaagacttcgtctaaaaaaaaaatccaagtagtagagccagcatcagccagagttctcatcactacctatcctggtggaggatggtgatggcataggaaggtgaacggcctgacataggcaggaagaatggatacacattggttccctcatctgcccacctgcttctctagagtcctttaaggctgtcctctttagtctgagggtccaatggggagcaggagtgaatgtcctacctttatctggcctgtgatcactgccatctgtctgcttcagggcccctggataccgagtgctgttcccctttcctggggtcagactacatggaatgtcatctgaggctgtgggaaacaccaggaagatgccccgggtttgggggctagcttcagcactgtcttctgctatgtgacgtggtatctccaggtctcagattgtgcacctttaaatggacagagaagcccttctctactcatctgatgaggctgtaggcagatgaacacgtgcttggcaacctgtgcttgtgctgtggtcgtaagggtagtgtcctgctaggcactgtgctcctggaggtcaccagctgtggttcatcttgtatccttactcatagcctggtgcctgacacaccacaggtgctcagtacatctgggtggaaggactggctaatggggtaaatggaggtgctcagagaagattctaagggatttgctgtgtgccactccatgagaaggcactttccactcattcacctcacttcttcagttatgtcttctgtagggctaggtatacttcattctaacttttctcctgagctttatgcatctttccagccaagtactgagtccattcacagaacatgactcaagcagatgtattcctaaacttccccattgtccaagttaaatttccatttggtattttcctattagtgtcaacagggtgatcattttcgtaatcacttggttgctgatcttgtggaaacgagtatgttcatgaggaagcagcaggtggctttagaacgtgcctggaggaacagttcttatcttgcaacctgcctctgattactatcaaaagctcctgcctttccaatagtcactcatggtatacatgatacaatcaacgcagttgctactgatgttacccaatagtatgttttagggagttctcaggcttcttattgtgattgggcaggcacctagggactcagctcctcccctgtgggcctgctgattatcccaggcagagaaacacttggttttactttgatattactattttttcctgaccagaccgtactagctcacacttggagtattaactgtggcttctctgtagcccaaatacatcgtacacttgattgctttgttgatctaaaacatagtctgactgtgtcaccaccttcaggaacccccggtggctccctgtttcacacagaacagccttaagccattcacaggcctctataatctgacctccaagcccagtctcatagcagccacccccacactccttgatcccactacaaccagacttcttgtctcagcccaattgatactttcctgtgtctctgactgtgactgtgagttcatcctcacctggaatattcttcacttgtctgtttgattgacaggttcttctatccttaaacatttgttcagggaatgagttaagttcctaataactgtcagatactgcccccagaggctgcctctgaccttttcagcctcaacttctctagaaataagtccctgtaaaattctttttacagagacaagtcataaattattatggtatgtttttatcatttgtttaatttttctcatgctaaaattttatatctgtaactatactgaaaaaacatcaagggaaggacatgttaatgcctctgtttcctcatagcagtggttccagaactggctgataacaaaatctctttgggaaccttgtttgaaaaataatctatggctccccagtcccagcccagactaccttggtggggtcagggaatctctggtttaacaaagctttccagatgtttgtgatgtcaacctgatttgatgtttcactatgtaattgtttctattatttctttgatttgtgtattaggaaggattcttcaaaattaacagaaaccaattcgggccagctgaagagaaaaaataaaggtaatagcatgataaaagatggattcttatattttctttattccaaattatagccactaagattcgtatcactttatagtttctcaggaaaaagcacttcctttcatatagacaattttagaaaagtttctaaattacaatataccttaatttttgaaattgcataccagttttttcatcattataatcaaaatataaagatccttctgaactatgataatgtgataactgatataatctatcagagttacatatgatttcaaggtgaaatgctgtttttcataatctgtgttcatgatttttgaatgttgatgcattcttgccttcctggaataaacacttagtcataatgtatagtttttttaaaaaaaaaataccccagtgactttgattttctaatattttattttggttttttacatctgtagtcctaagtgagattgaactattaattgtctttgcttcccttggccagttttgtatgtgcccacaattttgacatttttggcacctttaggattgacagaataagtctgaggaatattaaagtctaccagggttttgtctatgtattctttagattaaattttgagttctagcttttctataagtaatattgctaaaagttagatatctttttctaaaagttaactggaaactttgaaaaaaataaatattcagtatctacctgatcatctgttgcacataaatcagtcacaccaacttttcctagtttcggtgtattctggtctggtaaatttggcagtttctactgtctttttattccattgtttgacaaatgatcagcattttcccaggtacacaataacttttcttttcaatgctgcatcataataggtttttttgaagactctttttctttctcatgtaaaaaagtagatataatttatatacagtaaaattcacctgttttaatgtacaattctgaacaattaatacataattatgaggaagttcagttctgaattttgacaaatgtatatatagtcatataggcaccatcacaattgagatacagaagagctccatcacctcccagaattgccttgtgagcttttgttgtctgctctcccaccatgcagaccttggcagttactgatctgctttctctccctgtgttctttcctatctcggaatgtcatataaatggagtcatggtttgtaggctttttagtgtgcctgctttcacttagcattaatgtgttggagattcatccatggtggtgggtatatcaataggttattcgtttttgttgctgagtattatttcattgtaaagacgtatcaccgtgtgtttacctattccccagttgaaggacatttgggctgtttccagtttgaggtgataatgaacaactcactatcaatgtttgtgaacagatttttaggtgaacatagatttcatttcacttgggtaaatatctaggattggggtttctgggaggtatggtaaatgtaatggaataccaaactgttttccaaagtggctgtaccattttgcattcctggtagtaatatatgagggttatattttccacatctttgtcagtacttggtattgtcagattttaaaaattttagacattctaataggtatagttttatcatattgtgtttttaatttgaatttccttagtgactactgatgttgaacatctttgtacttatttgccaaacatatattgtctttggtgaagtatctgtttaagtcttttgcccaagttttattggattgtttgtttccttatgatttagatttgagagctctttatatattctggacattaatcttttattgggtacgtgtttggcaaatattttctcgctgcctgtagcttgtcttctcattctctttaacaatgcctgttactgcatgacagaagtctttaattgtgatgaaattcaatttatcaatttttaaagatgtgttatgcttttgctgttatatctaagaaatactaacctaatgtggagtcattaagattttctccagtgctttcttcaagacgttttacatttttaggttgtatatttagttctgatccattttaagttaatttttatacatgatgtaaggtatagatagagattctgttgtgcatatgaatgtccaatagtgctagcaccacaatgaaaagattatccttctcttattgaattgtgtttgtacctttgttgaaaatcagttgagcatgtatgtgtggtctattctgagtattctgtcccattgatttatgtgtttattctttcaacaataccacactgtattgattattgtagctttattgtaagttttgaagtaaggaaatttgagcccttcaacttagttctttcttttcaaaatagttttggctattacagattttttggcctgacatataaattttagaatcatcttgttggcatctgcataaattcctgatggaagtctgttggtattgcattgaatctataagtcaatttggagagaattgacatcttaacaatgttggatttttaagtacataaataaactatatttctccatttaggtcatctttgatttccttatcaatattttatagtttttggcatatacatattgaacatattttgtcatgtttatagctatgtatttcatgttttggtgtaatttttaatggtacttttagtaaaattctgttttccaattgttcattgctagtatttataactacaattgatttagtattttaatggatttttaaaaatttaaatcagaataaagtacagcaaaatgtgtacttgcagagtttgaaaatctaatgtgattagtagctagctaaatctaatgtgtaacttaaacaatttaaaaggctgggatatagaatcaattttcagccctcatctgctcttaactatttccctgagctttttaattatttttaagcaactgatttttgtttgttgaccttatatcttttgacttttctaaactgacttattagttctagtagcttttttttctagattctttgagattttcatcatagataatcatgtcatctctgaataaagatagttttatttattcaattccaatttctttgcctttattttacttgttttattgtgctggttaagatttccagtataatgttaaacaggagtggtgaaaacagacatcattgccttgtttccaatcttaggaggcaggtgttgagtcttctatcatcttgtatgatattagtcataggttttttgtagatactttttatcaggttgaggaagtttccttttaatttgcttagattttctttgtctttaccgtgaatgaataatgatttgttcaggcgctttttacggatctgttgagatgatcatattttttcttttgtccatgagttggcaaactttttcacaaagggcagtgtgagaaaaataataaatatatatttggtctttattttcagtttctggcatagagcttctaaaaccctgggagtttcctgagtgagagtggtgagaggaatgtctttggttattcataataagtccctttcaaccatacctgagtttatgctggtgaggtgacacttggtgagcccctatatagcttcaggatgggggctgattgtcagaggaaacaaccatgtaattagaaggttggaattttcagcacaccctgccctaacatctggggaggggagaagggctgaaaactgagtaaatcattaatggccagtgatttaatcagtgattcctatgtaacggaacctccataaaaactcctaatcaaaggggtttggagagctttggaattgactaagcacactgagatgctggcaaggtgctggcaatgcctggagagggcatggaagttccctgctccttttcacataccttgtcctatgtatctcttccatttggctgttcctagattgtatcctgtaaaataaactggcaaatataaggaaagagggctctcaagttctgtaaaccagtctaacaaattatcaaacccaagaagggggtcatgggaatccctaacttatcgtcggttggtcagaaataagaggggcccaggacttgtgatctgaaatgggggcagtcttggggactgagcccttaagctgtaggatctaacactaaggttagatctaactcaaggttgatagtgttagcattgaattggattgtaagacgcagctggtgtctagagagagattcagttggtatgaggaaaaaaactccacatagctgggtgtcagaagtgttctgggagttaaaaacaggtcataatagccagataacaaatattttaggctttgtgggccataaggtactttattcaactctctactcaactctcataaatctcctctactcagtgattcagctctgccattgcagcatgaaagcggccacagacaatagatggataagtgaatggatgtggctgtgttccaggaagctgtatttacaaaaacaggctgcaggttggatttggcctgctggtcatagttttcccagtcatagtttgctgatccttgctttagtctattgatatgtggaattacagtaattgattttcaaatgtttaaccagccttacattcccagaataaactccacttgtggtatattattaatctttttatatattgctggatttggtttactcaatttcattgaagttttttgtgtctatattcatgaaggatattgatccgatgtctttgtctggttttggtgtcagggtatattggtagccttatgagttggaaagtgttccttcttctattttctggaagagtttgcataaaactgttgttatttattcctgaaagttttagtagaatttgccagtgacacctgagcctgaagttgttttgcggcatgattttcaacagcaaattaaattatttaataaatataggactgtccaggttatttgtttcttcttgagtgattttcggtagtttgtatctttgggataatttgtctatttaatctaaaagacagaatatttataaatgttcataatattaacttattatccttttaatttctttaggaattgtagtaatgtctcattttctattcctgatatttatagtttgtatcttctcttttgctcttggtcaatctggctagcagtttgtgaattttattggttctttcaaagaaccaggtgtttgttggtttgagttttctcaatgttttttgtttccagattcattggtttttctttatcatatattctgcttgttttgggttcagttgctcttccttttctagtttgctaaagtgaatgcttagatcattgatttgagacctttcttcttttctgataatttctagggttctccttttctgggacagttgggttgggaaaggggacatggaggtgtagaaccagttttcctacctctaagcatttattaggagagctttagtaaaagccttaccagcagggagccctgaggcttctgcttgggggtgggaccaatgggaaggaggcgaacggtcacaccatggactgtttctttcatgggaagcagtggcctggtcttcccaccctgacagtctaggaccctaatgctcatctgcctcccaatatggtctgtagaaaggagaggaaagggagttggagttcctgcagttttgttggatgaaagggttctctcctaatagtttagaccaggagctggtggactttttctgtaaagaggcagatacagatagaaaatattttcaactttgcaggctataccatctctgtcacaggtattcatctctgccattggagcacggaaggagctgtagataacatgtaaatgaatgggcatggatgtgtttcagtaaacctggtttacaaaaatagacaacaagctggatttggcccatgggccatagtttgcctacacctacctgctttagtctactaatgtggtgaattacattgattgattttcaactgttccagacaagttgtattcttgagataaattccacttggtttagagcatctggtctgtgctggccctgtctttgtttctcagcttgcattgtcactgagccatgagcttctcaggggtagggccacaatagggccatctctgatctcctgtcaggtatatggtagatggctagtgaacctttgtggctgggtggaaacacctgtgcccttcagtggtactctgctgcagcttcctttttggtccccccaggagcctagaagaaacggaggttgggtggaggagttgggctcaagtgctgtcactgcaggccccaggctgatctttcattttgagactcttttagaaatgtgactcatgtttggtctgtgaggcattgctttctaattactctctgtcctttttctgggggatgtggttggcaccatagctggcaggctcaggaattcaggcctccaggtgccagcccagtgctggtgttctaaaagggcttgattgacccctttccaggaccatggctttctagatccttttatagaagagtgtgcctgtgtgtgggaaggggcagagcaggagggtccatgcccttctggctcctaagtgaccttcatgcctgtggagtgtggactagatagagccatgtgacaaggcattacaaatggattttgcacaggtagatttcatcgtccatcttagccaattttcctaattgattgggagggctgggtgggcagttgatgggaaggtcctggagctaacagacctgggtttcaatcccagctcaagaacttattagatgggtgaatctgggcacattatttaactactctgaacttcagttcactcccttataaaatggagatgtaacaacttcccagaattgttgtgaggggtatgttaagtccctcactttctctcctgggctgacagaggtgagcagagtggtggacaacagaagtgcaaaacgacttgaaaacatgggagaatccatttgcagactgggatatggagagggtgtgctggtccccttttcctgcctagaatatttcagagctgaaagatggggaggggtgattcaagggccaagcctctgattctgctctggagcaagaccaccctaggtctggatgatgccttaggttgtttgggcctcttgtctttcattgttcagccaggttcactgggataggaacctggagctgtgccagtcctggtttagaggaattagttgcataattgccttggatttaatgggaaaatttaaggcctcttggacctgttgataataataaccctccttatgactacccagtgtgggaggagtgaggagagtcacctccaactgccttcagaacaccaccaccttttcatgtgttctgaggtttctgctttcctcttgacaaggttcaagacccttttgcacacgtgttaggggatgaggaccctgctttcctgcagagtctgtgagttaagggcactacagctcctaggccgccctgctcaccccagactgaggcctcattgccttctgggacaatcagaccaaggcttttactggagagctcataaaacttgttaaggatcaagaactagataaagttccaattttgtcaccctgagataatcttgtattattgtacctgaaaacagtattgaaacacagatctcattgtgacacccctggttaaaaacaatgttaatcccctgctacctaaaagacaaaatttcagctattcaacgtggcatgtaaaataggctgcaattaggcctgccacataaaatattcagttattattttgctataaatacttctcatttggataatgttttacagtttatttgtacattttgcatttaatctttgtcaatcttatgatattgttcttgttcccactttgtagttgatggcccaaagtttagggaagttaaaaggaatttgtccaagatcaggtggccacaataaagtcaaactaagcacagggtataaattagtgctcacttgctacttcctcactgtatgaccttgaacaagtttatttatctataaagaatcagggataatacaacaaacttgtaaagtttttgtgaggattagatgagagaatccaagcaaagtgcttgggggaatgcctggcacatagtaagtgctcagaaaatgttgggtattattacgatactctattttaattgttccacaattaatgttttcagtttttaattccactattataagtaacactgttataatgatctttgtccaaatagtttattttttctgttgtattatttccttggattatattccaagaaaagcattgctaggtcaaaagatacgatcctctttttttgcctttgttccatattgccaactagccctttagaaggatggttcccatttaaaaggctgctactagacccatgagagtgaactctctcccactggtggtacttctgtgcaacctctcagcccatcagagggcatataccagtcatttatcagtcattgaggattataattatcacctttcaaaaagaccaacagatcctagactggttggagccaaactttataaactaggttgtgcctacagcaagacataggacccggctaatcagcaaactgtactaaaaactctaggaatggctgacctctcaactcactttctgtagggctctgtgggagtctttgcatgtacacagcaggtagataagaaggagtggtgttgggggaggcaggagttgcttatgagctgtggacctgaggactgtagggaggaagactgtatgggaaccatgtgtggcttcagactttttatgtaggagagtgtatgcatttgtttgggttgtgtaacaaagtaccacagccaggtggctcaaaacaatggaaattcattttctcacagctccagaggctggaagtctgaaatcaggggttcaaacagagtcaagctttcctctgaaggttctgggaggatccttccttgactcttctggcttctagtggctgccagcagtccttggcattccttgggtgcatgtgtatcactccagtctctgcatccatcttcacatggacttctcccctctgtgtcagtgtatgttcacatgatgtcctcctctctgtgtgtctgcgtccaatgcatccaaatttcctcctggtttttttttttttttttttggatactagtcattggattaaatcccatcctaattcagtatgacttcatcttaacctgattatatctgcaaataccctatttccaaaccaggccacattcacaggtaccagaggttaggacttcaataagatttttggggggacacacttcaacccatgacagatggattgggaagagaaaatggaacatgtccatttttcatatcacagactacaccgtggatggggctgttggtggagaaaattatggacagtggtagtgtcactggtgggaatgctggacagttgtctggggccagtgctgcttctgttcttggcctccccagccccacttaccctaaggatttgtcacaaaactagtcactgataagtattaggtgcttctagctgggatgatgcagccatagcagaaagagcttagccaccgagggaaaggggtgttctaggagccagtggggagtcatagaaataacgggactgggcagacatgcagatctcaggttaagtctcaggctacctggaacaccatggcctcagtttccccattgaagggtgaggagggagggactgcatagcttctgacgtccctttctgtttggcattatataattctaacaggagaggtaacattttagagacacccaagctccttgactctaagggttgtcctgaggtctgtctgggtgacgaggtgtgagcagctgatatgggtgggtactggggaggggacaatgtggtattttccatcccaggtctttccaacaagactttattcaagtcacctctccatgaggcctttcctggcctctctaaaatttcaacctcatcctgatatttcatgtcccctctttcagttttaatttttctccttatacttatcccctatccaacatggtttacattttatgtattttcctcactaattgtctgtttttcccactaaacagtaagctccttgagggcaaggatttttatccaattctaaaataatgcctatcacataccaggcactccatacgtatttgttgaataaatgaagatgtggtaaacttgataaattgggtgaaaatttaaagggggtgtaccagttatattctttgaaaggtctcaatcctccctggctccagccccctagccaagactgcccagggtcctgccataagtagcacctatttctgcagggtttgttccagtcatcaattgctgggagaaaactctcccaaacagtggcataagacaacaatcattttgttatgctctggggttctgtgggtcaggaatttgaacaggacacagtgggaatggcttgtgaagacctgaaaagctgaggtgactcaaacagctaggggcttggatcatttggaggcttcttcacttaccacctggcttctagactgagacaacttgaaggctgggctcagctgggatacctggagccagagtgcctacatatggcctctccatgtggcttgggcttcctcacagcatggtggctgggtttctggagcaagtgttcccagaaggagcattccatgagagccaggtgaagactccctggtcttttattacctggcctcagaagtcacatagtgttgctttttgccgtactctgttgatcaaagcagccataagcctgcaccttggtaggaggagtgtcaaagattttgagaccatgttttaaaactgccacaagaatcttaccactttctcaccggtctcaatctaaagttaacctgaagtaaaaatctgccaccttcagatcaggacttatggtgaattatacctgttctctacctcactcttcactaatggagcttcttcaggacagagtctgccatgtttgttttttgaagcacctagcacattatctggcacacaataagtactaagcaagttagcaagcaagtgaatgaatgcacgaacacagggaatgggtgttttctgtggctggcttagcactgctaagtagctacaggaagacttgaaactcctgtctattaaggccaaagttttctaaccagtttccattcatattcttcactgctgaaagctgtgggttaggaatagattcctgtggaagagacatgagtatggagatagaagttgtatggtatgttagggaatactggtaatctggtttgatgatagctaataatttctgtattttcctaggacaatggcagaataaggctagaatgtaagggccttgttacaggacactgagtatggatattattcattaatgaagagtcatcaaatattgttgagcagcagagtacatgtaataggagctgtgaactaggaagattgacttgccagtgacattcaaaccagattggagtagggaaccccacagataggcaaaacagagatttgaaatccaggtatgtaaccagggcctgaaccaagctagaaactgcaggaaagccagcaaggggagggatgtgagtgattgtgaggttagcaggtgtttgggcccatgtgagaggtgacaaaaaagagaatgtaaaagatgatgcaacaatcacatatatgtagagatggagtctgtcactcaagctagagtgcagtggttgcagtctcgaactcctgggctcaaacgatcctcctgcttttagcttcccgagtagctggagctacaggcacatgccaccgtgcctggctaatttttttactttttgtaaagacaggatctcactatgttgcccaggctggtctcaagctcctggcctcaagcaatcctcctgtctcagcctcccaaagcaccaggaacactcttactttgtagggactaatttctataattttgttataaaaattttcaagtatacagcaaagtttaaacacatgtatggtgaatacatatattccctccacctagattctaaagttaacattttcctgtatttgttttatcacctatctgtccatccttccatcgtcaatcagtccatcttgtttttgtgatatgtttaagtcacagacattaggaaattgtacattcccctaaatacttaagcatgcataccattaccttgagttgaatattgtttacgttattttttcttttgaggtaaaacttatttatagtgaaatgaacaaatcttaagcataccattggatgactttggacaaaagcatgcacctgtgaaacccaaacccctttcaagatttggacattaccatcatcctacagaattcctttgtatttctttccaatttctgtccccaccctccagatgcaaccattattctaatatttaaggcacagatttgttttgtctctcctagaacttcacataaatgaaattgtatggtatatattctttggcttaatgtttctttcatttggcctgtttttgagatttatccatgttgttttgtgtatcagtccgttccttttaattgctaaagagtattttgtttatggctataccacagtttacttatcccatttccagtttttggaaaaaaagttgtttccagtttggctattatgaataaagctgctatgaatatttttgtataggtctttttgggtagacatatgttttcatttctcttgggtaaatatctaggagtggaattgctaggtcataagatgagtctatgtttagttttgtaagaaactgccaaagtgtctgtttccacatttatacacctatatttccaatgtatcagaatctagttgcttcacatcgtcatcaacatttggtattgtcagtctttttaattctagtcattcttgtggatactgctatggcagtatcctattatagttgtaatttgcatttccctaataattaaggatattaagcgctattatgtgcctattggccatttatgtatctttctttttgaaatattattcaagtattttgcccatttaaaaatttgaattgtctttttattgttgagttgtaggaattttttattctgaataccagttctttatcagatacgtgatttgcaaacatgtttttctaatttgtagcttgcctattcattttctttcttagagcagaagttttacctttttttttttttttttttggcaaggctatttttttttctgtgtccaaagaaacttttaccacccccaaaattaccaagataatcaccattttctcatctagaagctttataactatagtttttatgtttaggtttgtcatccatctcaaattaatttttgtgtatagtgtgaagtagggatcaagatttcttttttgcccctgtggatatccgttgttctagccccatttgttgcaaaaacaccttcctttttgttaggtactgtttttattctcttgcagaggaagaaactgagacagagctaggttaagtaaccacacctggcagagacagatccaggatttgaacccaggcagtctggatgcagagcccgtatttaaaccactgtgttataataacccttcttacgtggatgacaggttttcaacgtgagtgcaggcagctcagtgtaaagccctggtagggaattcaggaagcaggggagttcagtttgggattgagctggggagcccatgggatacctgagtgggcacagtggggagaagatagaaaaaagacggaaaaacttggaagaacaagtaggggagaagggaggtgggggctgctgaaaggggatgttattaagcctaacctggatttcaccttttttatttagcatcaggggattggttctctgtcatatcaatcctggtctagaagagtcatgaaataggcaagatacagctagtctaaatcttttgaatttaggtagtaagggtgacatgagcaagagtcataaagccagagaagataaatagattaagtagaggtagggaaagtcagcaagcatcatgtttaggatgcctactctctgttagacagacctggcttcaggtcttcatccaggccttgcagctcactctgtgatctcaggcaagttacttcatttctgtgcctcatttttcctcatctgtaaaacagagataacaccaacctcactgaattaaaatagacaatggatttaaggcacttagaatagtagctcaataatggtgtgtcagctattttaagattcagtattttaagaatgtggtcaaggcccagaaatatagtagaccctcaggaaaacttgctgaatacacagatgaactacagggacacaggattctccagtttaaattgtgtaactgcatagttttagcacagatggccatgaagttacagtaagaagctaggaccatgagctgagctggtctctaaatactcaaggtggtgcaggaggcagcccagactggtgacgctgagccagcatggccttagagccttccttaggaagggcactgactgctggctcggattccaatggagcccccacgggcctggagctctggagtgggcagggaaggtgcttctgctctgagtgaacagagagctccctgacagcaagcatgaggatactcctgcctgcggaaggggtgacacctcaagtgtattgttgcccagatggcccacagaaacccatgtctatccctggttttgatgactatgtcctgatctagccccacttctagaaaagcccatttaaatggagtttgtaggattgacattttgagtccagtccactctccatataggcaggaagcagagtcaattaagtacttgtcaagtacctgctggggtacctgttgagactctgtgctggattaggacacttgttttcctgcccaccgggagctcaatgtagttagtgaatgacacacttaaagaggtatgtggtatatgccagatgtaaatggccaaagacagcttgggcagagtcatatggataaatgctttctacaagggttgttacactaatgctagacattcaggccctctggcgtctactccagctccagtaccttctcccttccaacagtaataactgatatttgagtgttcactgtgagggcagcactttagagctgttaactaaggttctccttatgatgaccccatgaggggagctctgttagtacctctgtatttaagatgagggatctgaaggacagacacctacaggcttctacaggcgcattgctggtgagcgatggtgctgggtgtgaacccagctgtctcgctgcagagcttatcttggtaggccctcggggctgcttggctagtttctttttcaaatatagagcaggaaggaggatgattgacattttctttcatgatctcaacatgcaatcacacagtgtccaatcagttttttttttttgttttttgttttttttttgagacagggtctcgctctatcgcccaggctagagtgcagtggtgccatctcagctaactgcaggctccgcctcccgggttcactcctttctcctacctcagcctcccaagtagctgagaccacaggcgcccgccaccatgcccggctaattttttgtatttttagtagagacggggtttcaccgttttagccaggatggtctcaatctcctgacttcgtgatcctccctcctcagctttccaaagtgctgggattacaggtgtaagccactgtgcccggcctgtgtctaaccagtttttacctaaatatggccccctatgcattttactctgacactggctcagctaaaatattcttaatttcagaagaagaagcaacaagacagaactactgtgtttattgaccaatttaggctgtctcagggcacagctctgaggatgggagcacactgagtactttaacgatccacggcaaggtgacagcatcttgggctcagacacaagaattattctcagacagggcttttttcagtgccataaatttaagcagctggaattcttttccatcctattcaacctcctgaagtgaagaattttgccttttattgggaaatctgcatttcattgtatagctagaacactatgtccttggctccctgatcctctagagaaggtgggtctttattttattccaggttctgggtgtcgttaggctcaaataccaaaaagtctctttcagcatgagaagctagagacacagcagtgccctgatcaaagaattcgagcagccagctgtccaccccagtgcaacgcaggccttgtacacagggtgtagggaagaactgcaggtctaggagacagtgatgctggttgctcagcatcatggctccccctacacctctggtctggagccgtgtgccgggcctgccagggcgtgagcactgctctgctgtctgcagaatcaaaggagggtattttaaccagcataacagaaggcatcatcccagtcactgatgtccttcaaaataaccttcttcagaaagtatatacttatgctagtgatgatgccattgctcagaatgtttttggaatttcacttttagaattgtgtttagtttagaatcatgcctttttccttccttctgagggggagttttttttttttctaactgcgtctgaaaatattaaagaatccatcacttaaaaatttatatatgtatctgttttttttgtatctgttacctaaaggggaaattactggcagcaatttgatccccacacgttaccagaaacagataccagtcatttaaactttcgtgaacctcatgggtaatacacgctatctcattgttaatttgtgcttaccactactgaggttggacatgtttccatgtattttggctatttgtgaattgtttgttcttgtccttggctcatttttctattaaacgatttgtcttttactccttgagctatagaagctcttcatatgatagtggtatatggacagttcttttaatatcttgtgttgtgacacagcttcatcttttgaacataaattagatttttggaaatgcatggcttgtgactgattaagtcaggctaaagtgacttcagcaatgttatttcagtacccatgtctggaaggacttaaacttgtcacggacttggagtcagatgtaatcaggaatagacagactgtgttggaggtgtgattaggatgagtaattgactagttgagaagctgatgaaaacttcatgtatacatacctaaaacattttaacttaaaacatataatgttaaacatttagttgccaaactttcaccatgggacccaactgggtttacaaatgggagcctatgttatcttacttgtttgctctatgcctgtaaggcattttctgcacattccagtttgaatctttttagtgtagaatggaatttaggcactttgaaagccattagaatgcagaactcttttagtttttataatttttccctgttttttacagttgtcccatccaaacctaattcaatagtaatttttttaacaattcatttctatcatttaactttcacagaaacagatcttttatattcacatttaatcactttatatactatttaaattatatgtaaatttagtgtttcaatttcaataataaatacaatgggcataaccggttttagggacaagccagctgactcttcgtaagcacacagctctcctggatgaagccagtttggtaggaagagagctgttaatatgagtgaacagatacattttagtgaaaggaggctgctatgttttggacgtccgctccaaaactcatgttgaaactgggtccccagtgtgtcagtgttgagaggtggggcctttggtgggggtgattaggtcatgtgggctctgccttcatgaatggataaatccattcatggattaatggattaataggttaatgaatagattaatccattcacagattaatgtgttaatggattaatggctatcaagggaggagaactggtggtgttataagaagaggaagagagccttgagctagcatggtcagcatactgcactgcctcaggaatcttaagagtccccaccagcaggaaggttcttaccagatgtagcctctcgaccttgtacttctcagcctctgtaattgtaagaaatacatttctttcttactccttagtttctggtattctgttataagcaacagaaaatggactaagaggcctatggctatctcaggctgtctggggacctaagagacaaagggaatgggtgaaaggttagaatcacatttctggagaacctagtcctattttcctttccttagtactttgagacctctcccactctggagacctctcagttctcccaagctgcactccacatttttctgtctatgaaaccatcttcaggtccaaggacaataccacaggatctgggcactattgcaagtgataaacataagcatgacaagcagatagctcccaagagcctctgtagcaggagcagcagcaagaaaactaccaacccttagggcactgaagatggcccagaatccaataccagcgggtacccaaaagtcctttgtccttcggtttacattatgcccgtggctgagagtcatcaggccataggccccaagtgcaagtgggagggttgaagtgcaagggaaaattaatatatacaggccagggtgacaggcccagtgtaggctattaggctggatttgccccaggattgaaaacttagttagggccatagcccatgacacacaattttttttttcttttttctttctttctttattattattatactttaagttttagggtacatgtgtacaatgtgcaggttagttacatatgtatacatgtgccatgctggtgcactgcacccactaactcgtcatctagcattaggtatatctcccaatgctatccctcccccctcccccgaccccacaacagtccccagagtgtgatgttccccttcctgtgtccatgtgttctcattgttcaattcccacctatgagtgagaatatgcggtgtttggttttttgttcttacgatagtttactgagaatgatgatttccaatttcatccatgtccctgcaaaggacatgaactcattattttttatggctgcatagtattccatggtgtatatgtgccacattttcttaatccagtctatcattgttggacatttgggttggttccaagtctttgctattgtgaatagagccgcaataaacatacgtgtgcatgtgtctttatagcagcatgatttatagtcctttgggtatatacccagtaatgggatgactgggtcaaatggtatttctagttctagatccttgaggaatcgccacactgacttccacaatggttgaactagtttacagtcccaccaacagcgtaaaagtgttcctatttctccacatcctctccagcacctgttgtttcctgactttttaatgatcgccattctaactggtgtgagatggtatctcattgtggttttgatttgcatttctctgatggccagtgatggtgagcattttctcatgtgttttttggctgcataaatgtcttcttttgagaaatgtctgttcatgtccttcgcccactttttgatggggttgtttgtttttttcttgtaaatttgtttgagttcattgtagattctggatattagccctttgtcagatgagtaggttgcgaaaattttatcccattttgtaggttgcttgttcactctgatggtagtttcttttgctgtgcagaaactctttagtttaattagatcctatttgtcaattttgcacaatttttttttataccaaagatcaggtgtcctcagtttgcaatatggaaacaatttgggtttgggagtcatatgtgaattcaagtccagcctgtgtaacactttgagaaatcactgaacttctctgagcctgtttcctatattgaaaaatgaagataacattgccctggtttgtatgagtagctgatgtgaagattaggaacgtatataaaatgcactgtaatacataaagaaggtccccattaaataaaggctgttattattaagaggtactcaataaatatttgaatggataatatagttaaatggaaaactggctgtgttagggttgacttggcaaaagcaaaaccaaaaagaagcacacatgtgaaataacccctgttgttaggtggttagcattgagatttatgtgcctcattcaacctggtaccctggtgagaccaattctgggcagttcccagtgtatgcacaaacgagagggttgtagtggtgtgttacagaggaaaatgttccaattgggaaccaactttctccttccacactcacaggcaacaaagcgttcctttccaggtaaagaggaagaaaaactactgaagtgtcatagattctccatttgttgattccaaactaggtgttgtccctttatatttccagtaactgagtaaggataacatcacaaacactggggactcaggtgcccaggccccagtgtaccaagttctgttctggaaagaatagacttgcagttttgagatataaacaaattgcagtattcactgtttcctctttcatctcactctttctacctgaaatgtttacactcgaatgagtggaaaagattatattagtctttaaaattcctgacaaagtcctctgctctaggtggcttgatcagtgaaagctttggtgtaaaagcagaaggtcccaaatctctagggcaggtagtggtggcaaaaagcaggatcggggtctatttgctttggttaccatgcttgtcttttggagtgagaggctttggcaaagtgatgatgcttctggggcaccagttaggaatggttggcattcacagatgatctccttctcctttttaaaaattttaattttgtttttatttttttaatttcttgtatttatttttttaaggacagggtctcactctatcaccaaggctagagcagagtagcacaatcataactcactgtagcctccaactcctgggcttaagcaaacctcccacctcaacctcctgagtagctagaactacaggctcatgctccagcctgggtgacaggatgaggcctcatctcttaaaaaaaataataaacaatgagatcaggtatatataaaaacatatataaatgaaaaatatagttattgaaataagatgcaatagatgggatacactggagactggttaccattgaagcatgagttaacagattggaaaatagtacggagaagtttagcctggctgcggcacagaaatataaagatgtcaaaaacatgaaagaacggtttaaaggtatggaaggtaaatgacaggcttcaacattatttaataaaagctacagaaagagatttaaaaagggaatggaagtgaagcaatatttaaataaatgattaataattttccagaattgagtaacaacatgagttctcagaacaaaagtgtctcctaatactttgaaagctaaacaaaagttaacccgcaattagacatagtgaaactgcagaaactgctttttatttctcttcagaaaagagaaaaaagagcaacttaaaaatccaaaataaaaatacaagttatgtataaataaatgacagactgacaggtatttcatcagcaacaagagaggtaagaagacagaggagtaacttttctgtgttgaccctaaaatactatacctagataaactatcccaggagaatgagagcaaaacaaagaccaagaatataaatacaaagatgctcactgaaataactattaaaggatatattttgagtgtttgtttctttttaattcccatttctattttagattcagtgggtacacgtgcaaattacaagaatatattgtgagatgctaaggtttgggcttctattgatcccatcacccacagataggaaacactgtatccaataggaggtttttcagcccttgcccctccccctccttttggagtcaccagtgtctattgttcccataaaggatatgttttggaaagaaaaaattaaacagtgagaaaatatgtacaatgtaagaggcaatggtaaacatagaaattgataaaatatatttatatttatttgttagctatgcaaaaaattcataagtgtgtatggtttgaaaaacatgattaaaatgaagactaggcaacaatagcaagatggtgcagattttttgggggaaaatgttaaagccatattcagagtcaggaagataataattatagattttttaagaaaaaactatagtcatcaattgtacccagagggttaggctacattactaaactcagtggcccaaaataaacattatcttatttagcttccaattctttgggttggttgggcaatttttaaatctgggccagctcagcagatcttgattggactctatcatgcctctatggtcagccggcgactagatgatctaggatagcctcactcacatgtctggaagttgactgtctgatccttggatgtcttagttctcttccaaattgcttctcatcttccagcaggctaccttggggtattcacatggtagacccaggtttccaaatgcagcaagagagaagcatttaactgtccaaaaactttttaagcctctgcttatgttatatgtgctaatgtcctgttagtcaaagcatgtcacattgccaagcctggattcaatggggagagaaatagactccacatcttgacagaagtaaaataatttatgggtgtttttggaatctatcagagtctgctctttggcctcatttctcatgcatgcaaaatatgctcatccttatcctaagctctctgtcttatttatagcatcaggttggaagtctatgatctcatgattttatcacattcagatatgaaagagggtcctcagctgtagctccttgggtacggcagctcttgatccagaatttaaaatgacaagtcacctgctccctacacctccatcatatagtggtgagacgggcaggataactggaatagacatttctcttcaaaaaggagaaaaacaaaaggcacatagcagttactggtctgtaacaaatcaaaattcccctggggcaaatgttgccaggtcatctaatctaggaccattgcttctgctctctggggtgtcttcccagtttgttgttctccaaggctcttgactccattctctagtatcttggttctcccccttaaaaagcctttccttttccataagaaatagtgcagctgagtccctctctcatctgtctttctttccatagttgagggcccagagacctctttgtggcttaatcaattttagtcccttccagtccaagctgatggtgttttgttgggatgattttctttaaaatattgtgggctttctatgtaataggatatagcccaactcattgtataaaaactacacccacaatttttttttttctctctagagttattcggtgacttgggattaggcttctgtcaggcccttaagattcttaggagcttttttgacaagataaggtgtgctaggcactttcttaaatccttcagaggccttaacaaatggtcatacaacccaactcttaatttgctcttttaaggcctccttttactctgagaatattttactcaaaggttgtcaaatatggggagactggagacgaggtacagttttattttccaacaccgcaaatcctggaccttctatattccatctaaattctggttgcaaactgaacatttccttctttagctcacctttgtcttgccatactttagcatatgcagttaagagctcctaaatgacactttcgaaattctgtctggagatctacttagctgcaactaggagttcactagggtcttttctttttgaaaatctcaggagctggttttttgaaaagatcagcaaaattgatagaccgctagcgagactaataaagaagaaaagagagaagaatcaaatagacacaataaaaaatgataaaggggatatcaccaccgatcccacagaaatacaaactatcatcagagaatactataaacacctctacacaaataaactagaaaatctagaagaaatggataaattcctggacacatacacccttccaagactaaaccaggcagaagttgaatccctgaatagaccaataacaggctctgaaattgaggcaataattaatagcctaccaaccaaaaaaagtccaggaccagacggattcacagccgaattctaccagaggtacaaggaggagctggtaccattccaatcaatagaaaaagagggaatcctccctaactcattttatgaggccagcatcatcctgataccaaagcctggcagagacacaacaaaaaagagaattttagaccactatccttgatgaacattgatgtaaaaatcctcaataaaatactggcaaactgaatccagcagcacatcaaaaagcttatccaccatgatcaagtgggcttcatccctgagatgcaaggctggttcaacatacgcaaatcaataaacgtaatccagcctattaacagaaccaaagacaaaaaccacatgattatctcaatagatgcagaaaaggcctttgacaaaattctacagcccttcatgctaaaaactctcagtaatttaggtattgattggatgtatctcaaaataataagagctatttatgacaaacccacagccaatatcatactgaatgggcaaaaactggaagcattccttttgaaaactggcacaagacagggatgccctctctcaccactcctattcaagatagtgttggaagttctggccagggcaatcaggcaggagaaagaaataaagggtattcaattaggaaaagaggaagtcaaattgtccctgtttgcagatgacatgattgtatatgtagaaaaccccatcgtctcagcccaaaatctccttaagctgataagcaactttagcaaagtcttaggatacaaaatcaatgtgcaaaaatcacaagcattcttatacagcaataacagacaaacagagaggcaaatcatcagtgaactcccattcacaattgcttcaaagagaataaaatacctaggaatccaacttacaggggatgtgaaggacctcttcaaggagaactacaaaccactgctcaacgaaataaaagaggacacaaacaaatggaaggaccttccatgcttatgggtaggaagaatcaatatcatgaaactggccatactgcccaaggtaatttatagattcaggccatccccatcaagctaccaaggactttcttcacagaattggaaaaaactactttaaagttcatatggaaccaaaaaagagcccacattgccaagacaatcctaagccaaaagaacaaagctggaggcatcacgctacctgacttcaaactgtactacaaggcgacagtaaccaaaacagcatggtactggtaccaaaacagagatatagaccaatggaacaaaacagagccctcagaaataataccacacgtctacaaccatctgatctttgtcaaaactgacaaaaaccagaaatggggaaagtattccctatgcaataaatggttttgggaaaactggctagccgtatgtagaaagctgaaactggatcccctccttacaccttatacaaaaattaattcaagatggattaaagacttaaatgttagacctaaaaccataaaaaccctagaagaaaacctaggcaataccattcaggacataggcctgggtaaggacttcatgtctaaaacaccaaaagcagtggcaacaaaagccaaaattgacaaatgggatctaattaaactaaagagcttcttcacagcaaaagaaactaccatcagagtgaacaggcaatctacagaatgggagaaaatttttgcaatttactcatctgacaaagggctaatatccagaatctacaaagaactcaaacaaatttacaagaaaaaaacaaacaaccccatcaaaaagtgggcaaaggatatgaacagacacttctcaaaagaagacatttatgcagccaaaagacaaatgaaaaaatgctcatcatcactggccatcagagaaatgcaaatcaaaaccgcaatgagataccatctcacaccagttagaatggcgatcattaaaaagtcaagaaacaacaggtgctagagaggatgtggagaaataggaacacttttacactgttggtgggattgtaaactagttcaaccattgtggaagacagtgtggcaattactcaaggatctagaattagaaatactatttcacccagccatcccattactcggtatatacccaaaggatgataaatcatgctgctataaagacacatgcacacatatgtttactgcaacactattcacaatagcaaagacttggaaccaacccaaatgtccaacaatgatagactggattaagaaaatgtggcacatatacaccatggaatactatgcagccataaaaaaggatgagtttatgtcctttgtagggacatggatgaagcgggaaaccatccttctcagcaaactatcgcaaggacaaaaaaccaaacaccgcatattctcgctcataggtgggaattgaacaatgagaacacttggacacaggaaggggaacatcacacactgggccctgttgtagggtgtggggaggggagagggatagcattaggagatatacctaatgtaaatgatgagttaatgggtgcagcacaccaacagggcacatgtatacatatgtaacgaacctgcacgttgtgcacatgtaccctagaacttaaagtataataaaaaaaaatgaataaatgtactcagaaaaaaaaagaaaatctcttaagttactgcaagctttagtttcaccagttgttctgtctcaacccaacacgagccatcattttgccagcctgctatagcagtttcttctccatttctccggcaaactgttttcttactgcttttctcaccactagaaaagccattatttcaaagccagtaccacatgttataatttttcttatggcaccaccccacatttgaaagcaactgctgtatcagttagcttttactatataataaaccaccccaaaatttagagacttaaaccatagctatttttatttatatcacaattctttgggttggctaggtagtatttctgatctggaccagcacaactgatctcttaactacatgcaactaaagctattctttgaggaaaatttatggccttaaatgcatttatgaaacatttaacatatgaaaaataagttgaggtcaggcatggtggatcatagctataatccaagcactttaggaggccaaggtgtggatcacttgagctcagaaatttgagaccagcctgagcaacatggcgacaccctgcctccacaaaaaatacaaaaattatccgggtgtagtgacgcgggcctgtagtcccagctactcagtaggctgaggtgggaggatatcttgagtctgggaggctgaggctacagtgtgctgtgatcatgccactgaactccaggttgggcaacagagcgagaccccatctgccctcaattcctaccaaaaagaaaaggataacatgttgaataggtattactataaattttatttggctatatttaaaagataatctaaatgaccatggctttaatgacctaggggtttaacatttgccatataacaagaagtttcgaggtagtccaaggcaaatatggattctccattatgccatcagggtcctgggctcttttaacatccagtcatctaaacataattttcatactcatgcttgctgcctcatggttgcaaaatggctgctttacttccagtttagcattcacattccaagcatgatggagaaaggacaggttttgaaaaaggcatgtgccaagtgagttggctacctttaattagagagctttcttggaagccctatgtaataactttcacttatatgtcattggttagaactgtgtcatttggcagttcctagctgcaagggagccagggaagtatagtgtttttttttattttagcatggtgtattgccttcccaaaccaaataagggtatgttagtacggaacaagggagaatattataaatattgtgtaagcaattattgttgtctactatatatatcctactcaagaagctagaaaaaaaatcctaaagaaacctttggaaaagtagaaggaaggaaacaaaggaagacaaatgaaatagaatgtcatttggaggattaaaaaagtgatatagataaaaccctagtaaggctttttttttttcaaaataagacccacaaataatattttgaatgaaatggaaatataactcctgatatgaaattgataataaacatcaaaaacctatactctgaaaatttttatgttaaaatttggattaggaggacacatgggtaactttctgggcaaatataatttgccataactacttcaaaagatatagaaaactgcagtaaaataacaattataaagaatttaaactgatagttaagagacttcttctcccaaaaatataaggcttaaatggttttttgcatgtagaactccaagaagtaaataatcctaatattgtgcaaactgtctaagaggatagaaactggggaaaagctgtctttttaaaataatgatagtataacttaaatatccaaataagacaagaagaacacaagaaaggaaaattgtgggccagttttatttataaatataaatgcttatgaaatatttacaaatctatttcaaatatttacattctgattaagtagagtttgtgaaaggaatagaaggatgattcaacattagaaaatatattaatgtcataaagaatattaacagattaataatgcctataatctattacatacagaaaaaacattagtcagaatttagcactcattcacaattgaggcaaacttctcagaaaactaagaatagaagagaacttccttaacttggtaaagaacatctatcaaaatagtacagcaaaaaacaatccttaacaatacacagtaacatcaggctcgctttcaataaagtcataaaaaagacaagaatgccctttattgctatattcagcattgtacaggaggttctagccaatgcaataggacaagaaaaatgtgaatattgaagataaagattaaaatgttcttacttgcataccaataagattttcttgggatttttaagtggaagatacagtcatccctcactatccatgggagattggttccaggacctcccttgggtgtcaaaatctgtggatgctcaagtcccttatataaaatggtatagtatttgcatatagtctacatgtatcctgctgtatactgtaaatcatctttagattatatgtaatacccaatactatgtaaaggctatgtaaatagttgttatactgtattttttatttgtattatttttattgttgtgttgttatttttattagatttttaaaaaatatattttggatttgcagttggttgaagccgtgggtgcagaacccatggatatagagaaccaactgtatactgtaagaattccaagttccataaatacagtatcaacatattaaagtactatttaccaggaataaccaattagaaaaattaatagataaaggatcccattttcagcagtaacaaaagccataatatacccaggagtacacctaaccaaaaagtacacaagaatatttatgaagaaaattacagttgttgaaaggaaaaaaaaaagagatccttaataaatggagaaaagggctatattgataaactggaagattcattataaaggtgccagttctccacaaattaattcataagttaaatgtacttcttagtatggatgagcatatggaatgacagtctcctacgctgctggaaggacggtactacagctttaggaaacaatttggttataccctttacacccaggaatttcggtcctagatggagaatctttcttgtgtacctgagtagacgtttaatattaaagtgttcattgcagcaaaaaatgggaaacagtccaaatttccaccagtaggaaaatgaatgaaatattatgcatactatatatagcagtaaaagaactatagttatatttcttaagagatcaatctcaaaaacaacattgaatgaaagaagcaagttacaggaggatatgaaaagaatagtgtttatatgcgttttaaagcctggaaaacaacactatatatacagtgtttgtgcttatactgtctttctgtgcattcacacaaacatgtctgggaatgataaaacaatgagtttataatggttcttacgggaggaacagacatggaaatgggaagaaagggttcccaaagagacacaaatgtatctgatgttcttttaatcaagaatccgttttgtcgctatgatagaaatctttcaccattaaaaagtgctttatcctaaatgcaatgaggtatcttggattagatcctggaacataaaaataacatcagttaaaaaactggtgaaatccaaataaagtctggtttcttagttttgaaaaatgtaccatggtgatgtaatagattaacattaggggaaacagagtgaagagtaccagggactctgtatcatgtctgaaatttttctaagaatataatgttattcccaaataaaacatttattttaaacagtggggaggtggtggaattttttaatggcttgaattagctgggcatagaagtgtgtagctgtagtcctagctatttgggaggctgagatgggtggattgcttgagtccaggaatctgagcctgcagttagctatgattgccattgtactccagcctgcgctacagagcaagaccctgtctctaaaaaataaaaaaatatagctgggcatggtggtgtgtacttgtagtcctggctacttgggaggctacggcagatggattgcttgagcccaggagtttgaggctgcagtgagctgtgactgcaccactgcactccaacctgagcaacagagtgagaccttgtctcaaaaaaacaaaacaaaacaaaacgaaaacccaaaaggtgctcatgtctatttccccagcattgtcaactttgaactctgtccctgaggtggatggactcctgacatgtccttgcggtaaatatttcctgggtataaatgatgcttctagtctttgtgtcctgcatgtctcatctgccctgttttaggacactcctagagggtaccagtctctctgcaaagtcttctttattccaatttcatgggtcatttggtactcacctaagacccagagatcttagagttggaatggaccctaacagagtgccctgtgcagcccctttccacagggaggtcagtcctctggaggataggctgaggaactcagtgagcaaaaaggactagaacccagaagtttgcttcctagaattatctttgctgtcacctcattgtctcttacaataaaggcaaaagagactgaataccctctcttatttgtttgtttgctttgaaaactagtggagaggtcaggcactgtggctcatgcctgcagtgccagctactgaggtggctgaggcaggaggattgcttgaggccaggagttcaaggctacagtgcactatgattgtacctgtgaatagccactgcatgctagcttgggcaacatagcaagatcctgtctttaaaaaaaaaaaaaaaaaaaaaaaaacaactgaggagaagagttatatattacccagaaatggtgacacacactggagctggagttatcaaggtgaggttggtgcatctttttttctctgtgcttacagaccttcctaagattagacactgtctgcttctgagggaagagtgggctgggtgcagacagaactaagagttgtagaatgtatgcctgcccctccgtctttatcacaacccgatggagtggtcaattgctcctgtcttaagatgagttaacaggcttagaaaggttaagtgacttccctaaggtaataaaactaataagaggtaggcctatattttaggattctaagaactcatgactaaggaagacccctctgaaggcagggaggatgtattccccagagccaacttttactcttgaaagagctgtggctgggaatgatgtggaacctgagccaagacagagcagctagcctaggacaggttgaggacagatccaggtggtgaggatcaggcctgccagggctacatgccaccatggattcctccctctggaaaagaaagttatacaagttggcttcctgctcctcctacccctcattcctctgttccatcctagcttgggggcccatgtccactagccttcctgggaggcctcccccaaaccaaggtccttgctttgtctctgtttaataggtatgggagaggcttatgtgactaaagaggacacctcagagcttggtcgagataggtgtgtgagagtaaactcaatcattatgtgaatgtggttgttggctgaacacagagcataaacctagaagatttgtgggagcaaggagggaaaatgccttttaagagaggtctccaaggagaatatgagattagttgaggttcagtgagttcctttgttgctgactcaagaagcatatttgaagggataagccctctcacttagagcagaagcatcccagccttgttgccatagtgacagtgctcaaacagaggcttaaaaaacagaaaacaccatgtcagaaggattcctttggagctatgatgccccagtagaggtcccagctattgtgtgctatggaggagaggggcagggaatttgaatagttccccttccttcctgtttcttgctgtggggcttttgttttggtctttctctctggactgatacggcctttggaaagggatgtgtctctgcagaaggaaccagtcttcttttaaacctgtgtcagaagttggaggcatctctctttttcaggcccttttcttggttatgctgcctgttaacttgccattctggaatgtagcagagttttctgtaaagccagccaccttacctttattcctattagaacatgaatctgtttgaagcaagctacatatatagtctccttgtcctgctccctagcttggatgctcttagacctggatgttcattcttatctcatagaggaaggatgaaagggcccttacaaccagacagacctgtgagatgtggtcactagtcacttggcttatctggcctctttaaactgtgccccaatttgcaaggacatattaaaatatatgattatttctcctaatctgtctgatttcattgtttccagtatttttgacatctggtcttcggcatctttgctttgacaacatggtttagacttcagtttgctttgacccatggactgctgagacttgagctattgaattactgatacgggagttgtgaggggtgtgttgagtctgttactccttctggttctaggtccctgcctgataagctgtattccacactatccgaagatcataccttaagcctcagcaagccctctgtcttaaatatcagagtgtgtgggttctgtaccttgtcagatccgacatggtgtccgtcccagcagcacattgggagctagccaaatctggattagacatagtcttgccttagggcacttgcagtctagtgatagaagtgacgctagaaatgtaagcacctcaaaggagagatctttgtctattttgctttgttcattaatgtatcccctatgcttagaacactgactggtatgtaagtatttaatacaaatgtgttgcataaatggacacaatgtctatgaacaatgtcaaaagagaagtacaaatgaataaggcagtttcagagagataagatattggcagaggaaatgaacagacaagttgatcttgttttttgttattgactatatgattctttggaatttgttgagacttgcattatagccttttgcagtttaatttttgaaaatattttctatgtgtttgaaaagagtaatgcatattttgtaattatcaggcatagggttctatatatgtctattagattaagcttttttgcccatggtgacaaatttgggagttttcacacaaataattgtgagattggattaaattgagcagaattggcctgattctgagctgtgatattggagatagttactagacccccatttctaaaactgatgatgccaggggtattctctacctctttatctcacttctgttattattatatagtgattctctttctgattaattatattaaagtcttttgtctgatattaatttacttattccaactcttttatggttagtttttgcctaacttattttttcatttattattttcaatgcctttgtgttttctaggttcatcttatgaatagtatataggtggaatatatagctacagatatagatagatattgtatataatattgtataataatattttatctgtcttttaatgggtgaatttggtccatttatatttattgtgatttctgataaagttagagttggagagacatgagtatacctggatggatgaattgctgatggccatgatgggagataatctaccacaacagtataccagaagatacctaataaatgttagttctcttttttaacccctgtctctagtctcttcctagtggatatttggatgatttaagtagattttttctgattagctccttgggtacaaatgttatatcttcctgacactctcagactctctaaaccctagcattctgaccttgtaggtggtgtataaaagaactggattgattgtagggggttaaagagggagtgggtggaaaggaaattgtggcaggagatgttgatgactcattgaaaacatatgagtggaaagaaaggctagaaatatgatggtagctagaaaagggagtaggtctcattgttggtatttttaagagaggatgtctgaagacggaaaaaaaggaactgacagaaaatgagtggttgaaggtattaatgaggcaaggactaagctatcacttatcagcttctttagagtgagaagcagggagaaagggatatacagaaaaatatttttacaaggtattccatagaaatatacatctctactaaattattagtgtaaactatgtaaagataggcaatatgacttttaaaatatagattaatctcatatttccttaccaagctcttaataaacattagttaggccaactggattttctgtctctactattttatagcactaggaagaacttttaattcatcaagtctatactcccatctaagataggagacctttcatagcatccttcacagatagttgtccaggaccttttgaacacttgtggttttaagaatctaccacctgaaatatgaagctgctgcctttgtccagaggtccggtagtaagaagctcctcttttattcaatagaaatctgcctatatgtaacaagctctttctggaacagcatatcatgaatataatttcattatatgtttgaagtctccaccatgtatctgtttcttcgtactccatcttctaacattacctgagacctgtctcataagaggacttctggatccccaagaaacttttgcctttttaaaacaaggaattccagttttttgcattcagactaaagcagttgcccagaaccatgaatgaaaacggaattttgtctgatttttaaatatctaaataaaatgattatgtagtttttttctttgtcactaagttgatactgtaaattacactgattttcagttgttgaaccagccttacattttcaggataaaccacacagaataataatatatttttttcaaaatatattgctgaatttgatttgccattattttgttgaggatttttgtgtttatatttatgaagaatattgttccatggttttttttataatgtctttatcttattttcatatcaagtaatgttgctctcataaaatttctttaattgaggttctctatttcttcttgtgggaattttggtagtttgtgtctttcagtgaatttttgtattttatctaagttgtcaagtttttatattatgacatagatttgtttatatatatatagagagagagacttgttctatatatatggattcatatatatatatatatatatataatgtctgtaggatttgtagtgatgttctctattttattcctgagatttatttttgtaccatctttctttttttcctgatcagcctgcctacaggcttaccaattttattgatctttccaaaaaccaaacttttggcttcattgattttcttttcattgttactgatttctgcttttatctttattatttccttctttctgagaaatttggttttaatttgttctttttctagtttatcctaaagtggaagcttagatcactgagttaatactttccttctttactaatataagcacttaatgctacacattttcttctgaccttttcctgcatccccccaaatttgacatattgtgcctttttatgtccattccatttgaaatattttctaatattcattgtgacttattttttgaactgtgagttatttggaaatgtgttgtttaatctgcaagcattttaggaatttgttagataccttcctgttactaagttttagtttaatttcataacgatcagagaatatttctatgtggtctcacttcttttaatttgattcaggtttgtttagtagcccagaatatggtctatcttgataaatctttcatatgcatttgaaaacaatgtatattttgcatttgttgggtcaagtgtcaattcagtcaagttggttgatagtggtgttcacctttctaaattcttacttattttctgtgtacttgttttatcaattactgagagaggagtgttgaaatctctaactacaattgcggattttcctagttctcctttcaggcctaagactttttggataatgtattttggaaccctgtgttagatgtgtacacatttaggagtgttacatttccttagtgaattgatccttttatcattatgaaattactctctttatccctggtaatattccttttcctgaaatctgctttgtttgatattaatatagccatttcagttttcttttgattagtgcttacatttatatcttttcccattgttttatttttaacccatttctgtctttatattcaaggtgagctttttttgtggatagcatataactgggtcttacttttttatacagtctaacaatctttaattcatgtagttaggccatttataattaatgcaattattgatatgattggattaaaactaccataaatattttttgtttcatctttttcttgtcccttttatcctctttttctgcttgcctttgtatttattgagatttgtttgtttgttttgttttgtttaaggtggagtctcgctctgttgcccaggctggagtgcagtggcacagtcttgctcactgccacctccacctcccaagttcaggcaattctcctgcctcagcctcccaagtagctgggactacaggcacgtgccgccatgcctgactaatttttgtatttttagtagagatggggtttcaccatgttggccaggctggtctcaaactcctgacctcagttgatctgcctgcctcagcctcccaaagtgctgggattacagacatgagccaccacatccagctgagaatttttattatttcattttatctccactattggcttatcattatacttctttttaaaaatgtagtgtgtgctctagtgtttacaacatatatctttcatcacagtctaccttccaattatatcacttcacgtatggtataaaaaccttagaatattatactccaagttctttcttctcaactcttgtgctgttgttgttatgcatttttcttttacataccctataaacccatagtacattactactatttttactttaaaaagtcaatcatcttttagagcaattaaacattttaaaaaatgtcttatatatttaccttcattttaaccatttctggagatcttagtttatttgtttggattcaaattctgtctgacatatcccttctgcctgaagaagtttctttctagttctcattatgcaagtttgttaataattaattctctcagcttttcatttagtttccaaagtctgtatttttcttttatttttgagaaatattttcaggagtatggaattccagattgacagggttctttctttcagtacctttaagatttcctttgttgttttctgggtttgcactttttcagatgagaagtatgctttcatgtattccctcaccctgtctgcctttaagattgtttctttccctttgattttcagccacttgaagattatatgcctaggtgtgtttggttgtttttgtttgtatttatactgcttgaagtactctgagatttttggatttgtggtttgatgtccttcattatttttggaaaatgcttaattattatgtaagtatttcttctgactcatcctctatttcttctctttctgagattccaattatatgcatattagaccatttgatattattccatagcttttagattctttgttttctttttttccccctactcttttatttctttgtgttttagtttggataatttctgttgactcatcttcaaaatcactgattttgtttccccagttgtgttgagtgtgcttgtgagcctgttgaagccatccttaatccatagaaacagaaagtagactattggttgcctagggttgggaaaccttagggtaggatatggggagtgactgtgaataggtatggcatttcttttacaggtgatgcaagtgcactaaattcattgaggtgatcagtgcacaactctttgactatacttaaaaagcattgatttgaagactttaaattgtatggtatatgaattatatctcaatagagcatatatatataaaatatgtattatataattatatattatatgtaatatatataatatataattatatataatatgtatatataatatatacaacttcatcttttatgttcaaaggctacattgataaaactctggttagaatcaggaaggagcaagacatcttactgatggtgctgaagggtgtatagaacaaaaataattctgaaggaaatgttacaggctgggcacagtggctcatacctgtaatcccagcactttgggaggccaagggggtggatcacctgaggtcaggagtttgagaccagcctgaccaacatggtaaaaccctgtgtctactaaaagtgcaaaattagccaggcatggtggtgcatgcctgtaacccagctactcaggaggctgaggcaggagaattgcttgaacccaggaggtggaggttgcagtgagctgcaccattgcactccagcctgggcaacaagagcgaaactccgtctcaaaaaaataaaaagaaatgttactataactgaagctggtggaaggataggaattattattttgtcccgtgttacatacttgattctaagtgttggaaaatgactctattaagtaggaagtgttcttaattagtccatgtctttatgtttccatgtgttttgtaatttatagttattagtcttataaattttaaaagttccaagtcatcctgatgctttgagttctacctagtggtcaaactcctctctactatgtgtccttggacgcctgacccaccaggtactagtgttatctggtagtgatactgttgaattttaatgacctggctgagagtttccatattacctccttctgttataaaacaaaatacaagtaggcctgtggagagttctccaaactgagaattttagtacagctttcctacaggaggttcactaagaaatccacaaacatcatgtggtagcctaccaggtgctccttagctgcaggaaagatacccatgccctggagtgttgtatgtttccagacactcagaacacttctaagtgtttcttgatgtttctggtatggcataacccccaaaatatattaagcaaaataaagcaaggtgtagaagagtgtgtataatatgttattatttgtatttaagaaaaagtgggtataaaaatatacatgtattttcaaaacatatctctagaagatgtgattacatggctgattctggaagagaagttggtgctggatacctaggagctgggtacctagaagcaggtgtgggtgaaagacatttcactatatacttttgtatcttttcagttgaaggggcaagggaaaacttctcctttgccctctgaaggttcactaaacatcaaatgacaaaaggtggattaatagtagaagaggcacataaatttatttgatcatagttttccatgacatgggagccttcgaatgaagacccaaagatacaaaggaaacgttcatttttatgcttaggttcaataaactgtggacaactgtgtaaaaatatgattgggcaaaaagggtataatctaatgctaatagactgagtagggaaactcagcaaggcctttctgtttgtattcctcctctctgtgcagcatttcttccttctgatggggcaagactctctctggaatggggctcttatgacctacagtcaaacaaggtaggtcagataatttctttatggccagtttttacacagaaaggccagggggagaagttagaataatatttttaggtttcctggctggctttaaggaaaagggattctggtttctataacctgccttggggaagagggattctggtgtccttggaggagaatgagtggccagagacaggagggaagaagaaggtcagagagaaacttttgcttctgaggctgcttctgaagtcttcattttggggtattgttttctgagcccccaaacaatttcaaaccatataactgtatttgctattcaaacaggaatacaagttaaattaaaacaaaatcttcctaggatggttaattaaacttgaggctcagattggcccttgataatttactctttgtccttatttctcatccctggggtcttctgtcttcaggtcttccacccctgatcagttgcctgccacagacatattcaaatattcccctccgtctctgagcctaatagaaactctacacagggatgaagcaggatttctaaaatctctcttgtgactgattgccatattgaacctcaggctttctagaccagtggttctcaaccttgagcctgcatcagagtcacctggaggacttgtcaatacgcaggtttctcagccccacacccagagtttctgattcagcaggtctggggtaggacccaataatctgcatttctaacaagttcccaggtgatgctaattagggaccacactttgagaaacactgctctatcctaaaatagtttctcctatgatggattgatgtgtagtttttgtgttccagttgtgtcttcatttagacatataaagaaataaaaggagagctatgttcctttccatgggcatgcttatagtgcaccattgcccagctctctgtccagccaacaatacccttcaggctcgttatgcctcataagacaatatgcattttaccaccagcagagctgacacatcagaaacctggcatcctccttcatctctacttcccggagcagacattcttgtggtcactgccatcaactccctgtaaagacttaattggtattttagagcaggcactagaagagtcatgctaattactcatttcccttccagtgtttctctccagtggtgctattagcattttaggcaagacaaaatgctttataatgctctttataatgagcattctatttaatgtaggacattcagctcctttcccttgttctcaagtcgttgtgacagtcaataatcccactgcgcatcccaatgctccctcaatccccctaacccttaaccccgtgcaacctgcctgcaccacctttacccacctgcacccccacctccaggatgggtgatgagggcaactcaactttccactgagaaccaccaagacctttattaaattacctgtccagacctttgctttagatccctgcaaaaatcccaagacatattttattattttcctttttatcaaatgttgatattaaaaagttaccaaactctgaggctgggcgcagtagctcacgcctgtaatcccagcactttgggaggccgaggcatgtggattgcttgaggtcaggagttcaagaccagcctagccaacatggtgaaaccccatctctactaaaaatacaaaaattagcaggacatggtggcgtgcacctgtagtcccaactacttgggagactgaggcacaagaatcacttgaacatgggaggcagaggttgcagtgagctgagattgcaccactgcacaccccagcctgggcgacagagcaagatctgtctccaagaaacaaaaaacaaacaaacaaacaaacaaaaaacagtaatgaaatgccaaatgtttccttttgaaaaccctattggtagaattgtccattgttcagtggacaattttccagtgttgttcagtcctctctctggagagagaccttttggagattagcactggagggccctgttacctgatgaagtggcttcgtgtcctcatttgacaaggagaattgtgtgacctctcctgtttccttttttgccatgagtgtcagggaactcggggatagatgtaatgcctgatagggttgaaaaattagcttagaaaatcatttcacccatattatcagcttttatatagttttaatttttacataattaacagctttattttttgttttcttgtgagtggcttctaattatttgagaagcaggagagtattaaatgtctgtggtgcatgtgagttgtgaaataatagccagatgtggcctaatcagctgggcaaaagaatggaaatgacagagcacccaggggcctcccgtgtgcatggggcagggtagggaactgaggatagggagagcagcaggtttggaggctcctctggctggtagaaagcagaagggggctgctgagaatgaagggccaggtgtgctcactggaggtggggtcaaggttaaggaactaagaagcaataggtatccctaaaccttcaccagagatggatatacattgaggggggtggcagcagatgtcctgagcttgacctttctcttcaaggtcaagagatgtcctgctgggattgcctggattagcttatgagacatgtggaaaccattccttatagaaacacctgttctgcttgagctctcatttggtcctgtggccaaacagattacagggagcaactgggtgcagacaaggctggcattcctgaaatgaactttctgctgacacttcctgtccaggtggaaaagagcacctggctgtgggactgtaatggggtgggaattccacctcatcctgccccttctttgagagccccgtctctcccgtttccttttcaaagtgtccctcaaagtgtcaggggaagccacaaccctaaactcagggtttccaccctctctctctcctttgtgatttattaagggattgtgtaaggacgttttcagtgtggaagtcccctgctgaaatgctgtcttagtctatctgtgctgctatgacaaaatacctgaggctgggtgatttacaaatagtagaattttttttcctcacagttctggaaaatggaagtccaagatcaagacaccagcagatttggtgtcttgtgagagctgttttctgcttccaagatggtgccaagttgctttgtcctcacttggcagaagacagaagagcaaaaaagggcctcaccagttcgctccagcccctttataaggttgctgatcctattctccagggctctgccctcttgacttaatcacctcctaaaggtcctacctcttaacactgttgcatcagggattaagattcaacataaattttgggagggaacagaaaacattcaaaaacagcaaatgccattgtgagggcttgatttcctttggattttcaaactatccttttcaaattaacacaccatctggatgggtagcttatggagggctctgaaataagttatttgtccctctgaggaaatggaattgctacttactgtaggtatttatttccctcttaagaagtgagattttccctcagaggaaaacaaaagtgtctgaagggaggagaagggggaacttcaggagcctgggccaggctgagtcgggggtcccgtgttccaccttggtgtggtgctgggggaacagagcatatcagcccagccctgggacagtgaaggtaggagagacactcctctagaagcacagtgctttcccagtgtgttggtgtttcttttcctgccctgtcagccctttattcccctggccatgtcaccgaagccagatccctgatagccaggagccagctccctccagaatgccccaacagccacctacctgcactgcctttcacctgcaggaaggcagctcccatggccttcctccctcacccctgccagggcctctccctagaccctgcaatctaccctgagtaccaccgtcatggttctgcgtctgtcctctgtgggggaagaaagtacctcgttctggttctccttgtaactattgttcctgaactctaaacgtataacccccccacacggtaataaaagccacccatcgtcactgttgggatgcttccctatttctacatagcctgtcccagagtgatgtactcctcccagccgctcccacatcccttttgcgtgtctgtctctgatttggctttcctttcctccttcccacccacccaggtggctcccggctgcctctgctgcagttcagagcaacttcaggagcttcccagccgagagcttcaggacgcctttcctgtcccactggcccagttgccacaacaaacaacagagaagacggtggtgagtgaacagagtttacattatgctgttgaccattcctcctcagtccaccctggggaggctgcagagaggggagctgtgtgtctttctaggtgcccagaagagactgctgcccccaaggtgagatggcacctggccagctgcccaagcaggtaagagtgaaggcagtatgctgtagcattgtctgttgattttggcttagctggtcagaattcttgaactggcgaaggtggtggaaatcatcattggaactagccaggaaacaagattaagggcctgcgggttgccctggctgctgctagaaactgttcacactgcacgctgtggtactccatccttccaagctggctgaaaactttctcctcctgctgctccaggatgctgctctgactaactctggttttgatttctcctttgactccatggttccttggcaagcaggcattgttggggatggaacacaggtggaactttgtgttacctggacccataaccatagctagttctgtgggactgagcagctgccagaacactatccataacctggtcacctgcactctgtttggtgagaaatcctgtgtgataataggtgtagagtgagcctgtttaacaaagacagtgccttctttgggcagctgtacaatagtaaatattctaaataatattccaaaatgtgggtgatcgtttgggatttcatatgtgtaatttggggcttagggtgtttccattgctttctgcagctttagcagtgaggaaggtggtttcccgctgctacccttgaccccctccttagggtctaactactacagtacttcaggggtcctcagctaacatcagcctggggtgagggtgtcagttaactctcagtgcagaggaggctggcagggccaaaaccaataccagtgaaacaaagaaagtgagaaggttggtgggtggtggacctggggaggcatgaattaataacaggaagtgtggtctgtgatttcaaaaaaataatactgataatttcccccatggtgctaaacctgctttgaactatgaccccatcattgacttgagggaatagcttcttagattactttgaaagacatatcgaagtatgtagggcctgctgttttgttaaggaaataaatcccataacattaaaggaatttttttaaaagtgactataaggttggactctaatatggctgataaagggaaaagcagtgtcctgctactgcctgaaagaaaacacagcatatgtggctcagatgggggctttattttaggatttgtgggaggctggaccaaagcgaacactgaacatatgagcaaggcgttctttaaaggaaagccttaaggcttttcacactgtgaagcaccgtaggtagaagatcaaaggatgcacaaaataatgcaagtcccttctattttaaagacacatctgcctggccaaaagtcaggatgaaagtagtgcctctggtactggtgagtgggctatgccagaagccctctttgtttagtcacctactttatgctgtgacgggaacatttgcagtgaggaaaagaagtaaataaaaatgagataaaacttcagttttaaagcctaggggcacatgacaccataggactcacccagtattcctttctttgcatcattggggccatgtgagcaaagctcttgagatacatctggtcagtgcaaaggcagtctagaactcatgcccttctttgtgagtcccttaaagtctgagccaatgggacactcataggtaatacaggactccttagcaagttgtaaacattttttaaatttaatttaattttaaaaaatttacaaataatagttgtgcatattcatggagtacatggtgatgttttgatataattaatatatggtgatcagatctgggcaattagcatatccatcattgcaaacatttatcatttctttatgtttgaaacattcaatatcctcttctacctatttgaaactatataatatattattgttaactatagtcatcctaccatggtatagaacagtagaacttcttcttcttatctagctgtaattttgtatcctttagaaatctgtccctatcccacccttcttcctacccttcccagcctctagtatgctctgttctacttttttacttctttgagatcaatattttttagctttcacatatgaatgagaacacaccatgtctaactttctgttcctggcttatctcacttaatataatgtcctccagttctatccgtgttgccgcaaatggcaggattcattcttttttatggctgaatagtattccattgtgtatctatacaacattttatttatccattcatcttctgttggatacctacattgatcccatttcttggctattgtaaatagtgctgcagtagacatggggatacagacgtctcttcgatgatttccttttttcctttggataaatttccagtagtagaattgctggatcatatggctgttttatttttagttttggaagaacctctatattggttttcatagttgctatactagtttatattcccaccaagagtatatgagtttccttttctcctcatccttgccagcatttgttgtttgtctttttgaaaatagccattctaactgggataagatgatacctcattgtggttttgatttgtatttccctgatgattagtgatgttgggcagttttccatatatttgttggcaatttatatttcttcttttgagaaatgtctgttcatatcatttgcccattttctaatcagattgtttttctgctgttgaattgagttccttgtatattctggatattaatcccctgtcaggtgaatagtttgcaaatattttctcccatcctgtaggttttttcactatttgttttatttgcttcccttgctatgcagaaacattttcatttgatataatactatttgtttatttttgcttctgttccctgtgcttttgaggtcttattcataaaatattttcccagaccaatgttctgaggcattttccttatgttttcttctagtaattttatcatttcaggtcttacatttaggtctttgatccattttgagttgatttttgtataggatgagcggtggggggtctagtcttattcttctgcatttggatatccagttttcccagcaccatctattcaagagagtatccttttcccaaagatgttcttggtacctttgctgaaaatcaattggctgtacctatgtggattaatttctgggttctctatttgttccgttggtctatgtgtctgtttttatgctaataccatgctgtttgggttactacagctttgtagtatattttgaggtctagtagtgtgatacccccagctttgtcatttttggtcgggactgctttggctatttagggcctttcattgttccatacaaagtttaggattttttttctatttatgtgaagaatttcattggtattctttggataatattgtcattttaacaatattaattcttctgatccatgggcataggatgcgtttccacttgtttgtatcctcttcaatctctttcatcagtgttttgtagtttttcttgtagaggtctttcacctccttggttaaatttattcctatttttttttagtagctattgtaaatcggatttgctttcttgatttcttttcagctagtttgttgcttgtgtgtagaaatgctactcatttttgtatattaattttgtatcctgtaactttactaaatttgtttatcagttctaagttttttggtagagtctttatatatatatatatatatatatatatatatatatatatatatatatatatatatggtgtttttcatcttttcatttccagatgtaagaatcccttgagcatttcttgtaaggccagtttagtggtgatgaattcctttactttttgcttgtctgtgaaatattttatttcttcttcatttctgaaggttagctttgctgggtatagtattcttggctgacagagtttttcccttctttctttcaatagtttaaattctattctttcctggcctgtaagattccttttgagaaatctcctgttagtctaatagagattcccttatatgtaacttggtgcttttctcttgatgctttcaaaattctttctttgtctttgacttttgacaatttgattataatgtgccttagtgaggacctgtttgggtttaatctatttggggttctttgagctttctagacctgaatgtccatctctcccctaagacttaggaagttttctgctaatttttattgcattaattgatttccttttagttctttttaaatgatatccatctctttgttgaatttctcattcaaatcttcaattattttcctgatttcatcagattatctcactgattttccttaagattattatttcgaattgtttttctggcatttcatatatttccttatgattggattctgttactggataattactatctttcttgggaggtaacatattttctgatttttttatggttgtgtttctacattgatttctatgcatctggtggaaaagttgcctcttccaattttatgaagtaggctttgtagagaaagacttatatgaatgtgtcttgtgatgtcggttcagtggggtgcatttgcctgggttctaggtggatgcattagtgtagtctctgtgtagtttcttcacctgtaatccacactagtggcatttgtgatttctcagtgacctaggctgaaagagtttgtggtgacagtggtgcagctttgctaggctgggcttgctgggctctttctaaggttggaggatataaatgtaaatgatggattgaccaaatttgggtctagcttgctgggtttgggagcccagggctgttattttggccaggagcatgagcatgcagatgtttggccaacctagtgtgcctgtcaggagtggtctgtggggctgcttttcagactcaggacaggatgcggacagaagtccacttggctggactcaggttgtgtttgctggggactacctacaggtctgtttcttatgcttgtgacacagctgcatggttgcctgcttggctggggggcatgtctgctggggatggcccatggggctctttcttcatctcaggacatgggcttatagctgctcagccagcctggtgatgtgtctgccaggggcagcccatgcagctgcttattaggcccaggatgcaggtgcaagactgctcaactggtgtggtggcatgcctgccagaggtggcccacagggctatatctcaggctgggacgtggacagacagctgctcagccagcctgggagaatatctgctgagggtggtccacagcgttgtttcttaggtttgggacccaggtgcaaagctgctcagctggcataagggcatacctgccaggaatgtcctgtgggtttctcaggcccttttttgggggtgggggtggtacagggccactaggcaggccagggacatgcctgcaaaggggggatgctattatggagctgtttctcaggtcctgagtgtggatgcatagccactttgctggtgcaggggcatatcaactgcttgaaggctcaggggcctctcctatttagaggagggcatgcaaccatttggctggctcaagggtgggttttccccaggcagaactggcagattgttcctctggctggaagtgcaatggcaggggttggtttccctgctgtacaggaccagagtcacagctgatcttgggcccatgcaactggggttgtggctacagccacccacataagcttggtgtaaggaaaatggagctccagtgctggaaggtgcagtacttactggcccccagagcaggatgcaatccagaggtggctgaggtctcaagattgtgccttgctgcagcagcttggctcacaagggatgggagagatgggaagtgcatactttgtgctccgaattcagggcaatgtggctgtgtgaattccagtggctctccaaactgggcccaggacttgtaaggactgtgggattctcctgttgtaaggactgtaggtgtttgcaatgccagtggggaccggtggggatcttctgcttatcttttccttgcaacaagaagtctctcctgactccagacaatcttggcaggggagatagatctgcagaggttgggtggctccatgctgccctcctggacaccacaggtgtatctccatgccctgctactttctaacactctccctaccaacatttcttaatagatgtttcaaaagggcaagtaacctgtagtttcctccataggtattttcagagatgtcagtggaaagtctcttatctgaattctatgactttttttttcttttttttttttttgagacagggtgttgctctgttgcccaggttggagtgcaacagcacaattatagctcactgcagcctcgacctctcaggtttaaacaatcctcctgcctcagcctcctaagtagctgggactataggcacacaccaccatatccagcttttgaattctttgtagagatgggatcttgctgtgttgtcagggctggcctcaaactcctgggctcaagcaatcctcccacctcagcctcttgaagtgctgggattccaggcttgagccaacgaacccagccttatgaattccgtgtttttaatgaagatgatcattctgcttttgatataataactttgaacaatgaattatgatatatatatcaaattatatttacatatgcttcattattatttttctttttttaatgaaagtacatgtattttagagagctctatattgcttgatatataacttgtagttaaatatggggtttgatcatgtttctttaaaaggtgggcattaggaccttgatcaatagtgtaaccatctcttacgttattgtttctatgaaaaattcagtccccttccccagaaaagaatgtaactcccatcaatgtggctaacatgacatgacattctaccaggcatgactttcattcatttaacaagtgctctttgaatgaggagtgaggcaaagtccctgctctcacgtaattttcattctagtggaacaggaagacagtaacatccagcagtgattttaaagtacagtaagagccagatgctgtggctcacacctgtaatcccagcactttgggagaccaaggcggatggatcacctgaggtcaggagttcgagaccagcctggccaacatagtgaaaccctgtctctactcaaaatacaaaaattagctggacatgatggtgtaggcctgtaatcccagctactcaggaggctgaggcaggagaatcacttggacccaggaggcagaggttgcggcgagctgagatcgcgccattgcactccagcctgggggacaagagtgaaactccgtctcaaaaaaaaaaaaaagaaacaataaagtacaataaggagcataaggggatgaagagattgggtagaggggtattttatataggatggtcaagtggtcaagaaaggcccccctgtggaggtgatatgtaagcagaaaacaataaaataaaggagggggtcttgagaagatctggaggaagaaaactattcagggtaggaaaactgtccattgcaaaggccctgagtcaggagtgaacttggtgtggttggaggaacagcaaagcaggccagtgagtgtaagagtgggagggcagagcttaataggagatgagtttggggcagtgagccagagctgggtgatgcagggccgtgtaggccatggtaaggggtttgggttttattctgtgtgtagtgggcagccattggagggtgttaagtggggagcaccgcaatctgactgtgtgagggagctaactgtagggaagtgagagtggaattagggaggcacataggagactgctacagtggtctaaaagcatgacaatggtgccttggatggctggtggcagtggaggtggaggggagtgataagattaaagttagaaccagtcagagctgcttatggattggaagtggagggagaggagtgagggatgaattctgggcctgagcacttgggtggacagtggagccttttgcctggatgggaaatgctgtgagaagagcacatttagctggaggaaatggagaggtcctgtatgtcttgttagataagccagtcgagatctggagtagacagtgagatgtcaaattctggaggtcagtggagagggtgggataagaaatgtgtgtggagatcaccagcttctggatggtgtataaaaccacaggactggatttgatcacctcaggagtgagcatgccagtcatttagagacggggaaaaggaagtaggaagaaaaacaggagagcatggcattccagaaaccaagggaagaaagtctgtcaagaagcaggggtggtgattaactatgttaatgtgttagtgcagccacgaggtgtttaaacccattatcacacaaggaatgatgctctcttggtgatttcctgctttcatatgtgttcgtggacctcatcttcccccattaaactggaacctcattgaagccagggatgatttctttcttctgtttgcacttagagccacttaaagctgtcccttaactgcctcactccaaaagctctgcagtgtgaggttgaggcctgaagtgacgtttcctgaggagctacttttggagttgtgtattgggtgggtgtggggacagtgatgacaaggaagtccaggactagtcccttcctaggcagaagaggctactgatatcccaactctgagtagaagggttgggtggcagaggagaagacagatggaagaagtaggacagatgcacaaatgtgtcagattcttaacttcagaaactgtcagccccacaaacgtggtcatagaacttcaacctgaggaagcagggacactgatgggtcatgatgggctctttgcccactgattgatgcagcagtgggattctttaccatactctgtaaagtacacatgaccccctgctgcagatgaagaaggatggaggagtccctcatggcttcccttgaaggtttcttacacagaactaccagttcaggttcttacaaagactggataatccagatggtacctgtgtctggggagtaattctatgggctgcgctttgggacagcagtggcctcttctcttgaccaggtttcatttctctgtattgatgaggagtacccaggcctgagggtctggccatttttgactagaggcagtatctgtgttggaatagcctgaagaccctgtcttagcctattttatgctgctgtaaaagaatatcacaaaccaggtaatttataaagaatagagacttatttcttacagttctggaggctgggaagtccaagttcaagggctggcttcttgccagggccttcttgctgtgtcatcccacggtggaaggtagaaggacaagagagaataagagagcaagaggagggttggacttttttttaaataagaaacccactcctacaataatgaacccattcctgaaataacatgaatctattaatgagaacaaagccttcattacttaatcacctcttaaaggtcccacctctcaaaaccgttgcagtgggagtcaagtttccaaaacatgaattctgggggacacattcaaaccacagcaaccccctacagggttggacaaactggaagttaatctatataggtaaagggttgggttttctggcaattgggagattgcgatgaggtttggatcttgtcctgtctcttacataaacataatgaaagcagacgacccatagtatcataggaaagcataagagtaatttctggttggggcacttgtgaacactttgacaaaatggaaagccatcttgggggaggcaggaccagcagttgagcccctacaacacaaaggagaccctgggtgcgggatgaaggtggacccctagccctgtaaagtttaagctggtaggaggcctgcagatcaagggttcatcccctggagtttttcttggaacttattactaaatgtttccagataatccctgatcatggggcctgataaaattcattcttactgctaaaactatgttaagataaaagttgtttttattcatttgctatccattaaagccatcacagactaattatttttcaaaagaaagaaaactatgctacagctctgcaagtaacttatgaccagatgttgagatcttgggataccctgccctgcttaaaatatattataagagatctttagacagtaaaatctaaaaataaaacccaaaatataaaaaaagatgaataatagcaaagcatgatagttcaagagttttgttggctttttaattttttatttatttttaaaagaatcattagttataatttcataccagttgctgagacttagatataccaattttgtagtggggagggagggtaattatagaaagcaagagagaaaactttgaaaatcactgttagctcagccgggcgtggtggctcacgcctgtaatcccagcactttgggagaccgaggtgggtggatcacttgaggtcgggagttcgacaccagcctggttaacatggtgaaatcctgtccctactaaatatacaaaaaaaagaatagccaggtgtggtggtgcacactcgtaatcccagctacttggggaactgagacaggagaattgcctgaacctgggaggcagaggttgcagtgagccgagattgcactactgcattccagcctgggcaacagagtcagacttcgtcagaaagaaaagaataaaagagagagagaggaaagaaggaaggaaggaaggaaggagggaaggaaggaaggaaggaaggagggaaggaaggaaggaaggagggaaggaaggaaggaaggaaggaaggaaggaaatcaatcactggtagcttagctgaatagtccatgggtatctgcaagctagactttatcatgcacacaaatcctcgatctaaaaatgagtggcagtggaagtagtggtaggaggcaggagtgaagatcatgtcccattaatttagggtatctgaaaaagacgtggagccatgactgcttctgtatctaccagctttccacttagctgcctgaggtgagtagaaattatattaggcatttccataaccttatccttaactgtgttccctccttttcttagtgcctgaggtgagtctggcagtatctgtacttccctgctcccattcatacaaccatgttcttagatcctggcttgatgtgggttagtcagctgttctaggccagatttctcagatttctgttcttacctgttctgcccaactacaacagctggtgtcctgctggcctttgcctgagtcacaccctcaggtcatgcatccccaccttttacaggcagggttgttagcatgagagccctgctctgtgctctcagtgaaggatgaagggagaggagaagagcaccctaggatgctggtagaactttcagttctcttgccaacaaattgaatgaagttagaagctctccgtaagttttattcagtacagacctggtgtctgatgctacagttaagagactagatttagaaggagggtggtgcacctgttttggtgggaggaatgaatgggatgtaaggagagatgatggtctgtgcatctcagacaaaggaacttaaaaagaggagtcttcaaaagaatgccccctgcaaaaaaaaaaaaaaaaaaaaaaggaggcttagaaatatctcaaatgaacagaaatttgaattacaatccagaagatgaaaatcaacaggaataataagaaaataaggaaacattctttacttaaaaattttaaaaagtcagctaaacgttgctaggatgtgaaggggtagatgacattttaagataaagactatgggaaaggagtttattttgccactatcttttctataggcttttgctaatagctgtgaagggtcttagatttcatatactttcaagttaaggagttaacctgccacagtttcatacctgctggcagaagatgagactcatggggtagagataagggactttatgattcacaacagtaacagtaatcagaacatcatcattttcctgtactggttctttgagctccaacccccacaggttgacaccaagagagccaggtgatacctgcacacacagtggagagaattcctgagcctagggaacttgagagctctgtaatgaacagtaagtgtgcctgcactttgctccatcctgagggaaactctctctttgaaggctgtttgctatgcaaatcttcttgaaaagatagtcgggaacaaaggcagtcagtgcctctgcttgcaagatgtgcaaaactgtgagagacatgaagaatggtctcccaactgttgcatcaataaaaaggaaaggaagctaatgtttatttcatccttgtcatgcaccaagcactgaccaggagacttctcatttcttgcctcatcaaagtttcaaagcagccttgcccagggtggtactgttgttgttttatcggtaaggaagctggtgagtcagggaactggaatatctaggtggaggacttgtgtatgtattatgtacttcttataatgtaagcattgtgctaagaagtagctaaaacttaattagatgcttatcaggtgccaagcacagttctaagagctctccatgaattgttgatttaattcaccacaactaagattatcaggtgctgctgaggaaactaaggcacagtgggtgacagaactgagattcaaatctgcacatttaaccactgtgtggttgcgagttgtgggtttttgtttttgtttttgagagagggtctggctctgtcgctcaggctggagtgcagaggtgccatctctgctcactacaacctctgccttctggactcaagcaatcctcctgcctcagccccttgagtggctgagaccacaggcatgcaccaccattcccagttaatttttgtgtttttttgtagagttgtggtttgccgtgttgtccaggcttgtctcgacctcctgggctcaagtggtcgacttgccttggcctcccaaagtgctgggattacaggttccctgtggttgtgttctttcttcattcctcagagtcatagcaagagggtcatagtcaaactaatgtgtgcccagaggaagtggatgtatttgaaaactgccaagtagaaatagttgaagtgggactgattgtgtttaatctgcagaatgataaaggataagtgatgcctgtcttcaaacatttgtaggcatgtcttatagaagaggagagttcactctgtgtgactgcaggaggcagaattgggtccatttacggggaggcatatcatggctcagcaaaaatcatttcttgaataatacagtgccccctgacatcataagggaatggactacctgtgagagtggtaactcagtggttacctttcaaagatgtgctgtctgggctctgtcaaggtccccacaataaacccctctgctataggagctgggcaatggaagaggatggccctaatgaggttctctagacctttcctaagagagctgaccctgctaacagtgacctgaactccttcccctgccatgccccctgtcccttcttggagcctcaggcctcaggtctgttggacatgcacagagatggtttctgcatgtgtgaggagggtgccttacctcttgagaatccaggaccaccctaaggatctggaggagttagttctgcagctcctcgcactctcaggcctgccctatttttggttccttacccgctatcagcctgtaatcaccagcctcatggctcagctataccctggcaaatctcgttgcacacatgaggcccactgttgcccagtttgggacagaataagattctgtggttctgtgattcactctttccttgtcaagtagcccaagctttaaaaagcaagtgggaacaggtggttgggccagtgctgctctgtgatgaccttgctacggccccctgacaactcccctggtgtagctgtaggcctgggctgagcagatctgatccagatgcaggcccagaggggaaccctgggcaggtagggaaaggaatttggggagatggtaagaaacaggagtggtggcaactggcttcacagtatatgttccactctgctagaaatggcctctgctaggggctaaagactccccagaagtagtcttgtcttaattactctgtggacatctttaaaagaatctcattttcatcaaagggttttaaagagtgatgcttagcccagtgtaaagggcatagtcaagatctgatcctgaaataatatctctgctatcctagatgtcaggagaaactaaaaatatcctcataaccctgaggaattcttggtttattgcacccatctcttttccctctgaacatccttccagaaagtgagagagtgaggaagtgagccaagaagctttaattacccaatctgctgacattattttatctgcgccactgatattaaatctgcacagcattccacttaaatctcagtgctaacagcagcctctacaaacttgggcctttgtccttctgctggctgtggcccatgctctgtttcccaccctactgcaccctccttcagacttcttaaattccgaagctttctgtggcaccggaaatgatctgtctgtggaatgtccatacttcaggaaagtccccgatctgtgtgtgtttattcccaaattctgctccccccaactcagcctggctgtttgtggttgagttctggcacgtgcccatcattacagaaacctggatttggcaggggcattgtgccatatttctattattggcatatttggagaaggaggagaaagtctgtctagttttttttccctctcttttatgtacaaatgaaaatttctgtcttatgttattaacttttctggccaaccagtgaaatacatcttcaatttcaggttggttccctggagtgtggaagttttctcttggtttaatgttgactctgtcgcctaatagctggttcatttagcacccaattggtgctatggttatagctgcaacaggccacatttaaggagggcttccagggaaccagcactgtgttgaggacttcagtcctcatgacctctgagacaagtgttgttaccatcttccccccattatagggaggacatgagctgaaagaggtccaagaactttgctgaaggtcttgcagcagagctggggctggaagccaggcagtgtggtgccagagctggctgacttcagcgcctacttcatgcttccatgcatgcatacatatgccatacatacatatgggagacccataggatgtatgccatcaatgcatactgatgtgcacaccagtgctcccaccatcctcccaggaagtgttgatatcattataaaactctgtcctcagcaagtgtgtattaagaacttactgtgtgcagatccaaagatgtacaaacccaggtcctgctcataggcattgcagctggggagacaaggccttgatctgcagaatctgagctgggctgagcaggggaagcttcatctgttttgttcactgctatgtctccagggactattatagcacctggcaggtagtaagctctcaaaaacgtgatgaatgaacaaacttctaattaaacaaagccatttacatttttacaaataaatgaaagaacacatgaatttctaaaaagtttgaaggacataaactgagattagaggacagccttttaaattatttacgttaagcggtataaaaagctccccatgttgtcctcatttttcttacttttcataggttggtgggcacgatgtgatggatggggtgcttgtggacccatgtcatagatagggctttagaggctcttagatcctgctgggtggggagggcttagagaagagatggaccttgaggttggagtaggactcagctgggtggaaaagaccatgggaggcattccagagctgcccccactggcaggattatactggagagggcagaagcctcatgttttgcttgatagcaatcgttttgaacttcacgacttctcgaagcttggatccttttctgtcttactcaatacttgcctcacttcccaaggcttgcctaacttggttgggtatctaagtgtacatcccttcaaaccatgtaggaatccctggacctgatacttgcctgaattctggcaccagatcaagaagaacaagcttaaacggaggctgaggcaggagagtaaaatactggggagccacaagtcagcaccaggcaagttgacaggaatcaagaggacctggatgcaagagccataaaatcccatgcactctgactcagtaattgaagttcttgaaatgtatcttggggaaataatctaaaggattattatggaaataaaggggccaggtgtggtggctcatgcctgtaatcccagtgctttgggaggccaaggtgggtgaatcacctgaggtcaggagttcaagaccagcctgaccaacaaggtgaaaccctgtctctactaaaaatacaaaaattagccaggcatggtgtcaggtgcctgtagtcctagctactcgggaggctgagacaggagacttgcttgaacctgggaggtggaggttgcagtgagccgagatcatgccgctgtactccagcctgggtaacagaatgagactccatctaaaaaaagaaagaaagaaagaaagaaaggatcagtttatgtccatgaaactgtttgttttaatgaaattggaagcaacctaaatagtaaataacaggggcatcattaagttttggcttgtctacttgctagaatatgatacagtcactgaaaataagatttatgaagagtgttccatatctgaggaaaagcatgaaaaatgaaggcaatgataatttgtatatataattttatttttaaaagtacatacatagaaacagattggaaaaatattacagaaaattatagtatttatattgggggaaaagtcatttgtaatcgtactcacgaccaaacttttagccaatattgtttatttgtttatgaatgacaaaagatgatgagacaagggaactcgggtgagttcaacattcctgtaaagagtcagaaaccaagacactgtctgtctagcaaaggagtaaggacagctatgagaacatgtccaaaataacccggagtgtgaaataacaggttcctggacagaggggacatgaagcctgagcttggccggaatagggtgaatgtggccggggaagatacctttgtcttttgtttttctagaggcttggtatctgtaaccaaatttatccctgagcccgagacacaggaacagggcccatgagtcagtgtttctgtggcagccttctgggtcagtgcctacacaggcagggcaggcaccaaatttgacacagctgcatggggaagatatctttgaagtcatgtcttgtgtctagacttagggagacatgggagtgattagggtagaggtggccttatgtatagcccggctcccctgaatagtcccagcatgagtattcaaagagccctttccattctcaagagctctcatttggataatatgttatgtggtcaccctaattattgaaaaggaggttggaggacattctgggttgatgacagttgctctgctggttgcctctagtgcttaagaggccgtgaattgtccgggcatggtggctcatgcctgtaatcccagcactttgggaggctaaggcaggcagattgcttgaggttgggagttcgagcccagcctggccaacatggtgaaaccccgtctctactaaaaatacaaaaattagtcaggcgtggtcgcacatgtctgtaatcccagcaactcgggaggctgaggcaggagaatcgcttgaacccgggaggcagaggttgcagtgagctgagatcacgtcactgcattccagcctgggcaacagagcgagactccatctcaaaaaaaaaaaagagagagagagacagtgaattaagattccctgacgcagaggtgggcccagcctgatggagaagtggcccaggtgttgtagatgaatacagttctgctgtctatcctgattaagataaccaaggtaattattcccaagctgccccagcatgtggctagaattcatatttaactttgacccaagagctccttttccccttgcagtcttcctcccccatcccacaaacctggtacatgaccattaaaatctcaataagcagaagcttaagtaagggtaaataatttgccagctgaaccttcccctatttgcaaccttttagcattagcaagttcttgacttttcatgaaaaagccctggtatggctagtgcaaaaatcagttcaaatggtagaggatgataactttaagcagatagggacttggcctgagtgggctctgtttacttcctgctgtctgccctttcttctatcggctctgtcaaggcacgttttttgggaaccccattactgagcagactgccaagttgaccatcagtgatctagcctgggagccaagcctaggttcatcttgcaagaaaagtggggtgggattgtggagaaggcccccttccctgtgcccacaggagaattggtgtgaccctgagtgccccaatatgcctggctggacatcttgggagcactgcgaaacaggaggtaaagaccttcacaaagtatctcctcacagacagcctcagctcagtggggcccccagtcaacggagaagccgtgacaggcacagctgactggatgtgtgaacaaacagattaacagttggccctgcatcagggatttccaaagtaaagagacatctaggtctttcatagatgttttgttcagttggttggttgagggacacaggtgacaagtgttggggcaaactctggcttttcctggacttaagcaagaaattaccttttggcacctggacactgttttaagtctctagttaagagataaggggaaaccactgtctcactcaagagagaacgctctgctttagaggccaggctagatatggaattggccgggatctgtggagaggacacctgagcaagcatgggctaatgtcaaaccatagcttcctagagaggttgggtggggaaacctgactttcagtgggggagaaagtaccactgcaaagtcttaaactgaaacaggtgtaagcaagttggttctgaccgcccctcatttggtttaagcttacatcacaaggaacaggtgctgtcaataatgaattcagtttttctcttgagcccagaagcagagcgggatgaagccattaaggtgatagaacccagccctgactaataggtatgagggggaacagaactggggggcaagagttcttcagtgtaggcgtcctgaatctctatcgctgactctgagaagtcccaggggtctgctttctctaagaacagttccatattgggtaatgacaaaaaaccagagtgagattaaaaatggattctttatattgagcgttaatgataaaagctccaggtgatagcattctgttcaatgttatataactgttagaaatgggggttagtagttagaagtgaattgttaatttaatagatatgtttttatagaaaaatgatacaaataagtatgtgaagtactgctttctggcctaatcaatcacacctggaggggcctagctggctggctgctgtgtccaccaggtagaagcttacctaaattgcttgaaagaaaatgttctggcactagaattgccgtttcaaagctttacagggatgataaacaacatactgctcttcagagcactataccaatcttgttactgttggcgagagagagcatctaacactcaataaatgctaggcactccaggctgaatgctaaaaaaaatgaactgctgcctttgtttagcacagtgtccccggtagggtgtggaatttcaagttcaggagtagacaagcatgaagggttttagggcctttgaacaggtcaatgccccattagctttttaattttccatcccactttcctggctcctggggctctatttttctctttgataatctgttttctccaataggattccaaattccctattggaagttgagcctcatatcctcaaggcccatgatccctgagccaggtatgagtgcagctaatagctgatggtggtccattgatctccctgttggccctgcatttgcctgtacttcccccttgcagctgatggaggatcctgtgtggaagggctccctcaccccgagtgcaaatggctccctgtttcagaaagggttgagaggggacacgcactttctcctctccactggaaaccagctgagctgacacctccgagcagaagttcctctttgtgttcctgctgatgggctgtgctctcagttgatcattggttttttccataccttctccaggttctcagaggtcaccatttctttccagttagccccattctagaagagatttagggctgggagaaaaggagaaacatgtgttagcctcattagtatctttggtgaagtgtgaggagaaaaaggtagccatgattgctagaaaaatgagactgttaagggagaaaagtgtgtcgatctctgttatcacccatcattgcagatggcaaaaatcagttgttctcagcaacatcactgactgccctgcagacaacctggaactggagggtgtcctttgggagacaggcagggcatggtgtggaagggcctgtgtgagtcacatgaggacagccaagggtctgactggactcccggccagtcctgccacaggcattgcatgcagctggtgcttgagtgggttcacctgcctacctgaggagcacgacagggaaggtgagaactgtcctgagcctgttggggggattgttcatctagaagagacatgactggcatccccattggcagagccagggccaggcttagagctggcttacatttcctcattttgtattctattgagcgccagaaatgaagcagagagggctgaaccctgacacagtgggccggcccaagcctgagattgaggcccagaaaggcctaggctcaacagacgccagctccagacccagggccaccctgctcacccatggctcacagggagatgcagattgaactcttcgttccagagagtggccaccttgattgggaagggaagcaggggcaggggaggagagggaagtcacagggagactatgggaaccacgggaaacacggccattctgtcctgaggtctgggggaggggcctatgtccgcgtttcacctacagcacttatgtcattgtattgggaggaggtagttgaacctctcaccttatttatagtcctagcgggtattgtgggcactcagtaaatacacagtgatgggtgtgcggacaggtaatgagttctgagccttaggccctagttcttcctgctctgctgagagcacaaacctgataaagcttgagaaccatgatcaggtaaactgttcgaaatagtcaggagagtcccatcttctcaatccttttgtccagctgtggagtaggccttttagacaaacaacagtggcctaagaagttggaatatagaagaggattcctatgtataagaaccgcaggaaattatgaacttctggaatttccttgctgagagggctgtgtgttgtggctgtggcatttggctactgcgtgtacgtcctatttcctgtaatacaaggcttagctcatcactagcagactgacaagctagtctcagaagcagggcaactgggattgtcaaataggtttccttagtatgctccatcctgcttactggtgagaggtttaggatagtgtgtctgagctgctgtctgcagagcagagtgtgcgagtggctctgcaggtgctggagctcacagagagactgccaggatgtgcacctaagattatatgtttagaggtcttctttttgtttgtttgtttttgttttttagacgaagtttcactcttgttgcccaggctggagtgcagtggtgcaatcttggctcaccacaacttccgcctcctgggttcaagcgattctcctgcctcagcctcccaagtagctgggattacaggtgcctgccaccacacctggctacctttttgtatttttagtagagatgctgtttcaccatgttggccaggcttgtctcgaactcctgacctcaagtgatctgcccaccttggcctcccaaagtgctgggattacaggcgtgagccaccacgcctggcctgcttagaggtcttctaaccccagagaggtcaggacactccctcagggcctcactgttagcagaccctgtccctgaaatgttgtggccttaagtcagtttcttctctgtaggccttggttttcttatctatagactgagaaggtgagccaggggctctctgagttctgtgattatgtgcaatctagcagcagagccaggacaggacaccaggacctttgaactccagtccactcccagctcttccgtgtggcatctctaacaatgtgaccttgtcaccaagggtctgaagcctggaatcagagacctcagttcaaatccagttgataataagtagccgttacttattagctttgagaactttggctactattactcaacttctgagtgcttcctttatctttaaaatgaaagtaatacagtatgtatcttatagaattactttgaaaattacagtaaacttatataaagccctcagtacagtacctagtcctcaataagcattcaataaatgggttgtttgtattagtgacaatcgatatgtggttcagtcactgcacttgtctggaccttaggtttcctttctgtaattggaccagtgcttctctgacttagccatccctgaggacagtagagaaagagcatgtattctagggttaggggcttggggtgtagcctgtagcagcttgcagaaagcctggcatttctttgaactcctatttatttgtaaaatctacttacagttggtatcctatacaatgatctgaattttttggttgtaatataaaaatgcttcacccaaatctttgagtaaagttgatgttctagggtgaggtagcctcaaatatcccaaagggcatacagccacacccctctgggctggaggtgggattgaaagtagtttcaaaggtcccttccagctgtgaaattccaggcacctagagtaagtgagtctcatcctcaaaggacctaaggttggtaccaaagaattctaaaggaacctgagaagcgggatccctgtgccctgcccctggtgagaatggacagggctgtgtggaagtggaactagcagaaacagggagagagacagccctctgcagtgaagggtgaaggaggctggaggaagagccgggctgtgtctgggcctgactgtcggccttgagctgatgaccctggcaggtttggcttggcagctctccatctccccaggtaatttccaggaagcactaagccattgtttctcatccacagctggaggctgtctggggaggagccctcatatctcaggagggcagtgagggcagggggtgaactgcatgtggaaacatagagcttgtcacactgccaaggcctcctggccattctgatgcagcacctaaggctggggtctgggcttgtgcccagccagtgggaggagagttgagggagtctggagaagggcagcaaggttttggagagaacacagagatttctggcctttgaatgggaacaatctctaactacattctgggaacctctctgtgcatggggaaagactatctgctgatggtggtgtcagccttgcacaaatttgccagtatgcatggtctcttcctcaggcatgagggattcaaatgaagtcaccccgtttgtttagggcaaatgtaagggttttccctgggcaagggattgatgacttagtcaaattcatactcagcagatgtcatgacaataaaaatctaaggggatatcaatacattcgttacactggaaatttcctgttgtgtaaggtatttgttataataagatttaacatagcttttttttttttggtggggggatggagtttcactccattgcccaggctggagtgcagtggcactgtctcagcccactgcaacctctgcctcccgggttcaagagattctcctgcctcagcctccagagtagctgggattacaggcgcctgccaccacacccagctgacttttgtatttttgatagagaggaggtttcaccatgttggccagggtggtcttgaactcctgacctcaggtcatgcccccgccttggcttctcaaagtgctgggattacaggtgtgagccaccatgcccagccataagatttaacatatcttgataaaccctttctaagcatgttgccaagttggatttgaagttcagaaggactggattccagtactgctttatgaactatatgaccttaggcaagactcacctggtctttgagcttcgggtgttccatccataaagtggtgctataaaatatctcagtatgttggccaggcacggtggttcacgcctgtaatcccagcactttgggaggccgaggtgggtggatcacctgaggtcaggagttcgagaccagcctggccaacatgctgaaaccccatctctactaaaaatacaaaaaaattagccaggtgtagtgatgcgcacctgtaatcccagctactcaggaggctaaagcaggagaatcacttgaacccaggatgcggaggttgcattgagccgagatcacgccattgtacttcagcctgggtgacaagagcaagactccatctcaaaaaataaataaataaataaataatatcttagtatgttgtgaagttgaaatgggatattgattaggaaagtatttcatcagttgttaaataagtagctaaatgttcattttaagtaaaaacccttttggtaacattagctaagtatcaccatcctctaggccctccacaagctagtctcaatcaatgtaatgactatttttcaacatttctcttgacccatctctttaccagatgagtttccttgctcttatatacaggcaccaccatctccctagatcagctctatacagacggctcacctgcttagattaccatggcctgttctctgtgctttgccagcttcagagatctcaactcagtctttgaagatacagtggtccactctggaccctagtttcctcatccataaaataagggagcggactacatgatttaggttctctttcatcgctgacattctgcaatccagccatttttcagtgtgcaaacagtaacctagaatctgagaagatgagagcaatgcatattgtccaacaattataagtaattgatttaaaaaagcactttaaaagcatgaattaaaaaataaaataaaaataaaagcatgaattaataatctattccttgtgatatatagggcaatgtttgtagcaatatttaaatgaactaaaacatttaagtgaaatgtgaaacctgagtcttcatcataactgactattatcaaattgttaccattttttgagtgcttgctacatgccagacatggttagaaattacttattacagttacaatgtattgagtattttgagtatctactttctgatagctgcttaaagctgctgctaatcatactaccctgcagatgtacagatggggaaattgaggtttagagaagttaagtaaatcacccacggtcatccagccactgtgtggcagtagcagggttcaagtctaggtgtgtgtaacaacaaagcctgtgacgtgatggctccacccaagtcctctgtcttgcagtcaccactgtgcttcctcttaggttgtaaatctgttgttactactctcctaggactggtggttaccccagctgtgtttatgatacagctctggacttgaccctgaattaggaattggccctctctctctttagttgaggcagccagcctgagaattgtatgggaaaaaaaccctagatttttatgggaaaaacctccacctagatttagcaccttccctcctctggcgtgttggagaaacccagtctcggctccctcctcacttccctccgtgtgcacctgccttctcctgtcagtgctaaccaaggatggaagtaaaactagaaatccttaataccgtttgccaggctttgggcttcagccacgggaggcagattgtgttgatggatgtaattagaaaactgcaaacctgcttctcaaatcccaggtcctaaaggagttgataaaccaggttggctcatgtctcattctcctttgctgtgtcacacggggaaggatttggaatagaagtatccccaggcctttcagtaatggaagctcgagtcaaccatggatgcaccagagccaaacgagtgatggcaactgcctttggccccaggggtccagcaggagctgtggacagctggggctggtgacagtcttcacttgataagagtctgggatcctactggcaaccatgtcaccgcagcccctcctgtcagcagtgcttcctgctccctcttccaagcggaagacctgttccagctgaatggcttaggctcacatggaaaggaggacacacacagaagcgccttccttcttccctctcctccaatcagtcaggtgttagttgagtcacagagctaatgttttctcaggggaaacaggccatgggacctggtgcctcccctaaactgcatagagaggaccaggggccacatttagaagccaggcctgggcagcttctctcacagttcacttgtgcccatgccctcagaattgaggggtcttcctagcaaagtatcctctgggcttgtcccttaagatcatccccacagaaccagctccctgcagaaagcagagaggcagtgtgtatttcaggccattttagacagaaggcatgggatctacagtctgcaggtagagaacctgctcacagcctgctccaggggagtgtgtgatctgcagaatcatgaggtgcatttccttcctgcaccttcttttctcaagtgggctttcctaggcttctcacagaccactgttggagaggaggggagggcaggacagactcctgccacagagaggtgaccctttttactccctctcctttctgggtctcctctcagtcctgtgaccctacagcaccaatagcacaccctactgccatgggctgcccaaacccacttgctagccctctccctggcttccctccctgccccctgcaagatttctgtttcaaaataactcaaattaccaaatgctggcagaattgagggagtgggagggagaggaagaatgaagtgattgaaagacagggagtatattccatttaccttatgagcaaatgatactccccaacatcctgccccattaattttgctgttaatatctgccattctgctaagggattaaatgagttctaagtcaccttaagtacttagtctaatgcctgacagtaagtgctaaatacatggcaactattattagttctctctttttctcctttttcccctgggattttcccttagctcttccagccccagctcttctctggacagacctcatccaatcagagggctccacctgggagctggccagaagcagaggagctagaatcactgcacaggtgtgggtcgggactgacccagccctcagagtcttcctagcctgtgccgctgtctcacaggtgtgtctcgaggaccaggtgtgcctgcctgatttgcctgcttggcgggcagccctgggcagggagccccaacagaagtctttttggttggatataagctttgcctcctctcctggggtcctgcagcagctcatccctgcctgggcttggatccccctgctggaacctttcctacttgcgcacatgtcttgtggagagctggtggcagtcttagagaaaggtgcactaggacaggaaatgcccagagagacccttcaggccgtgtagagaggaccagagaaggaaggtggctttcctgagatcacacagctggtttgggtggcagcaccacaataagcatgagagtcactgactcttctgtgctatctcaccctccagtgccatccggatttctcctgtgcacctactttgagcaaggttgcttttattctctgagcctctgacagaaactttaaaatcataaaagcagtaacaccattaacgatagcagtcatcatagattcagctcctattctgtgtgagagactaggctgaggtcgctttttatgcacgttgctgaccctcgtaacaatcttgcagctacgaggctattagcagtagccgcattgtacagctgaatcaactaagattttgagagattgtcaattgcctcaagccaccctcctagggattggaagccatgagctcggttcttgttccctgagtcgatttcctgggcttcagtgggctaagggttgtgaggctgcccctacctgagtactcacacctcatctcatagggtttaaaacacaaggcacagttctgcttggcagaatggagtggggggcatggtatttgagaaggagacagtggtggtaggagttcaataagtatacttgataccccaaacttaatcctgagggggtgaaacctaagaatgaagtgagtgaactttaggattatagctggagtgtgcattccgctaatttagttataagcagggctctggttctggctttaattacttttgcatatgacttgtatcgcagaaaacttctctcagcctgttcccatcaaatcccaaataaagcaagaattccagcaggaagaaaacaactccaggagaccaggccttgctccttcacactgtgcgtgaggttaggtgtgtggatttgattagatctgtgtgcctgtgtctgtgtgtgtgttgttgttgtcgttgtccccttttaagaaaatttaaaaataactttctgccaaagatgtgggcaccagggttgtgttgctgagcagaaatgctcctcccacccgtggtctgctgctctgctgatgtggcccagctgatgtgggcagcttgtctgcctgcagaagctcagcccctcctttaatgtgtcttccaagaggaaaggcccaggaagccatggggagggagaggctgcctggtggctcagggaagaactcagctgttgggacaagagtgggctggctttgcctgctttcatgtgggaacccagggacctggatccaagtcactcaaggatgccagcaggaaaccctgagattgtaccccgggcaggctgtgattgtgcccatttcacagctgggaagactgagaaacaaagagtagaaaggatgcaaatcagaactatcatgaggtaccatctgacatcagtcagaatggcttttgtttaaaagtccaaaataacaaatgttggcaaggctgtggagaaaaaaagaaagacacttatacattattacatggtgagagtgtaaattagtccagccactggggcagtttggagattcctcaaagaactaggagttgaactaccgttagacccagcaatctcattactgggtatatagtcaaagaaagataaatcattctatcataaggacacatacatctgtatgttcttcacagtgctattcccaatagcaaagacatggaatcaaactaggtgcctatcaatggtggagcagataaagaaaatgtggcacatatacaccatagactattatgcagccataaaaaagaatgaaatcatgtcctttgcagcaacatgggtatagctggaggccattatcctaagcaaactaacacagaaacagaaaaacaaataccacatgttctcacttgtaagtggaagctaaacatgaggtatacatgaacataaaaacagaacaatagacactctagggattgctagaggagggaaaagggaggggagcaagggctgaaaaactatctgttgggtactatgctccctacctgggtgatgggtttaatcataccccaagcctcagtatcatgtaatctacctttgtaataaacctgcacatgtactcccttactctagaataaaagttttttttaaagggaaaataaagtaaaagttaaaaaataaagaagaccacttttccctttctccttgtgtattttaagaaggacagaaatgagagtagatggtaacagagagagtagggagataggctaatgtggtggttctcaaaatgtgccctggatgtccctgagactcttccagggtcccttgaggtccaagttatttttgtaagaaaacatcatttactttatttcactctcattctctttcaagcgtacagtggagttttctagtagctgtgatgtcacaatagattggatgcaaaagcagatatgaaaatttagctgttttctactagccagacattaatttgcaaaaaggagcaactcttctcattaaattcttttttgtcttagaaaatatatttttctcttaaaatgttatttatgttagcctataatgggcttattgatgttttaaaatgaattaatatttcccagttttaatttccaatactgtaaatattgacagcagtaactcacaaacaaaagctctctgggggccctcaataatttttagaagcataatggggcccaccctgagacaaaaatgtttgagaactactgggaaagcaggtagggggtctcctaggtgttaaaagaataccagctcttcaagaatcagatatgaatcaagggaaaacttaaattcatgtcattgccgattcggatgtccacagtctgccccaaggtgtgagttgcataggatgttcctttggaactatgaaaataccttctcttgctggaggaaaaggtctggacagggcatcaccttgctgcctcattttagaggagtgctccaaggatcattcctgaagctctccagggctctggaccaacgaggcaaagtcgtgctcaacatgaacacagtctgtggagtctgggcctcatcagtgcagttccttatgagaaacacagcacaggagttctccatccatctgcttgctgggcttgcatcctgctctagggatcataaacagggcttcttcagcttagggaagaaagagctgggtctcaggaggaaatatcttatgatccctgggtggtaatcccaggccagatgtgccaaggggttggagtggtgttccaggccagatgtggaattgggagagtgcccagcccctccgaggactcagctctctgcttgacagggtcctccctttgctccacactcagattagaatctgcagctctgaacaagtaaaaataaaaacctgtgagcttccacccctggctcccccaggactccattgagagcctctgcagtggcagccagaggtttcaaaggtcaccccagctgggcggattagaacaacagatctcccggaccgggtgaagttggctgctcagcggaaggcaaattgcaccatctgcgagcagagtcagaacaaaagccccttaactttttcggtctggccctgggctctgtggcgcccggcactccttcggtctccattcttggctggaccttggacaggaacctctgcagtacggtggtggtgaagtgtggctgcctcgcatcctgactcatgtgagagctgccgaggaagaagctgcggtaaggtgtgtcccgttcactggtgtgtggtcctgcccagctttgctccggtaggtcatagcaagtcagcctggcacagccgaggagcagcgcactccggaattaggagtgattagagaacttgtcaggatttgagtgcattgcagagaggattaaggtgggagagggagctgtcagtgcctggggcatttgcacgtgggtggttttgctgcctctgatgtgtgctgttgttggaggtagggttcacggtagactgcggagcctgcttgggagcccctccctctagggaaggtatgatatttccaagatgcccggcaaactgaccaggtgcttcaagacaatgatcatttaaaatgtatacactttgggtagggaaggggataactggtttctctaaacttgttctgtggtattacttgagccctgattttttaaactttttttctgagtcatttgccttatagttacaatctcttttcgctgtagttgaaagtgttcctttctgggttcaagagacaatttaaagtgcttttgatcaaattaaagtccagttaactcaatgctgcttcaaatagttaataaattatgttacttgtgaaagcctcatttagaggtgggcgttggcccaagcatcagggggtgaggggtgaggggtaaggggggtaagggggagtttccagctcttgaaccactgctctttttgaccctctcccctgttttttcttcttacttctctgtgtttcccctttgatctgtgtttagcttgtattgaataagaccccctagctgggtgtgtttgattctagccactgagcattgctctgcattagagaaattattgtagaaatcacccaacctctctggttttcttgattggaatatagtccacaggcttgacaagggattagagaggaacgaggtttggtctaatttactttattattaattttttttctgatagagcattccacatatgtcagtaaccattaattgtgtggcagagatctgtttatgctgatgatggcagtgggtggggcgatgggctgagggtgagcagagctgtttggtgtggctgggctctggtcctgtccgcatggtagttgagtaactctcccccacaaaagcactttgcaagggactagatgttcccttgctgtattgatttgcgtgttccttttctaacctgaagccagacctctcctagggatggatgactcctgtctaatgtgctgttgagatcaagcaggtgccttttgatgagaacatctggggccttcaggagatttccatgggcctctgattttagatcaagaggacttgcacagagggtcctgagccactcctaccttccaggaggatctcaccactcctagcttccagctcccctgaaagcaaaggtagagaagagtcttgtgtcttcaaagccaggcctgacagcagaagggggaggcacatgctctgcccctcttcctctgtacaactcccaaccctctgcctattgcatctctcattactggggatggcaagaaatacctcatttgagatgtgggggcctccgagaagccagcagattttgactttgtaatcagaccttgatttggttttcactttttagctgtgtgaccttagacaagagtagttggctttctaagcctctatgtcttcatttgtgaaggggtgatcattagaactgctctttctgattgagatgggtgcccagcatgatgtcagcacgtacaccttgcttattaaatggtgctgctagtacagacacaaaggtgctgcgggaagctgcccatgggcctcaggccctcctccccaccttcccagggaattctgccatctgcttcctgctactgttttccagtcatctcactcatagacccttgcctgaagatatctggggcttcttgctgtctttggtgaaagggtctatatctatattcagggtggagagacgggcatccctttgggaactggatgataatgatgttgacagccactgctattgaatgccttttatgctatattatgggtgttacatacactctcgttcaaaccttcccttcaactttatgaggctgatatgatcattccatttgacagagaaagagactgaagccaagagggttggagcaccttgcccagctcacagctggaaagtggccgtgtccccgggtttgtggcagggtcacaaaagtctgatcctcatgatacctgtccccaccttcatcccaagtctctacccggtcctggctgcacagtgtatcatcacttcacctctgtggcagaggaggagggcacagggagcagtgttcttactggggtgtggtcctgggtagctatgtgggatatcagatgatgcccattccttccgcagccctgtgtttctacggtcgccacacaaacaacaacacacatgccccactcatgtaactgctgctgtataccaagtctctagcttggcccatggtagatatttagtaaatatattttaattgagtgaatgaatatatcttgatgctcgccattaaaattgtagtatgactgcttttaaatggttctacaaacatatactatatgctataaatgctatagatgctataaatatggcaaaatgttaattgttaaatctaggtgataggtatttggggtgctcattttatcattcaattctactgttctgtatgtttgaaatttcccgtaataattttttaaatttaaaatttctatatcatcaaattcttatcattattttccctgtaaatatgtacccataaaaccacctggtattccactgtatttgaccagttctcactgttggattttttaaaatatagtctatcttctgtcctaaataatgcaaatagtgttcttataaataaattttgggctgtatctctgattctttcccaataatatatttctaaatgtaggattattgggaaaagacatggaagtattttttagaatctttttaccaaattgctttccagaaagactacaccagtttttattccccacagagggtatgagcatgcccatctcatcatggtctcaccagcagtatatgttatgtttctttttaaatgtcatttaaatgaaatgttttggttcatttttaaaaagtaacagcttattcttaatttgcactcttggattattgtcggagccaagagtgttcagtggtacatcctctgtgcattgttcaggtcatatcatccgtccattgatctgttgggctgctttcttctgatatgtaaagacctttgtttggtgcaaacattttattccaggttatcacccatcttctaatgttgttgatagtattacagaatattttaattttatacatatgtggtagcggctctcaacttttccccttgttatcccaacttttacttttcctttcccatcagccaatttgactgcttacaggaggcaagagggcctagtggttaagaatagcagctctggcgccaggtgcttgggttcaaatgcctgttctgccccctactaaatgcatgaacttggacaaatttctcaatctcactgtgcctcaggtgtctaatccacaaaatggggataccaagattatctgtctcatagtgttgttgtaaggagcaaatgagctatttattatttatatttattatttataaagggcttggaagagttccccacatctagtaagtgctacacaagtgtttgcttttattgctacctactgcagggaacctgtgagtcttaccattcaacaaggaattttgtttgcaaagctaatatcttatcagtgaaagagaaagctgggtttatcaagcaggggatgtgccctattacaaatgagcctagtccctttgctgctttcacttgaacttcaaaagagatatccccattttatttttgttagagattattaaatttaaacaaactaattacatgtcccagagagcattgttcatttgtgtcagtttacctgactcacagcataggacttaagtatgtgaccagacagccaaagaaaatgaacagaaaagcaaatctaggaatatggcttctcttcagttcagcagatgtgtgccccacgtctgggccagtcatcagggattttgtggtaagaaatgatcgtcagcctggatctgtccccacctgcacttggaacctgggacagggacactttgggtgtattccaggtggtggcagttgttgtccaatggccttgactggagtccgaccacctagctcttctcaactgcaacgttttcccagcctggttcttcagatttttctatggattttggaaactccccctgaaactccaccatctttccaacaaatcctttctctgtttacaagagccagatttagcttctcttgctttcaatcaagaactcagatatgtacttataataattccacttttggagtcatttgtaaggaaatctttaggaattcgggcatagatttcagtacacatagactcatcaccgggcatcataaaagatttagaaactatccaaatggccagcagtagggagatagttatgtaagtcatacatcaatatgatggatatttgaaaatcaaatttcttaaaagcaacttttcccccttattttaagaaaagttgtagggaaaaaatagaaaacattgtttacatagtatgctttcaaccatgtaagatatgtgtttttctatattgataaaaacaaaattggagggaaatgtaccaccattctgtataatagaattatggatattttcacttaaaaaacttttatttcaggttcacattttcacattttaaaagagctctggagcctgcctgggtttaacttccacttctgccactcaatagctgtgtaatgggcaagttattccacctgtctgacctcagcttctttatttgcgaaatgatgactatacatacttcatggggttgttctgaggattaaaacaaatgagataatataaaaagtgcttgatacagtgcctggaacagaatgtattctcaataaatgataacttattatttttacatattggtaattttcaagttttatgatgaaatgtatttaaaattaagaataataaaatatcacaaaagagttgacgatcgctctaatgagtagtcgtctgttacttctcatgtcagccccttgttctgctacccttgccagccccagtcacatcttatctagtccccagcaggccctggaccaggagtcagggcttaaggtgttcttgtcagtgataccatcattttgctctgtctcctggggcaagtgacttaccctctctgggcttcagttataagcagaggcattagcctgggtaatctgaaaacaccccccttctctgatgatctgtgatcttggagccttgttcacaatctggtcctcagaggtgggatgtccccccatgcctacctccttcccttcattcagccaagactctccctttacctcacccagggtccttgccatattaaccccaaactaccttcctctcttggagtatggatcccatttttctatagcctgtgagctcttgcagttcaggctaaagcagtttctactttctgccagaagtgcttaatgtagatgttggtcctgaagagttagtgactattaaatacagattatagatatctattataagaactatttctccattcttgtccccagcttcccctttcctagaagaaggggtcagtgaaaagatggaaagttccccacagggttttgaggaggcagggcatcgccctgggaaccggagtgtttgtctgggatgggctctgccttgtcctggcactttgtgtataaaagacagagcctctcatcttcacagaggagctgtgggtggacactgacctaactggggatctgctccacgtaaaagccacacctccagactggacacacctgatgcctgaagggaagacagggctgtgctttgtctgatctgaccttgtcctcttccttcctttttgcagaccatgggggatgtgaagctggttgcctcgtcacacatttccaaaacctccctcagtgtggatccctcaagagttgactccatgcccctgacagaggcccctgctttcattttgccccctcggaacctctgcatcaaagaaggagccaccgccaagttcgaagggcgggtaagaagtgtggctggatggggaggctgtggggaaggatgggcaggggccgctgctccttgtcaagccttttcctgggccggctggatctaatagaaggctcaattttcttttggaccttcatgtaaaacgaacctgtgccacttttctctttcttttgtttgtgatgggctttggtctgtgctggagaacttgggggtggggaggacgctgcaagttgaccatcctgtgatgttttgctgttaatgtaggttgtgttctgggtacatgctatataattacagaaaaagaagacgcggtccggtggcaggaagaatacagcttgggtttatatatgtcctcaaatctggacagttgagaattgactgtaatttttctcttgctttttccgtggaaggagagtttagttagccgaccttcttgtacatccatttggtatacccggagcagtgataggacctctcatttcacttctgtcacctgtcataaatgaatactggtcacttgccgttactgggactccacttcttcttctacaaataggcatgatcattccttgtctaccttgtactcaaaggagaagagaacactgaagaatagttgtactatgactcagcagtctaagagggagctcctgaaagcttgtaggagggggtcaggtggatgattctttttgcatgatgccggaccttacctttgtgtaagtggcaggtctggctacgtggttgtctggagagtttgcaggggttgctgccttgaaaatggcctggggctgtactgaattgcatgctgtgcatggacctgtgtagtcaagactgtttgctaatgattctgacctactagtcctttcatatctcttaccagaagattgttggggatgttagtgatgttcctgaggagtctgtttctctctgggcactaccaggatgagggctgtcttctgttgccctgactctggttccctctgtcctcttatcctcatagctaacaggagagaagcaacaggaagaatcgctgggggctcataaatgacttagatgactataaaaaggaatgaagtactgactcatgctataacacggatgaaccttgacacattatgctaagcgaaagaagccagacacaaaaagccactgattataggattctatttatatgaaatgtccagaataggaatatctatagagacagaaagtagaaaggtggtcaccaggggctggggggaagagagatggggagtggctgctgataggcacaggatttatttggggctgatgaaaatgttctgaaattagtactggtggttgtacaacttttcaatatacagtaattataaaatactgaattatacacttagaaaactaaaaagtaaaaacatttgagaaacggatcagacagcaaaatggatcttaactgcacacacagtctcctaccatactgcttctgagacataaactccttcctcaagtcaaacaaatatggagaggaagagatggcggcctctatgtcatgtgatgatgcttttgcttcctttgctgaccttggtgtcatgaaagaaccatgccttgagtgactcgatttggaacttgcatctgctgagcactggccaggagccaacacactggagttctttgttgctcagtgtcctctggttggcaagccatgccttctatgtggctaaggtttccttctctgagaaaagacaactggctgtttctgtatttctggcccacaggggtggaagaagaaaagttgatagatagtaaaagtacttcatgaagttagaaagtatactttggtaagacagtatttttcttaaggagttgaaatttacataacataaatttaaccattttaatgtgaacaatttagtcatttaattcagtgttgactgcagtattcttaaaatgtagctttttctatgtgaaaattttatttttcttatatggatgaaatagttgaccttgtatattacatgtggactatatgtcaaaatgcatgtgttccttatgagtcagactgcagcgctacttgaccacttaccacctgacttgaattaacccagaacaatgccttggcagcacactggtgtatacagaagaaagactattccagagagacgtcgaaagcatccagctgtcttgcagagacaaatgcagagggagagactgtagaagaaaatgccctggaagctagcatgctgcaagtgtgtattgttagtgtaggaaacaacacagagacttttgcatcagggaagggccacatcacatgatcccagaagaagagagctggttgttctgataccaaagacgaagttaaacagggggtgtttctgacctggtgacctcaaagaagtgaaaagttaggtggtgttagcctgaggtggcatgggttttgagcaggagttgctggttataataagctccaaacactcaaaacttgcagttccctattgggcatagtcagtggtgatctgccttccaatgcatgtcagccttcactgttggggccacttgaccttgcctgcagctgacccctccctccaggtcctgggacacacccctccctccaggtcctgttctaggtgctcaatcgtcacggaaccagtcctggtatcactctcaggatggcctcaggagcacatttctctggtaactgagctcttgcagaacctcttatgagtgactaacttaaaaagtatgccttcaagcaacttcttggacccaggctggtccctgtcacagctgacaggaatcttcttcctggcctctgcccacagcacctctgcctgctttcctccgtgaagttgcgcccacggtggaggcagtggagggacctaggacttcccagcttcttctgaaagaggttcagggaccgtcccatcactgagaagcaaagtggacaccacagatgtgagaaagttctaaagatttatttcctactgcctttggagctgccaatcagaagttcttcaaatgtgtgcttttggtttttattctcgtaagacgttaagaactgttgcctactctgccccatttcctttttatgcctgtttttagacaaaggacttaatgaaccacttccttcaataaagctcctctttctatctagtgacttgggtgacattaagatgggataacaggcaccccctgggggttcaagcctctttccaaggagctccaaacgacgagatgctcatctctgtgggctcagtccctcacagcctttagggcttttccaccttgtgggagatacattgggtagccaacacataacccatgaccaggcccctttgcctttgccctgttccatgatggggtccactgtagaggcttccgttgcagctaagggtagcccagtgacacatttgggctgaagtcagatagggagcttctggaaaagcccttgcttttctgattaaaggaagataaaaagacatcactggtgctctcatatttcacccttccgttgcttcctgccttgaatacaggtgtaatgcctggtgcttgggcagccagattaaaaccatgaggcaacaagcctgcacgctaaggattgtttgggggcagggggacagcagtggagagagtgaaaagaaccagcagctaagagacacaaatcctaaagctcaaagcctgtcccagatacaatctttgcagtgattcacacaggaaatgttaccgaaagtattcctaactgataaatagctcgcgagatgcatgtggagatagtgtctccttaaatgaagggaatgaataggagagaagacattgcacagggatgggggttccttattctgagttgattgtggtcctgcagtgaaatcattctcgaagaattcattcactccctggctgtggccattaggcttgaaccagcagggcctagggtttatgagaggaagtcaacaactactatttgattagcatctactgatttgacctaagccccttccctcctctcccctctccttcccatctcttcccttccgttccttctttttttttttttttttttgctttgccagcccaaagcttgaggagactatattttcaggaattaatacaactttatctcatttccacctttagacccaggcaaccagatccctcttcccgtgcccacaacctagaagcccctgttcctttatccagctgttctctctccatagagcagcagagcaggagacctgtctgcccaagggatacgcccaccggagccaaacctcccccatgtgctgggcacccaggacccaggaattttttaccaaatggccctgagcacacttctaacacctgtgtaggcctcctcccatgaaaagatgttgctaggcctgggggggcggggtcaaagggcagctgtttgcttgggaggacagtgaggtagatgaaaattcagacgcgcgctctgtgttctgctcacgtgcctagtagaacaggatgtaagtagggtggggcgagaagtgcacaggactgcgccactgtctggtgttcactgctgggcctcaggggtggctgggggcttccatgtacagacagccagggctccacgaatgccaggggctggtggaaacacccctagctgctctgttgcccatgctggtagctgaagtgttgatgggctgttttccccagcagagtcaagtatgaaaagagcaatggtgggaaaaatgctgaaattactggagatttcttcccttctaccctggaatttattcttatcagaaaaaaaaagcaaacatggtgacaagccctggctgtgctgtgactcagatgagctaatactttagtgtctcttgagaagtacagcccaaatgaggtttcggctcacactgctggccttagcgtttgctgaggtgggctttgtgataaagagccagccctggccctgtcaaggcatgtttctgtctaagctgtggaaggtggaggaagggaacatgagaatactgaaccatggaagcatgaataattcctcagtttccactttatacaatagtgtatctgtctcccaataactttcaactcagttcacttccagctcagaagcagtcagccaccatgtttagcactttaacaatgagaacacatggacacaggaaggggaacatcacactctggggactgttgtggggtggggggaggggagagggatagcattaggagatatacctaatgctaaatgaattaaatgggtgcagcacaccagcatggcacatgtatacatatgtaactaacctgcacattgtgcacatgtaccctagaacttaaagtataattaaaaaaaaaaagaaataacaaatcaaaaaaaaaaagagaaatttgaaagaaatgtctggtttgctttctgtcctcaggagtcttaatgatgtggttctggagaagaatgtgcatatagaagagcaagatatgacagtgtataattaggtgcttgaatttcttcaagaaatagtttctactataggaattgagagattaagatgaggctgggagtggcttgaagactggtttcctgctctgatttctgcccttccagttcatccttccttctgctacttaagtgatcttcctaccacgtggatctgacggtgccacctcctgctttatacgctggaaccttggatggttccccttgcatgaaattctgcagcactgcttaaaaggccgttgatgaccagctcctcaccctccagccttgtctcctttccctcccttcttccatctgctgtattttggtgatggtcctgctcccttggcccacacaggcacagtgcaaatcctttgctctagccccaactttgtggagaaagggtaaacaagaagcatattttatctccctattggtttggggttaggaatggggtagatatgatagaaaggggactaacatatttgttaatggcttattggtgctaggcttacaatcttaatcattttatcctcctggcaaggcagcttttatcctgattttttgtagggtaagaacctgggggctccaagggattataacatttacaccagtaagtgatggagccagttttaatagacctaagtctcatgttcttcctgccgcatgacactgccccttcacatgtctcatctggttccttgaacgcgatgaccgtttcttgtccatctttgaataagatgaatgcctgccatatgatgaatgctcaagcagtgtttggtgcccctgaggagaaccacggtggtgaagtgtctaagactcccggtgtcttgccattcaagcccataaggatttggccgtgtacttcttctagggtcctgtgtctctgttaccccatcagcactccctgcctggcttcagagccctcattccgcaccagccacacccctgtgcacctgcttcctgctcctccacagcctgtgcctatatcaagaatgcccttccttctttccattctacgcagcctcaggatctgatttaaattctacctccttcaggctactttcctaatgcttccttttaaagcatttcattagagtacagaagagccatggttataggatgtggaaaattcacaataatcatataagatcattcttgactaatagccacaggaaagagttgactactttggccttttaaaaaggtattattcactaataatctctgtgcctataactatgttacaaagaaaagcatgatttaaatgctaaactatttttaaaacaaaaattcagacaaagttaaaagttatttgccttagccctcacttctactctatataggtggccaccattaataatgttgagtatcctttcagaaatgatttatacaaatattagcatatatctgaatatccttgtatatacacaaatgggccatgtatacatagtaacctacaatttgctctttctatttttttgtgagttcatagtaggaaatatatatttatggggtacatgagatattttgataaggcacgcaatgtgaaataaacacattgtagagaatggggtatccatcccctcaagcatttatcctttgagttacaaacaagtcaattacactctttattttgaaaaatacaattattattgactataggtaccctgttgtgctatcgaatagtaggtcttattttttcttttttttttgtacccattagccatccccccctcctcccccacccccaccctcccactacccttcccagcctctggtaaccatctgcaacttgctctttttactgaatgtctttcggtgtttttgttttcacactagcacacagatccacttcacagctctaattctgaactttctaaccctcaattgttcccttctctgaacgcctataatacttttatatatatatgagactcatttttactctttatcaattttttttttttgagatggagtcttactctgttgccccaagctggagtgcagtgacacaatcgcggttcactgcaacctccgcctcccaggttcgagcgacactcctgcctcagcctcctgagtagctgggactacaggcgcgtgccaccacacccggctaatttttgtatttttagtagagacagggtttcaccatgttggctaggctggtctcgaactcctgacctcaggtgatccgcccacctcggcctcccaaagtgctgggattacaggcgtgagccactgtgcccggcctactctttatcagttttttaatcaatttataatttgatccattattgtttatcttttgcttcttcaatgagagtgagctgttcaagatacagaattgcattgtccaataggatacctacccactagtcacatgtggctacttaaacttaaattaacatgaatttaaattaaataaaattgaaaattcagttcctcagccgcatcagccgcatcagcactatttaagtgctgaatagtcacatggggctaatggctaccatattggacagcacagattcttgaacatttccattatcatagaatgtcctttcggacagggctgattgagagccttctcacacataattcaacttcccatactgtatatcactaacccacagctagaagatagactggaaatagttgtcccattcacaataaaatgaaggcattacattcttgagaattaagtgaattctcaagattcattcaaagaaaaatgtgatctgttgatgagagaatctttgtccttcatcttcattgtagaatgctaaccttgatatcccagcaagcttgaatgtgctcccaaattttccacaggtgtctattccacgtggctggtagcccaggtgtcacagagtttccaaagtactcaaagggaaagcagcagtatgagaagtggcagggcaagtattactgaaaatttaccatagtcaacagctggtggtcactttgggttcaaaatggtggactgaacagatgtcttaacttcccttcctgacaaatatgacatcgaaataaacatgaagcagtccaaagagaatgcattcatagctgcgctaaaaacgtgagagggacattagtggatgagagattttcttggcattgcattgaaggacatattagctctgcctgcagaacagttaaggggtgaggcttcagccatatatttgagattaaaggatttggagattaggagtggatgtagggcagaagtcggggtgattaaaggaaagcctatttactaaacatgtatatggagagaattgaagctcctgctgtagatgttagtttataagaaacaggatggaagtgtgttggatgtgccatcatctgcccacttgctccatgaccaagcctgtgactatgaccaagtcctctatgtgaagcctgctaatagacattccccatgtggggcttgcagtccgccccctcattcagggagataggactactcccaagaggtagaaaatccacagaagccacctgcatttggaaactagttcttcagccactgatggttaacagttaattcatggacaccagatgtctgaaaacaacatttatacaatataatattgctataagaaaattgttgtttttaaaaatcaatccatagacaaaagtcaaaagtgttcattatagttacagtacagaaagtaaatcctgtaagttttggcaagccgaaagtagagggatggtgaatggtaaggtagagacagaaaaacagaggaagagaaaaatatagtgacactaatgtccccatcttacacagtgggaagtaaagagattccacctaaaatggatggatcaaataacaggtttaagtatgtgacttaaaaccataatgacagaggtaaaaaaaaaaaaaaaaaaaaaaaaaaagaaagtcaacccatgagccgtatttggcacacagaccttttgtgtttggccagtggtgttctcaaaaagtttgagcaaagatttgcaaatggaaaatgtacatatatgattcgtgtataagtggcttttctttacaaatgagagctggcaatgtttccacatggccacactggcccagagggtgccgtcactgtgtctgacattagtttccaggtcgttatagtccccaccattccaaggcatctcccaacactaaggacaagtgcctgttgccagtgaggaccttgcttttctcctagccaagtctatattcataatgggaaagcaggaaatggacaggaagggcctcgtgacatttcttgtcccagcccacattccctacatgtgtttcctgcccagcctctgtaggcattggagttagtgattatgctataaatgtccaataaaagatctaaaaatcaagtcaaggccaggaagagggaggcaccgtaagccagagaaatttctcatcactcctgtgggactccactaagtgctgtctaaattcttaaatcaagaaatagacacagagcaaaataaaaataattaaaagaaaaaaagattatgtcaagggttatagctgagaagtaatactgttgcacggaggggaaagataaagaaggaaagaaacctttagccattttataccctcaactttcaccttttactttgtacacattcttattgcttgaattttttgtaaacagtagacaggaattacttctgtatattttttaaaagcacaataaaaatgcctgcaagaagactcagtacagctgtctgagttcaatgtccagattctatttgacagatggtcaaagatgaatacacagtttacagtgaaagaagtgtagacaaagtccgggcatggaaaatatataacactgcatttaaaaaattacacaactctgctggcatttaaacaaatggaaatcaaaataccttaaaagtatttatgcacctaaaaaactagcaaaataagataccaagagcccactgctggggctgtgaggaaacaggtgaggttttcctttgttggaagtactgattattggttcagcctccttggggcttagattggcagaatgttacaagggcaataaaactgttgatgtgccttgccaagaattctgcttttgacactataacttaactcttaaaggagaagaaaaaatgtagttgctacaaagatgtccaaagcactatttttaataacaaaaaaggaactagtttgtactcaaaaggagatagattattatacaaacacatcaatgtggcaaatattacataatcacctatttgtcattgtggtagctatatccataaatgaaaatgcgtgtgaataacaaagtaggaagaaaagtagaacaaacactgtgcacactctgatcacaaccatagaaaatccatcaatgtgttcactacctaaaattagaagaggatttggaactgtatgaatagaattattttttgttgtaagttctttaagtgtctgtgtttttaaaatttctcagtgatggtttacttactagatggctggccctgtctagatatgtctgtctctctactaataaggccttaggctcctattgttttaacgtgtttccaattatctcgactgtctgccttgaaatggaaacaaagctgagtggcaaaatgaccgatgagagataaagagaccagattggggttttcttcctcttaactgtatactcaaagtggtgtaggggatctacacaggcatgagcgatagcactgaggtctggttcatttgttcacatagatacaatttctggagagcccaggatgttcagattccttctaatatctatcttccttccaactctaagtaaagttaataagtaagacactactttcataaataatgaccaatgtgagttgagcctcctctgtgctccagactctggagatacaaagaaaaataaaacatgattgctgtcttcagtgatcttgcaactaatgaattctcaatatcaaaacagaaaattaaactttccttcctctatgaagccttttctagctcttctacctcattgcatttctttccatttccatattccaagagggttgtattctgcactctacaatttagattttaattagataattaacgtagtgtgttgtggaaagagccctggactggggttctagttcccacatagttgccttaaactttctacaaaccactaaaccttcccgagtctcacattccttcttataaaatcacgattcagatgatccctaagacgcttcaacatctgaaattctgtgatgtgtctgttgtagtgtgtgttctctgttttacatgcctagtttttataaaacacacctcggtgccagctcctggtagatgcccagtaaaaagagattatttattcagtctgtaagttttctaaatattaatctcttgtctccttaatgttctgtttttatttaagaaagattttgagtgtttagatttgattcattcaagtaatgtttatgaagcactttaccatgagctggctactgtgtaggctgtttgtggtttgaggaggtgcttggggagggctggccatcatttgtgaggactgtggtgttgagatctacacacatcaggctgagagttggaccaaatcatcttgaccgttgctcccatcttcaacattttattattttattcagtgcctatttgtattggagttggtgttggagttttctttgtggtttgttctgatcacatctgatttttaatagtatgccataggtttgtgtggcattttacagaaccccttctagttttgttagagggtagagagtgctagttaccccctctcccatttgtcagcacttggggaaagatatgcagaatgaaatggagggaagtatgtgcatggagggccagtgcctctaagagcacagcaccctccaggagagctcgactgaaggatgaggccaggcctctagtgaccccctcaggattccatttgtccagccactggagggcagagttactggagacttggtggcccagtgctcccagagctcctccctcagtcccttccaggcttcatctactgtgagggtcttcccaacaattggcttggagcacttcctctctggccagaagcctccagttgttctgactgcagactcctggcctggcatttgcctttctccacgatgtggggctagttccccagaccagcactcttcccagttgccaggccctacattccctgagcaggtcccgggatttgcctcttggacttccatcatcctttctaactggagcccggacccctaatctgtcatagtgctaccctgcttcttccaaatgtcacctcttccagggagcccatcccacttttccttgccagttgtggtctctttcctgctgaatcaccctggggctttcctgtactgtgtatctttggctttatgttctggttatttaagtacttgtctctagaatgtgagcctctagacaatctcttattcatctttgtgttctctatagcacctaggacagtgcccggcccgtggtagatattcagtcagacttggttaggtgatggctgagcagggatggatttaaatactctagggcactgcagtcagcccgtgatgccaaagtgctgtcatttgcaaacgtgtttactgggcagcttgtcggctatcttaaggagctgcctctcttaagaccaacagtgtgatctggaaggagggcagttctggtatcatgtgcttgggtctttgtctttaattcagtctgccctctgggctgtagtttcctcatcctataaaatgagagagttgaaccagatgactgtgatgccccttcctgttccaacataacatggtttcataaaaatacatttatttctattttattttattttttgagacagaatctcgctctgttgcccaggctggaggacagtggcgcaatctcggctcactgcaacctctgccccctgggttcaagcaattctcctgtctcaccctcccaagtagctgggattacaggcacgtgccaccatgccgggctaatttttgtatttttagtagagatggggtttcaccacattggtcaggctggtctcaaactcctgacgtcaggtgatccacccacctaggccgcccgaagtgctgggattacaggcatgagccaccgcgcccaaccataaaaataaattttaaacaagattttggagtagggacctggtggttttatgagcatgcttaccagttgaccccactgctacgtgacaggctgacttaagtgactagtttgcaggttcgttcagtaaacactaatggtatgcaggatgtttgtactcatgcaataaacagatgacagagaaaaccaagacactgtccctgtattcaaaggtttgacatcctcaacttgctgaggctctaaatctgcacttcccacaccctctacatgcacatcaaccttgagtgctggcatgtcgtgtgggaatgaggaagtgtgttctgatgtcacacattggacctgatgtctccttcaaattaatccctgtcccctgcctctgctgaagaactctgaaataaaggcgggtgggagatggtgatggtgagaagagacttatgtcctgatagtgatggtgaggatgagcaatagactcacttgttcttctctcatgtggtggcacgctgagtccctgagcaactcctctaagaattgcaggtccctctcagccactcagaaaactccagcagggattacggcaggacgaggtgggggcaggcagagcctgttgagagctggagtttagatggtgagcacagagtcccaagcctgggagggaggttgtctgtggagtgtgaagaacttggctcaacccggccaccaaatgctgggaagcctgacaggggagtgaaaaatgagcctggaagagttggagccaggaaggcaaggaaaatcaaatcaaatctggatcctgacttaaaaggcattaggctgaggggagccaggcacctgaacatactttccacagcctgtcatgctgggcctgcctcatccgtgtgcaaggggacgttgggcccagggagactggttcccaggccaccatcccccagccagtctgctcaggcgcaggcacaaccccatcaaatgccatactctgttgagctagaggacaggagagctgctgtggctcagtcccgaaaggagtggggaaagactgtttctggagcagactggcgccagtcagtcccccacatgcacagtgaacactggtactgaattaatgaattatctgagacaaagctcttttgtcataaactcaagtcatacccaaccccacccccactcttcatttttagctgccaggacatagctatttggggtttgaagtgaaattctggacaccttagtgctggaatcattcgtggaggcactttgtcgagagtggtttctcaaggtgggatcctgcagaagccactgggtgcctgcagggtcctacccagacccactgaggtgagaccaaggaatctgcccttgaacacactgtccctaaacaggttcttctatgagccactcaaggggcagctgttagtctccagagatggaaacaaaggtcacacctgcaggtttcagccgcccctgggcgagcacatgggaagtggctgggcagtggaggaaggggtgactgggcttctgcgtcttgcctgattttacttctgagggtggcgggtctgacaatctcaggccctgggaaggggctgtctgttgatgggctgctcgagcatattgctgacttatagattggtgatttttttttttttttttttttgaggcagagtctcactctgttgcccaggctggggtacagtggcgcaatcttggctcactgcaagctccacctcccgggttcacgccattctcctgcctcagcctcctgagtagctgggactacaggcgcctgccaccacgctcggctaattttttgtattttgtttagtagagatggggattgatgattcttattatcaccattatctccccattatcaccctcccgaggaatcccctagtgcaaatttaataccacagttatactctataccatatatgtgtactggagtatatctgtgtgtatatgtaaaaagagtaagactttttgccccttactcctgagaaccaattatcgcccccccttagggatgatattacccccttgagaatgcatcatcatatagattaaattttataatgcttagaatcttcttctggagtagaggtgtggagtcagaatagagaagggaaaatatgggtaggaaataataaacctggggtaagaatagcatacagaaataagcactgtacagtcttgtattatagttgttagagatgggctgcaaatatgactattagctttctggaaatcattttgtctgtaaaaaataagcccatttgctcaggagatgcagtcaaaggcctaactagtgggaactctggagatcacgtgtgggtatatacacatgtccctgtgcataaacaaggagctgtctggatgctagaggtggcaggagatgctttttgggcagtagactggagacccctggctctgtcattgttctgtgttctatctcccctcctaccctgaactcagatcaccactatcgtctgctccacaccctcagcccagttcccaagctggctcaggccccttctcactgctcttcgcctcatctgccttgtggccctcaggtctctgttctacacttggtcatgcttcctgaacctccccaaagtttcacaggggaagagagggtgagcgcaagactcgagctgtggcagagtgtgggtatatacctcagggtggaccagttcaccttgacctcttcttcagggagcagtggccagccccgtgcttataaacatgggcttgccagagctcaaatgatcaaaaaacatcaggacaggaaatcaagaaactctgtgttgtggggccatggaaagaatagaaagcacagatttcgtagccaggatatctgagtttgaatttgttctgcttacattctctaggccccatagctgagatgggaataataattcctacttcccagcatagttggagggttgatgcaatggcagatgtgcgcaagcacatagcagttgcctaataaaacaatgggcatcatagtactatagtaatacagtcaggatcactgatctgtccacagcaccactctaaatggcttactttgagaatgttttaaagtaaaaatgcaatattctacttaagaaagcagataagcaaaggtagaaagaaggctaaaattacctatggttctgctttgctctcggtctttattattgttttgtttaatcgttctgtcctatagttattttctaagctgggggtttcttttgttttcagcatagggataactacaggatctacaggggcatagtggcttgtggaagcatcacaggccatgggtcagacttgatttttaattcaatcccatcctttaccaactgtgatcatgagtaatttgccaactctccaggtcatgctcctatctataaaatggggataatactacctataatatggcattacttaagtgaaatatctttgctgcatatgtaatataagtgctcagtaacttttagtcataactaaaattattcatagtgttttgtatcctgcttttttcagccaacatagcatttttcaaatcactctgtcaccataattttaatggtgaatattccattaaatctgatatgctaccatttactgaatcattcctctgttggcagttatcttgatggtttccaacgtttccttttataaattaaattttcatcaacatctttatacatgaagtttttaattccatatttaatattatttccttgggattgattagttggcagaagagaggtgaatgggacaaggattcgggcatctttaagcacaagtactttccaagaggcttgtcttcttcagcttgcactgttatcagtaaggaagaagacatagcaccagttttcatggcccacctgctccctgatctgtgagattcaaacttgccttgtcacatctggggcacctccctccaccaactccttcctgccccagctcgtagcttggttccctccaaaccaagaatccttcagtagacctcagtctgtatctgccctgcagcttggcctcttgtcctgctgccacacggggaccagcagggcctgcaggtaccaagcggtcaggagggtgggaggcaggaagccagagagtccagtgagagctgagaccggtaatggcgtctgctggggtggcagagggagcgagaacagcaagcagactcagagatcaggcctgttcatcctagtcgtcagaaagatcaagacagcctagggctcaggagacctcagtgcctaccatgatgcctgacacacagtaggtgattaagaagtgaaaaccaaaggctgggcagtgagagagccgtgagtttaaggagaaccatcttcttcccagaggttcactgactttcactgatagaggacctcattaaatttcaagctaagagactcttccagccacacagggtcgaatgttgaactacttggtacttgtcattcccctttttctcttttcttctctgcatatcatggtcctggcccacatagtcattaattttaatcattccattgaactcatattcttatttagagtatatttgtcaatttgtcttcactgggctccagactaggagcctttgggttggatactgtctcccctaatagagagtgagcatcctaaggcaggtgccacatctactgtactgactctaaaataggtgcacaacaaatacagagctgggttctaagaggcatgaaatgctaagactcagttcttgctcactaagcattaatgcagcctgattgaagtactaaaatgtatgtgcatgcacacactttcctgaacttacatttgttttgtgagatctgccgatgctgagagccaggtgaggtaccccatgcctataatcccagcacttcaggaggctgttgggggaggattgcttgaagccagcagttcgagaccaccagcctgggcagcaaagcaagacccagtctctacaaaaaatagaaataaaaaaaattagctgggcatggtggtatgcaactgtagtcccagctactgagaggctaaggtgggaggatcacttgagcccgggagttcaaggctgcagtgagctatgattacactccaacctgggtgacagagcaaaaccccatctctaaaattaaaaaaaaaaaaatttaccatgttgaatctgtcttttccatcttccctattagagtaggcactcattgtgggaggagactagatccttaaccttctttgcatccccagtgtctagcacagtaacggtgaagggtgctcaacgagcctttatccagcgcataaacaaacactagtagtgaacaagaccctatgctctatggtcggtatattaatacaataaaatgtgcaacaaaaaatataggaaagaagcattcagaagacctcatgaagaaggccggtttcattctaggcctttctaggagtcattaatttattcaattacaaaataagggtgtggtgtttaacagtgctcttgaagaatactcctaaggggacactggtgaaatatcttgccaaaagactaggaagccttgccataactttttgatacttggaactttcttgcccgtgattctgtttgactcccctgaaaagtagtgagctatggaggaacaagcctgaatctggggaccttgtgtaaattacttatcttctttgagatttttttttcttacctataaaattagtatggtaacactgaccttacagcggtattgggaggattaactgaaatgatttgcataatgtagcctgtacttcccgagaatgaacgcccaaccccgtccatgcttgtacagcagggggaggagtaactgcctccggaggactgtgatgcagtctccactgaccctgcaaaagtattgtaacctctgcctgacctgcttgtaggttgcttaggaggagagctgagaagtgacaggaaaaaggttttgtatgcagtttatgagttaagagaatattacttaattgtgggtttgatggaaaacattatgtgaggttggttcagatctttccagaggtctgccagcaacctcagaagtggagccttattgaaaacagctggggagaaggttggcgcccagcctctccttgcttttccatgccccagagctgtctcactcagtggactgagctcagccccaggaccctgccaagggctctggcagcctcagctggagacaggcagtggctctgcccagcttggggctccatctcaaagatcaaaaccagttaagccaggagtttgccaggccaccagtcagtatttcttccaggtcttgaaattagccactgacttgagttcttgcaggatgagttaaccagtgcaacgttttcgtggcaggggtgtgggctgcctactggatgtgtgatggatgggctgtgttgtcctttgaagtcctcccagctgtcctgctgggcaccagctagagaatgaggatactgttcaaagcacagccctcccatatgtccattcagaagcctcaccctcctctgctacagaggcttttctatcggaaggctgctagctttgctacagctgaagcccatttggttttatcccaactactcaccaaccatgtcgatttcagctgaattttcttgaagacaaatatggcatgccactcccttattctttcatttcaaagggacatttagtcactgccagtctcttgttttatttactttctaaaaatgtgctcctactaaatttgcataatttgaatttcagtaagtaaaatttttaaatttttttactgttcatgaaagtaaaacgtgttccttactttaaaagttttgacatacagaaagtatagaaaacaatcccaccatccagtgatgacagctatttacacattagtagatttcctttttatttcttttttttctattgtaacaaggagaaagtaaatcgttaaaagttacattatggatattaagtaactggttttatatgctgcctttttagttaatgctttctcatattctttaaaattcttcaagataaatcttaatagttgtatagtattttggtcttattatttcaaatagactatgtttttgatatgttgatttctaatatttaatcttttaaataaacataaacatcttcatggacatctttgataattcctaagagatattagaaatagaattattgaatctttttaagtctttggatagctatttccaaattgttaaaaatagccttataaggtcaacattactatgccaattttataggaaagaaaaatgaagtttaaattactacccttccttcagcaatgtttaagaatttaattttctcacactcataagcactagttatcactttacctattaacacgttttttaaatgaaacatatcacattttattttacgtttgtttgattaattttaaacatttttatatgtttggctacttcagaaacttcttgttcatgtcctttacttttttccttctgtgttctttttatttagtcatgcaaactttttatatcttaaaaagttcaccttttttacacatatatttgaaatatttttaatttgtttaccttttaatttttatcctaagtttacttttgtacagaaattttaaattttagtgttcacatatctttatgctttccactattagtgtcatgcctggaatctctaagattatatccacatttcttctacctttttttacttttaacattttaatcaaaatggatgtttctgtgtgtaatgtgaggaagggatcttgaataggatttttttcaagttatccacacttactgaataatctattcttttcccattagtttgaggccacctttactgtatactaaagtcttatgtatagagtttgttttagcatttttctggactatttcattagtcaatatgtgaaccaaaatggttttaataattgttgctttttaacattccatatctaatcatataatcctactggttacttttaatacaaggacaaagtatttctctttatatatccaagacttctcgtatgttgtttagaaagttttgaaactttaattatataggatcttcacatttcttaaatttgttcctaggtgaagtgcatgtgcatacctttcctaatcgtaatagctactagatatggaaacagttttaacttttgagtaggttataactggctaaagccaatatcagaggtgtagacggttcccaaattatgatagttcagctttacattttcaactttatgcaaaaatgatacccactcattagaaaccacacttcaagtacccccacaactattgtttttcactttcagtgctcaataaattacatgagatattcaatgttgtattatataataggccttgtgttagatgaatttgccaactgtaagctaatgtaagtgttctgagcatgtttaagggaggctaggctaagctatgatgtttgatggagtcactatgttaaatgcattttcaatttagaaaattttcaacttaggatgagcttattgggatgtaacccatcataaattaaggagcatctgtatatgcatagcctttaatgcttttatcattgaacaaaaattactaaaaattagtgagccaatcattcaactcgcaaaatcaaagactagaacaagccgaaggaaagcagaagcaaaacatttatataaaaggagaaatgattgtattacaaagagaaaaacaatatttaggaataaacttaaggactggtcttagaaataagacataggcaaaccctactaggccattcaaagaaggacagaaaatatacctaacatttggaaatgggactctaaccactgatctgtagttgataaaaatgagattttcagggtaaactccgatttgaagatcttgaaagaagtagatgcttttctaagaaaattaacttaaaaaaagttgaaaacctgaaaagttcagtggaagaaactgaaacagttgaagaaatatatcctgagaaagttctggatccacatagttttatagatgagttcattaaaaccttcaaggagtagatcattccaagctctgtatttgtagcacaaaggttatttacagtatgaaatggaatatttctttcatagtctctctcacctttatacattcagttctgtgaaattcttggaaaactaggattggggttgtaaggcatcttagagggtaggaaggcttcttttgacaacatcccagccagatggttctccagtcttcttatgaacattctggggacggggatctaccgtgtcacagttggtccatttggttgttgaggcattgctggtcttacttatatgaacctaaatctgcctctggagaattatggaccgatttatccttggtctgtcctctggcactacatagcatgtagacttttatacaagagctcatcatacatttgaagacagatatgccctccttttggtgtgttttactccaggctaaatagaccaacttccatcaactatactttatgttccttcaataaacatctgttgagcacctaccaggtgccagccgggcactgggcatcaccccctcacacaccttgagccgcttcctcaatatcctattaacacgtggcacttgtacctggacgcagtctgtcagtgatgcccatgtggaatgggactgcccactccctgtgtggacaccatgctctgttaatatggcttaaggttaaataatgtttaaaagactcatgctcggctcctttcaatgttagctgcccttccacactaattttgtctagttgatgatttagaaccttcacaagacttattctctcctaatatatcttgattcggacctttgttttattttattttgagaaagcattttgctcttattgcccaggctggaatataatggcatgatctcagctcactgcaacctctgcctctgaggttcaagtgattctcctgcatcagcctcccaagtatctgggattacaggtgcccgccaccacgcccagctaattttttttttttttttttgtatttttagtagagacagggtttcaccatgttggtcagcctcgtctcgaactcctgacctcaggtgatccacctgcttcggcctccaaaagtgctgggattacaggcatgagccactgcacccggcctgactttgttcttttagaacattgattctatcagccaatatgtatactcccaggattaatgccagctttagtactcgtgagcagccttgcagtccattcaagtaataaattcataataaataataataaattcaacggaataaaaatgttcaacaaaaacaaaagaggaagtcctgggacctaccagagagaccatgacattaatttaaaaatacttattgatcacctactatgtgccagtcattgtgctgggaattggtaattcaccagtgagccaaagctttgtagctctttccacagacagttacagtctagtgcgattagacaggcaggagtgactgtgcacacagatgaattataagccgtgatgaggcccactgaaggaaaacccagggtgcagtgagagcataacagcatgacttagtttgggaaatcaacaaaggtgtctctgaagtgacacccaggctgggatataaagattggagaggagagacatcagtcagctagctactcagtgctgccaaaaggaagtggccatgctgagtgtggagacaagttcagaataggtgtaatgcctgtttccctctcatgagtaagtcacagtcttgcagtaagttgtgccaaatatacctggaatgaatagaaacataacccgtgttactggcataagggctgtcacctcagattgtcatgagccattctggtttaaaatattctcatttttccagtaaagttatccaaatatgcttggagttccagtattttgatgttgaaacttttatagcaccaactccttcttgcacctggaggctgctcgtaaatctctcatcagataatgtatcctgatttttttaatggaaaatatggtcctgtgcttcgtgtagggcagagagaaatgtggaaggtgatgtcatggtgattagttgtctcagattgtctgggacaggcctgattttaagtagtctgaactgtgatcagatcaacatgcactcgtttttaaaatgtgaccactgtagataatagtgtagatgctgcaaggaggaagcagggcaagatcagaggcagccagagtaacgggaggctctctagaggcagagcaagtggtcctggagaagcaggcagagagggggagagtgcacttgcgtggccttttggaattgctcctcgcttggctctgccagcagtgcatatttctaaggcccctatcctgttcaccagacagtgtatggtgaagatgtttcgaaaggacacaattaggaggaaaaatctgatgtgtgacacatcccatagacaaatagaaatagaactatgattatccccttttgcgacaaggaggtaagtgaaaattgattgtatcagcatttagccctggctttagaatattatttttcagccttacaaacaaatactacctacttagaggtggatctgggtccccagtacctaatctctaggtgtatttagagaactaggcccactgtggccaagggccaggagcagcagtggcctgagccctgcatggtgttaggggtctttgccttagagaggggctgggtgggtcattcaggtcagggctgtccttactgaatgggtcttcccttcaggtgacatagctgagcagtcagtgctgagaattctgactctgtcctcacctgcatttggtggcagtccttcccaggggcagaagaaacagctgagggccagggaaacattgcttttttcatttccccctgaccagcaaaaggaagggaaaaacaccaagcttggaaaggggaccctgaccctggacccagttgtaaagctcttaagacagaaaacggctttggaataagcactgctctcatgcttgcgtcctgcagctgggggcaaagggctctccaggcatgcctgcttcttttgggctgcaggttgtcctggttcccctcagcttctagggcaacagccctcctggacagcagtgtcagccgagtggtcactgtgagaagctgctgctgagaggccaggagttcggtcagcattcccagagcctaggggctccttcagaagccaagtggtgatggtaggagtccaggctcccttaggctgaagaggactctctagagtgtaacaagtttacagacccttccaattcctaacccgaagctggcccttttaacaacacaaaataaagtcatcttctcaagggccaccaggcctctctcagcagcccactcccctgaagacacccacaggcatcattcatccttagcaagtacttcctgtcacttcctgacacccccatgggactgacacccacccatccttacttcttccccactcctcagacctggaggtcactatggctaacgtgcttagtgcagcaaaggccttagggcagctctggcaccagccatgcatttgtttttgtttttgtttttgttttgagacagagtctcaccctgtcacccaggctggagtgcagtggcgcaatcttggctcactgcaacctccacctcccaggttcaagtgattctcgtgcctcagccacctgagtatctgggattacaggtgcaagccaccatgcttggctaatttttgaatttttagtacaggcggggtttcttcattttggacaggctggtctcgaactcctgatctcaggtgatctgccaacctcggcctcccaaagtgctggaattacaggcatgagccaccacacccagcctcatgcatttgtttttaacagacgaagaatgagttgcgctgcgcctgaaattctctgagctgggtggtctgagcagttgtctgtactgagaccaagccctacctgcaggcttctcaacccactgcttttgtctaacagtggctcagctgggccccagcccccgccaattcttcctccccgaggatcacagacttgaaagggacactggcgggaggaggaaaggaaagtttgagttttgttttttactacgtaactgggcagcttttccctccatttttccagatgcttctttagaaaagagatttcagtggcatggactgggaagtctaattctgctttaaatgtgtgttttgaaccaggactctgacccctttggtgctccccagcccccaaacaggccaccaacaaatacccagagaacaaccgcaggcaaggtttgctcacaatgggtcctgattggagggttgttggtatgtgtttcttttcttttctgcaacccctgggccattgccctaaaattcctgagcaatagcttgtgagagggctgtgccctgtggaactaagttggcaagagccaatagatcaggcggaagtggctgaggagagctactctggttcagcaagagctgtttatgtgctggcacgacctggaatctgcctcggctcacaacctggggtctccgaggacccctcctaaggcgggcagggctgttgggagctatctcgcttctagtgcaaactgggttcaccctttccctacaaacccttgggcgccagccccagccctgtaagtcacccctactgctgctcccctggggcagatgctatattaagaggtggtcctcccttcttgctcaactcacagcaacacctctgtggagccctcaccctcctccgtgctcccatggtcctcagcacacacctcttacacagccctgactgcatgtgctgtgggcctcgaggctgcgagccacttctgggcggcctggagcctgtgtggtcacgaggcagagaagggggaatgagggtggagagaaataggcaggccaggtcttattcatagcacaatgagaactcattggaaattttcaaaacagagagtggctttggtctgatttatttattataaggcagtgtaacatttggcaaagggataaacatatagctaattgaaacagaacagagagttctgaaatagatttttatatattggctcattgacttttttattgtggtaaatacacatgaaatgaaatttaccactttaaccatttttaagtggacagttcagcggcactaagtacattcacattgttgcacaaccatcaccaccatttatctctggaaccttttcaccttgtaaaactgaaagttcccacccattaaacaataacttcttacttcctttccctctagcccctggcaaccaccattctactttctgtctctatgaattttactactctaggtacctcacataagtggaattataatgtatttgtgaccgtcttactttacttagcataatgtcttcaaggttcaccagtgtagcatatgtcagcatttccttcctttttaaatttttccctatgtaatgccaaaccacagaaccttcctttttaaggctgaataatatcccattgtacacatatatcatattttgcttgtccatttatctgttgatgcacatttgggttgcttccactatctggatgttgtgaataatgctgtcatgaatgtgggtgtacaaattccttttttcttttgttttttttcctttctttttttttttttgaggtggaatctcactctgttacccaggctagagtgcaatggcgcaatctcggctcattgcaatctctgtctcctggattcaaacaattctcctgcctctgcctcccaagtagctgggattacaggcatgcgccaccacccccggctaatttttgaatttttagtagagacggggtttcaccatgttggccaggctggtctcgaacccctgacctcaggtgatccacctgcctcagcctcccaaagtgctggattacaggtgtgagccacgacacccaacctgggtgtacaaatttcttttcaagtccctgctttcaattattttaagtatatgctcagaagtggaattgctggatcatatgataatggaactttaattttttgaagaactctgccattttacatttccaccagcagtgtgcgacggttccaatttctccacgtctttgcccatacttgttattttctattgctttttttaaaaataatggtgtccttaaaatgagtttttaaagaaagaaaatgaaaacttataaacctatgaggacagaaagaatgaggagagacaacagcaaatgagagatgtcaacaaactcgtggatgatggcatgtgaatagatggttggctgagttgggtttcagtcttctgacgcgctatgcctgtggttaggagagtaggcaatgatgaagcaattggaagatgacatacttccagagcctgggttgcgaagtgaagctgaaaactggaagatgaaagatctgataaggagcagtgaggccccggttccccgctgtagtccatgccccagacccctctcctcctgtacacccaaggagactgaaagctcctccgtggagaggccaaagctgaccagctgtcacgtcctagacatgaggtacagctgcaggcagggcaaagcgttgtactcaaaagggagaggggccgagtgaaagtcagcatgtggaaaataaccaacttaccttcccaccctgcgatggtcttccctcactcagtgtactaaatgctggtagacagacttcgttgctgtacccaccctccaccccacaccaccaaagcagcaactaggaagatgcctttttatggaaactgattatctcaagggagaagatctgcagatattgatgttgatgttttaatttcaatccctctaccatgaggtctgacacattgacaggtcccatctgtgcacctggaactttgtatttcctcacttacatacaggaaaaatcagtaaaggatcatcagatgtccaagggaatcctctgttatggaacagacataaagaaccgaacaaggaaccaagtagaaacagaagactgcaggaaacagaacttcaaagaagtttctctcacctcagagataagatgttatgtctattaagcaagaagagaagacaattcaaaacaattttgagaaactgaaaaagggttttttgaagttaatgatagccaaaataataaattcaatatactagttggaaaataaagtcaaagaaatctcccagagagaataaaaagactgaggtagaaaaagtgtgaaaagaaatgtaggtcagtctaatagggctcatgtccagttcatgggagttccatgaagagaacattgaggaaaacagtagagagagaattctcaaaacacaaacattcctcaaaactgaaagacatgcattgccagtaatgaaaatatctaccaacggtctgacggacagtgaacaaagacccacaccaagtcaggtcatcatgaaattctagaatatcagaatgaaaagaagattctaaaagtttgaaaggaaaacacacacacaaccccacacacataatagttcacagatgatggatcagggagtccgtgtggcattatgcctctcaaacagcaacactggatgccagaattgccttcaaatgccacgaagcagtatcttcagagttctgaagaaaaaaaaaggtttccacttaaaattccatctccagacaaaatgtcaattgagtataaaggtagaatgtggatacttttggaaatgccagatctaaaaattttaactttccatgcattcattcttagaaaactattggaatggtattctatcaaaacggtggcatagaatgagaaatttccaagaggatggtgagggaatgtcccaggaccactatgcatcaagcccagaaaacatccagtttagattagaggaggatgacaaaatgttccgggagggttatctctaaaggagaaaaaaataacagcaactgatgagttatctgatgcatttgaccattactgagaagaatgtatggttctcttaagaagttggagtccttaaaaaactaaggatatcaaagtaaagcagttattaactccaggaaaaataaaaagttcaagatatttattgtaatatactatgtggcatggcagtgagcaaagttagaatgtagtgaagaccacaatttttgtcatgtcgatgtgtaatgtcattttgtgggggtaagggatggatttatgtgggggcagatttgagagcttaaagtttacattccatacagagaacttaagagattgtcttagtccatttaaagtttgtgctgctataacaaaataccacagaccgagtaatttataaacaataggaattcatttcttacagccctagaagctgagaagtctaagatcaatgcaccacttggtgagggccagtctttctgtttccaagagagcaccttgttgctgcatcctccaaaggggatgaatgctatgtcatctcatggtggaaggccgaagggcaaaaaggggcaaactacctccgtcaagcccttttctaagggcacttaaccccttcatgaaggctctgccctcgtgagccacacctgagccacaccttctaatgctgtagcattgatgattaagtttcaacatgaactttagaggggacaaaaacactcaaaccatagcagagataatgcataaaattaaaaagaataaagtaggccaggtgcagtggctcacacctgtaatcccagcaactttgggaggtcaaggtgggtggattgcttgagcccaggaaattgagaccagcctgggcaacatggtgaaaccccatctttaccaaaaatatgaaaaattagccaggcatggtggcatgtgcctgtggtcccagctacttgggaggctctgggtgggaggatcgcttgagcatgggaggtagaggttgcagtgagccaagatctgccactgcacttcagcctaggtaacaaagtgagaccccatctcaaaaaaagaaaaaaaaaagaatattagttgtgtaagactattgtttaggaataatggaagaaatatcagaagaaatgactaaaagcattgaaggtgattgccctcaaggaagtggaaatgggagtgggagggcggcctgctttcttatgacttatagtaccaattcacattttaaccaggtacgggtgttttggtgaggataaaaatatatatattttttgaggcggagtttcgctcttgttgcccacgctggtgtgcaatggcatgatctcggctcactgcaacctccatctcctggattcaagtgattctcctgcctcaggctcccgagtagctgggattacaggtgcccgccaccatgcccagctgattttttgtatttttagtagagacgaggtttcaccatgttggccaggctagtctcaaattcctgacctcaggcgatccacctgcctcggcctcccaaaatgctgggattacaggcgtgagctactgcgtctggccgagaataaaaatattttaataaagatctgggtttttttagcctaatggccagtcagacactgacattgcttgagaaacaacttttgattccttctctgacatgattctctatgcaaatcatgatgcctttgggcagcttgggacatggggcagacattcaagcataaagggacattttcatgaggctgctgtctgccacttgtgccaggtattttccagcagagtcaaagagatgctctcctggccacatggatacaggtggcataaaagatcctgctttcatagccccacctgctccactccgtccctcagagccgccacctgggagagtgagcagaatgcatgctttgtgtggtggattctgacccaacgtggagcaggtgttgggtcacagagacaggctgcagagatcagaaattctgaaacaaagccaaggaagccaagtcatgatgttctcagggtgttgagaccctcaggtcacttttgcccacccttgcttttaaacagaaattgtcagagaataagacagaacaatctgtggccagtgtctgagtcttgggcagcaggctctgctgatggaggggttatagtctctgtgttgtttggggagcagccctccactccattcctactgccagtgaagtatgtctctccctctctccaggtccaatcatgactggctaaaaactccagatttattatccagatttatttcctgacactcacccatccttcttgaaattccagggctgcattagtcagtgaggcagaaatccaggggatggtctctgtctccaaggctcaaatggtattttgggagtggaataatggcacagtaaaactgcagactggatatttgttttaaaatgtgttttttaataatacataaaaacaaggatcacttttcaaattgggtttcggtctttaaataaaaataataagccaattcaaccagagcagaatgttctcagttaaagggttagatttttacctagttaagagtgtgatgccttgaagttgtctataagaatgaaagttgtgtaagatgaggcataccaagcccataagtttatatgttctgatatttcttagggcagaagtagtttcatgccattaacagagctgggagtgaaatggagtttagggtacctcattataaaaaaaaaattgttgactttgaagaaaagaagagaggaaaagtctaacctttagaatctattaatgtggtattgtacatgtgctatctcagttaattataaacttctcagccaggcgtggtggctcatgcctgtaatcccagcactttgggaggccgaggcagatggatcaccttaggtcgggagttcaagaccagcctgaccaacatggagaaatcctggcttaactaaaaatacaaaattagctgggcgtggtggtgcatgcctgtaatcccagctactcgggaggctgaggcaggagagtcacttgaacccgggaggcggaggttgcggtgagccaagatcacaccattgcactccagcctgggcaacaagagcaagactctgtctcataaatacatacatacatacatacatacatacttctccatggaagtagattctgatatcatctgcactttgcagttacgtaaactcagagccaaataagtaacttgctcaatgtcaggcagctgatgattgatgcagcccacatccacacatagatctgtctgactccaaaggccatataccttcctgaagtaagtaggtgggacttttttttgcaggtgacagaaactccagctaggttaagcaaaagatatgtattgtctcatatacctgagcgggtccagagtctaccacagctctgtcaactctgtctccatttcttctcttcactgtatatatcagctcttattctccagatggcttcctccttctgggaggaggcaagaaaatagataatggggcttgggagagaacggctgcagataggctaagtcttacatcttctcagttttgggtctctgtgaaaagagacagctttggtctctcaatattcaaagataaagttgcagggaagatctctcattggctggcttggaacatatgcctattgtttgagaccaagtgctttggccaggaggcattttaccaattggcatccccaccgggtctaacacataatgggtggaaagggaggaggcacttcctccaaaggagaggaatgctgcttacactggcaggcaggagagcctagcaaatcaaaaccacgtcaaaccacagcattaatttgttaaacctctgcaatgccacatgcctctcattaatacttaatatgtctgagagtgcatctctatttggtagcagaaactggagagctgccacagaagagtgatctcctgggcttgctcctccagctgaagacacagtatccgtggagacccatggtgagagtacagccagaaccccaaagttttgtgtagaggttctggaaagcctggagccccacaactatcccagaagggctgggagttaaaccagaaggacatctgttttgctatgaaaacaatgcatttgggggaacaaggaaggtatcaacgtgagaagttgcccatcacacttaaaattctatgtctttggccaggcacagtgtctcatgcttatgatcctagcactttgggaagccaaggcaggcagatcttttgagaccagaagttcaagaccagcctgggcaacatggaaagaccccatttctacaaaagtacaaaaaattagctgggcatagtggcatatgcctatagtcccagctacttgggaggttaaagtaggagaatcacctgagcccaggagttcgaggctgcaaaatgagctgattgtgccactgcactctagcctgggcaacagagtgagaacgtgtctcagaaaaaaaagaaagaaagaaagaaagaaaaatctgtatctttgtttggctgctccaaagggttttagatgcttatatcattaaaagggaatcaaaaagttgcatgtgttgataaggttggtctagataaaaggaaatagatctttttgattaagcggtccagaagggcttgaattgtaacccccagctacggagctataacttgccttgtgttttcagtgacagaaacaagtcctcagccttgcagatgtcgaggtgcagggattcctatgtctcgggtcataggaaaagaaagcatgccataggaagtgagagtggctgatcacagagaaagagactttgagcatctgtccctggagacccacatggcatttgctgagccattgagaggaacaattctctgcattctggttttatttacacggaagcacttttgtcctcattggtttacaagttggacatgggggtggggagcatccagcagtttaagcctctcactaattgctgtttttagttggtatggtctcttcctgatgggttctgtgggttcagttaaggcttttgactgttggcaatgggattattcaaagccttaattaagtgcctgcctgcttatggggctgagtgccagttgctgacacagacgcaggctctgaagcttggtcatgccatgcccctggctcacccttcactcttcaccctcataacatacccatgaggtaagttttatagacattttctgtggtctgatttgtttggggtgttaatgttttccttcttttttttttttgtgcaaccacgtccatttattatctgagtgagcttatacttggagatggggcagaagaagattgattcttcttcagctaatccctcagcaccattggttttatttcctactatttttcagtttttaatcaccagtcctcttctagtcttttatcataggagaaacaacacttgtaacagggtaagaagttcacagtaatgtgttacaggcaggcaggcaacaatcatgaatacatagacagtgttgcagaatgaggctttgtcagcttaggggagatgtccatctagaagaattccttaatgtcccctcctccaggcccagcctttcccagcatcccttcagttacttaacaatcaagtaaatactcagtggcaacccctcgggtctgttgttcccagccctaaagattcttcagctcactgctcatatcttcttggtgcatcttcccaatccccagtgtcctgctgggcagtctgttttctccctggcctcagctcaatcctgctttctctccttcctggtcttcctccatccctgatgtgggcagagcctcagttccttcttcctgctcatgtgacctatctgcggttgggccaccgcagctgtgccctgcagctgtgtgggtttgtagtgtgtgcattgcgccaggccctgccagacaaaaaagacatgcggcagatctgcagaatcagcacaatcaccccctttctgctactcaccaagcttggagaagatggatatgttgctttgagtcttggaggacctatagggacaaagaatttgcccctgctctgagcacaggctatggtagcccgtcctaagcaactgaggataagttgaaagcccttgatatatgttagagaaaaaccaaaatgtttagtgctctaacagatgttttgcttttagtcattaagtaaatctcaaggcagcaccaggttctggaaactgcctctcaagtgagacaggcaggtagaatgcagtggccaagcgactgcctgcctgcagctcagctttctcctcaaccttcagcaagcacagaatgagccctcattccttttaaaggccttttgaggccataaaggtttttgaggacattttatgaagctggagcacagttttactatttaaaattattataggggttatggtgactatatctttatttttatgacaagttgttggttatacccttgatttatttgataccgggcttttgttcaagaatacaacctccaattaaatgtggttactgtgtcaagaatgcgattctctccttagagtgaccctctttggtgccatttccaaaactcattgtggtgaaaactcagggctgtctattcatgtttgtgagcatttcttctgtggttacttggttttctcatatggaggattagagggtactaaggctgtgggttggacccagaggagaatgcaggggaaaggaaagaatcttccctaagaagctaagtgggtcaccatttaaaaccataatacttcagagatgggaggaaccttagataccaaaagcaatttcctccttaatacaaggaaggaattacaacccaagaaagctaggacaccaagccaggcccagagtgtgcaggccttggcttgcatactagcctctctgtaccacactgactctcctaggggtgtcttaggtacacacctggcaggcaccaatcctgtcctattacgaaaacaagggaatagcccaagacttgcttatggtgtgattataaccttggtgaaccatttgacactttccaaaagtggggagcagatattgctttaacctataagggatttagggtctcttggagatagacgcttatgaatacttttggttctacagaacttacctcaccaaaaacatgaatttacgatgaggcatggagacaaccactcaacctggaaaccaaaattatggtctccaatctgccatttaagctgccatgtgagatcatggcaaaccatctacttctccaggcctcttttctaggctacatgggcccagtaaaacgactggctttgtgagctgttgtggacattgttggtgccctacccgtataccttcattaggcccattcccagctgctgtgagtgttggtgaggacttgcaggaaggggtctctgaagccctatctgaggttctgcttctgggtatccaaaccaaagacatctccgtcatagctgcaagagtcaagtaagagtctatacatggcagccctctgaaaactacaggaccaaagagtttttactggctcttgatgaagatcctgactgtaaaaatcccagctatgacttcttggtggaaggccagtgatgacagcagataaggcaacctgggagggcagggctgttgtcatgcatcccaaggatgtgaacccaggcttattccttcaccacccagaggtccagggtagtggcagacagtaaaaacggattgattttccatattgggagggcaagtattaaagtttcaaatcattcagaccttggaactgaacaaggtcacaaaaattcctgcctttgcttcaggtccaatgtgctataaaagtatcatagtgaactgcaactttcttaagtgatgccagtttcagcatattttcaaatccctaaatatttattttaagagggcatttcagaggtaagcttggggtatgtgtagaaagtgagaggaaaagagaaagagacagaaggattgtgtccctgaggtctggaacgtttgcaatgtccccagttaatcattgatgccccagagcccagtgagccaccagagctggccctgctgcagggggccagtatgcttgctaatggaatgccaggacgcctttggcgcagttaatgatttacctcctcctagttgcagtgcttggcactcccattctctgaagctgatagaagcctgggtagaccagccctgcctaatggagtgcaggagaagacaatgatggtttgcagattcactgtatgagcagagtcctgaggggccaccttctgtaggaaagggtttcacacgagaagaatactttaacagtgtaattgttgtctgatgttcccatgcatgaacgtttctgcctttagggccacaagatgacatgattttatatgggcgcatgacatctgtcacctttaaacatgcataacatttatttgcatggctcttttatttccgctactagatttaaattccttgaggccctcaacaaattaatgaatgtgctatatacattcattatacagcacactaatataaaagaaatgcattttttaagtaaaattcttttttctgttttgcaaaggccaggtgtactattgcagaactctcagaaactaatagttaactaaaaagaaaggaggagactcacaatcctaaccacccagagacaacagctgttaacacaccattttatattacagtggctgtgagaccctgtgcatcccaatggatgcggtctccttcaacactgtcagcctaagttctggaacacttgttttggtgaggctacaatggcttcaggcattgttcacatggcttttggggaatccactccagagtctcagcatttcctccaaagtactcaatctctgtcatgagtatagtttagattttgataggaaagggatatatttttgtttccagacattgtaaataagatggaccatattgatttggagttttattgttgtttctttttcactgaagcttgaccacaaattagtggggacagaaaggcagtcttgtgagattcacaaactggcactgaggggtgactatatggaataatcaaagagggattgttcactttgggagttttccctgttattcaaggcttccttccttaggaagaaatctgcatcctggttacagagactctggtctaagggtgggctaggggctgagcacctgggaagaaaactgagcacagtccaaagacaacgaccggcgctttttagcatagctctttcctcgcttagtatgcttagggaagagactgtatttggatgcccaggcctgtgtgcacatgcgccaatatagcatcactctgtgaccttgcagggggtgtgagtaggattattgctacagatcagtgaagcctttctttgtaaatgcaatttgggggtcattcagtgaattttgattttgcttcatccgtatccattctctctttccttgaagtgaatacatggataaaactattgctaccactgttttgtaatgcaaacaactttgttctcaggaagctcctatgatgccttctactttccagtgctaaaatccccaattctgggtccttggctgtgcattagtgagccattctgaaccctaatcctccaaagatgagttaattctgaagagcctactgagtttcaagtgtttgaaggcccttgggggacttcctttctttaaaactcaaagtgaattcttttctttgaatttatctctgcattttcccctcttttgagagatgtcttctctctgactgggttgctatgaaactcagatgattgcaccactgtactccagcctgggcaacagagcaagactccatctcaaaaaaaaaaaaaaaaaggaaactcagatgagccaagtacttagagaagtgctgaacccttagcactcagcaaatgtcagctgctaactacagttagagaaaggcaagtggtctagagcagcactaccccataggactgtcacaaggcctggatgtaattgtaacttttctagtagccacattaaaaagtagaaacaactgaaattaatctgaatacatttaattcaacatatcaaaaatactacttttcaacatctaatccatatttttaattattgagatattttgcccttttttgtattgtcttcgaaacccagtgtgtaatgcacacttacagtgcaactcagtctcactggccacattttgagtgctccatcgctacctgtggccagtggctaccgtgctgggcagtgcaggtcctgaaccttgctactcaaggtgagttccagggaccagcagcatcagtagcatctgtgagcttgtcccaactgcagaatctcaggccccagcccggacctgtagaagcaggatatgcattttaacaggatcaccaagtgatttattagcatgttggagtgagaagcactggtctagaatccccgtactcagtcctggccccctgggattctaatctaattggtctaaggtgggacctgggcactagtgtttttttaaagctcccctggatgattctaaaatgcagccgggcttgagagtcatttgcatagtggattctggacccaggatgcctgactttgccaccttctacctttgagaccttgggaaattgccaaaactctctgtaccttgatttccttatctgtaaaatgaggatgaaatgggggcgttatgaggattaaatgagttaacacatgtaaagcactccaaacaatacctgacacagagagagtactcatgaaatacaggctcttaccctttcttctttttcttgaaggtccggggttacccagagccccaggtgacatggcacagaaacgggcaacccatcaccagcgggggccgcttcctgctggattgcggcatccgggggactttcagccttgtgattcatgctgtccatgaggaggacaggggaaagtatacctgtgaagccaccaatggcagtggtgctcgccaggtgacagtggagttgacagtagaaggtgagtcccaggaggcccgagtccaggagggagctgagctctcagttaccccaaggcctgcagctcctgccttagccctctcttgaaggatggaggaactgacaagagaaaacacaccccatccttgaaccccggaccttccaatctaatgggagagatgtggtccctgcgaacaagggaggcatccaggagatgatgtttgtcaaactaggtatcacctgtctcctgcttgagccctcccatggcttcccctcacactgcagctgaaatcagactccttaggatggtcttacagagccccacccaatctggcccctccctagctctcagacccatcttctgccactctgcacctgttcagcccaccgtggtcacacccacctctggcccttctttgagcaaggctacagggccttcacccttgctgttccttctgtaaaagaagagcccttccctcagcctctcacctgacgctcctttcacatccttcaagtctgttctcagatgtctgctccttagaggccctttcccaaccatcccagccctatgactctccatcttctcaccccactcgaggtttttcttttaggacgtattaccatctcacattgcagtgtcttctccatcccccaccactaaatggaagatttaggaggagatggactttctctgctcattgccttatctccaacatctagaaagcttcctggcacatggtagatactgaaatatttgaggaatgaatgaacaatgtttttatcctcattaacatcatctttagcgtcattatgaaataatacatgctcattattaaaaattatgtaactcagaaaaatatgtaggaagtaaacacatcaatgtgttaacatattagttaaaagtaattgcaaaaaccacatgacttttgcaccaacctaatatttttgtctttttccccactctgtactttaaaaaattctgttaactttaaaacttctaggagaaaaattggaccataagtaaaatattttttgctactagtgtgtccttctgccatgctgaagccactccactggaaagagtatctctagttcaggtccctggctgacacttaaagccttgatatcaggaaggacatggggtctgtcagcccctcagaagtaacacaaggttcccttgacccttcccggtctttctaagactggaagtttataaaccaaggctcagactcacttctcctctttcagaagactgtcctcccaatctggttttcaggggacactagatggagaattaaggtagtcagggaaggttccagaagggggcgaggtgcacctgggccaatggccgccctttgccctgttttccctgtctccccacaccacagaagggccaacaggctgtttcacagagtggagcatgcatagtttggatgctttccttaaattctttaactgagtgactcacttactctaatgacctttgagtgcttttggctggggcattccagatggaaagtggcccctgctcagaacctcaggatggacctcagctctgccatcctggtgctgtgctttcccctacatgaaccccctttcaatgcctgaactttgtgttgatgcctacaaataaaaattaccctgttccctcttctgagttctgtttagagctggggaaattgagaaagcactgagttatgagtttgtgccaatgagatgtgtgactctaaacctctgcacctgtctttctgcaggataaagggtttgactttggtggtctctacaacctggactagcccttgttttctatgatccacattaagggaagactggagtctgttaggaatacaggggaggcatataaaacctagataatatgaaaacgttttcttcaatccctactgttcaggaagtgagatctgatgtcatgaccaagcaggaaaatttttagtagctcatggtactcagggcaggggaaaggaaatcaggctgagggctgtagaggaaggagagcaggctaaggctctcaaccccacccctcccctttggttttcatttggggagactcaggccctcaaattaaaattaaaatacagttaattaaaataaaattaagacataaaatgtaagatactttctgtcttctaactctaggagatagagaacagcctaaaggatgcagctctttaaatgtgtgtgagtcctatgcacattctgcttctgcagcaagaccgattttaagctaatgtgtggtttggggccaccccacagacctaggcctgaaagagtccactctgggcccttctgccatggatgagttgctggctgtgccaggctagcccaaccctttacaaaggaaacctagcagcccaactgccttccctccagctctctgtgctatgcttcttacttggagtgagcagaggtccaggaattcagagtgtaattcatatgtggagttttgtaatcctttagtggtcaagtttaggaggcagtgttgtgcaatggaaagaaagtcaaatggtcttggattgaattttagctctactaatttctaactatggagaaattaaccttcctaagccttacttccttttctgtgacttggagttcatggctgccccacagtgtggtacaaggataagcacagctagtaggaagtagcacccagaaagtggtagcttcatcattgtttgaactggcattagcatccttagagctacttaaaaagggaaatctgcaagagagaaagattcctcatctgacgtttaatgtagtgatcaggcccaagaaacattcagaatcccccaagagaaccagtgccttaatgagggccatgcagttattcagggccttacatgatggaaatcagccttggtctgagcccctggaaggctatctgaagacagctctgacacttgcccacctccagaggtcaggtcatgaggcttggtgcagagcaaggaagagacgtggtacctgccctctgagaacttcctctcccgtggaggaccacagacctgtcctgtagagatttaatgtgagccacatatataatctttttttttttttttgaggctaggtcttgctctgttgctcagacgagagtgcagtggtgtaatcacagctcactgcagcctcgacctcctgggctcaagcgatcctcctacctcagcctcccaagtagctgggactataggcctgcaccactacactgagctaatttatgtatttgtatgtatgtatgtatgtatgtatgtatgtatgtatgtatgtatttttctgagacagggtcttgccgtgtcacccaggctggagtgctgtgacatgatcttggctcactgcaacctctgcctcctgggttcaaacaattcttctgcctcagcctcccaagtagctgggattacaggcgtgtgccatcacgcccggctaatttttgtacttttagtagagatggggcctcaccatgttggccaagctggtcttgaactcctgaccttgtgatccgcctacctcagcctcccagaatgctggggttacaggtgtgagccaccgtgcccggccttatgtatttatttttttaaagatggggtttcaccgtattgcccaggcttgtgtaatcttaagtttaccagtagccacattttaagatatcaggtaaaattcattttaataaaatacttatttaacctattatatccaaaatattaccatttcaatgtataagcgatataaaaattattaatgagatattttacattcttcaacatctgggatgtattttacacttacagcacacctcacttcagaccagctataatgctgagtgctcaatagccacaagtggctaacagctactcttttgaacagtgcagttctagaagctgccacctgaataggaataaacaaggtttacacagaacaaaaagagaaagccacatggatgaacaggtgttgatatggtttggatgtttgttccttccaagtctcatgttgaaacgtgatttccaaggttggaggtagggcctggtgggaggtgattagatcatggggatggatccctcatgaatggcttaataccatccccttggtgatgtgtgaattcttgctcagttagttcacatgagatctggttgtttaaaagagtctgggacctctcccttctctctctttctccctctcgtcatctgacatttctgctcctgcttcaccttcctccatgattgtaagcttcccgaggccctcaccaagagcagatactggtgccatgcttcttgtacagcctgcagaaccacaagccaaataaacctcttttccatgtaaattaccaagcctcaggtatttataacaatgcgagaacagactaacaggtggtgagtagtcctgggtcatcacacatccacacagtgagcatcggacatgaggtggagtgagtgcccaaacggtgggtgtgccccagccccagtggtctcagtctgagaaggcctttgacttttcaaggaccagagagtcacttcaggtaataaagggttaactttaaggacataagctcaggagcccagggaaagccaaactggcagcccccagaggagatccagacctcagatggatcacccaccttacaggattggttagtgcaaatgcatgtgcacagaaatcacctggcgaatctggttgaaatgcagatgctgattccataggtctggagcagagcctgggagtctgcatttccagccgccagttgatgccatgctgctggtccacagaccactcttggagtagcaaggagggatttaattacatgtgtgatatattccacctagtacagtgattctcaaacttgagcatgcatcagaatcacccggagggctgctgaaaacactgactgggctggagccgtctgcctggctctcccctcccagatggtccaagcacacctcctccctacccccagccacccctcagtgccgcagctcctgctatccacacccgcatgaaactactgcagtgcagaccgaggctctgactatgtgagagagagagggccagccagcaggtcacctagactgtgacagcagaagggagaatgaccccctgtcacaagatttaagggagaagagtagccctggtgaccactaaggcagctctggtggtgccactgacaccaggattctcgggccaccttgaattcgtaggaaatgctcctgtgccatcttttgttgccactgccgtttttcaggggcagatctcttagactccttttatcttcatgttgggttggattgatgacattatacatttttaggccgtgtctatttatactggctgagttttaaattactgtgttcctcctggatgtttgtcatggttcttcttttggttctttttgctcttatttcttttggactgtcttcctttatctaacttttctacccatctgaaggacctataattatatttcccatttatgttctttataaatgcttttcaacctctaaaactccccaatgacttcattttctaggggtatataccctattttttaaaatctaggcagaatcttaaaatgctctgagtttttgtccttttctgtctcattaaagttaacaatacaaatgtgatagaaagggaaattattctttttgccccaccagactctttgctgtaaaatagttgtgtgttcaagactgcctttgcagaagcagccttactcatttagtatacaaaagagttagctggaaagttacttggtcccattctgttcttgaaggatgacttccaaatttcctttagctggaatctcttccctcctttatcttcaccatccactttgcctttgcctctttttccctccaaaatacacacaggttgcccttgctggcctaacttagatttttgctactgatgctccctcctttttccatctcgtattcctccacctccttctcccatctccacccctggcctttggtagatttaggcttttcccagttgctgttagttctagcctcttcttcattcctcagattttattgaactttgtgctaggatataaagaacaataaagctcaaactcctagcctcaagcaatcctcctgcctcagcctcctgagaagctgtggctacaggcatgtaccaccatgcctggcttcacaattctttatacttgaacttatttgtctttaaattgtaaataaagccgggcatggtggctcacacctgtaatcccagcactttgggaggccaaagtgggcagatcacttgaggttaggacttcaagaccagcctgacaacatggtgaaacccgtctctactaaaaacataaaaattagccatatgtggtggtgggtgcctataatcccagctactcaggaggctgaggcaggagaatcacttgagtctgacatgaggaggttgcagtgagccaagattgcaccactgcactccaccctgggcgacagagtgagactccatctcaaaaatacgtaaaaaataaaaataaataaataaattataaataagtattttaaatgtttttcttctccactagaactgtaagctccatgaaggcaagacatgtctctttttatcagttactgaatccccagtgtaaggaacctagcacagggcctgagccatgataggtctggcctgtagaaagagctcagtaaatatttgttgactgcctctgtagctgcctttggtacttcatcccctgtactaagaaagggattccgttcctagtatatataagcactggtcagagcttcaacaagtagactaacatgtacaacaaaatctagaataatatctgagccttaaaagaaagagtgcttcaaagaggagaattttggcaaaaatgttattcacattgagcaatttcagtgacctttagttttgacttttttcattccttttttcttcaataccaagtttaatattcaaccagaaattctggttctaggcacttctccagaggttttcttaagccactggccctaaacagagacagtaccaccctctagggggcacttaggagattcatgggggcccttttggtttcccagtgattgggagtgttgctggatttagggggcaagcactaggggtacaggatgggcttcacagcaagaatcttttcccagttcctcacagtcctaccagaacagacaccacaaatatataaatcggtggttccttagtcttcaataatacaaaaaaaaagagcccagtaattgaagaaatggtcatcatttagagggaagattaaaaggaatgaagctatcctccaaaatttttgaaaaatttactctgcacaaattttctactaaatgaaatataacatttctatctatatataattacctcatataattgtatatatagatagtgctgttactacactattgctctgaaaatgtggatcagaggagacttaaaactcttaatattagaagcaaatagtattaagttaatggagatgcataaaatgtaggcatcttattgagttttattgccatctcacattttttaaaactttggggaacagtaataaatctatattgtaaaaaaattatgtatttccattattttttggagatgactgctgttttcatcctagcacatgtcttctctatagtctcttgttattatcactgttcctttgtcaaaaccattcactgaatgtgtatttcaaggtaaggtgagattttaccttgaagtcctgtgataaattttactgtgataattttcttactactcaaccccgtatcataaaacggagaattgttttaacaccacattaatacattaatcatctttctaaaaatgttctctacttcagtggtctgtaacttgtcttgctatgttatcttcttttaaagttattttcttctttcttttttatataatacatctttttatttgaatattctagtgtccactgtagacctgtgctctttcactttgctgtgctacttgtacagcatgatttttcatcattcacttttaaatctaaacatgcattaggagttaatgcaagaatctgccatttcattgtcatctaatgtgcctgagcacttatgtaaattgaaatggtcatgcttgaacagttgcatattgaaatccatatttttataattcactttcgctctatatcaccgtaatgctttagttaaggctttacatttattttctttttgaaattatcacatacgtgtatgtgtgattagaagggaattttgatcagggtcgcatggggatatcagttaatacgtgttataaaaagcggatatttgttctgatagagtggagaaccactattttaagtaatcctcaaaaaacactttgaagttggctacaagtagggtgactgctccccacttttcctggaacagtcctagctttctcctgctatcctggcatgattattaattgcatctctctcagtgttgagagtctctgtttggatgataaattatatcaccgcacatttttagaagcatttcggctcctttcaattttgatcacattattcactttttgagcagtatgttctgacccgattcagtctttctgtatcacctgacaaacagagctaggtctaccttatcccttccaccactgaactttccaatcctaagacctgccagcattctcttttacttgtctttgaaaaatctaagatcaaataccgtcagtgtcttggcctctcctttttctcagcaacttgcttctgtcctcaccagttctcttaactcattcttctattttttgcatttctactttaatcccctttccacttatttttctacataaccttactgttctgccagattttcatacttttacaaaattaattttgccttatctaacaatttgcaacttcaaatttttcctataaatagaccctgttagtaattttagcctaaattctttttgtcttgatgtgaactctctgttaactcatattaaaataagcatccatcaattccatttttagctgactgctttatgtgatatgttttcatcataccctcttaccctgacatagaagtatctctccccagcattcttttgctattctttgggaaagtgccatgtttttgcttttatttattttttaaggaagaaaggaatttaagccttttggattaagatatttagctcccaagactttttaaaatgctcagtctaattttttttattgtggtaaaatatacatacctaacataaaatttaccattttaaccattttaaagtgtacaattgtcattaagtacattcacagtgttgtgcagccatcactgctatctcattccaggacttgtttattaccccaaatggaaaccccatacctattgagcattaattccccatcccctcctcccccagctcctggcaactactaaccaccatctttctctatggatttgcctctcctggacatttcatatgaacggaatcctatcatacatggccttttgggtctgagctccttcacttaatgcactttttcaatgtccatccatgttgtaccacgtgttagtacttcattccttttacagctgaataatacttcattgtatggatgcaccacattttctttatccattcatcagttaatcagtctaatttttataaaatctttattcccagatgaaatgagtgatacagtagtgtgggtagtacaatggatggtacacggatattttgtgatgaaatgttagagactggataatgctgttgtatggagcgtgtttagaaggccctatccatcctctatttggatgccagattttactttcttcctccctgcccctttttttgcaactagattatgtttttcatgttttatttcttctttaccattgtatttataggttttagaaaatacagctgaataaaattactcagagtaccacaacccccaaaataatcagtattaataacatgataccttttcttgtcattttcctgtctttgggtattttagttttacctaattatgatcacattaaataggtaattttgtatgctgcacaaaatgtatttaacaaatatttaaatacctacaatgtgctgggatttgttccggatacatctgatgagtgaataagaagttctagtggggatatgggttgggtctttagcatatagatgatatttaaagctatgggactaagacctcctgggagaaattagatggagctggggagaggcccaggactcagccctagggtgccccagcatgcaaaggttgagcagagaaggaggttgagagaagatgaataacctggtaaaagcaggaaagtctagaagagaaagtgctttgaaggggagtgggaccttgtgtcagatactactgagcatctgagtgagatggagacagagtgtcaaccattgggtttgacaagattgtggctgggatggagcccagtggagcggagaggatcatagcccatttggagtgtgctgaggaacgaatgagataatatcctaacatgtacctgcacgtttcagatattcttaaacataatttaatggcagaataagatgtctaattgtacattttacctgactacttattttcttcctactgagtgacatttatgttgcttctaactttcactattacaaataagataaaagtgaatagctgtgtaaactttctcttctaactttagcgtcgtttcctttgaatggagtcacagaaacggaggtgctgtcccaagagcagagcatctttaaagcttatgatttttcctcactcaagtatttccaggaggactggacagttggctctgcctccagcagcatctgagggcccagcatcttgactgtcagttgggtcctttcaaaacaagtctctccttttatcaatttagaagttcttttacttttgaatagagaatggaatgacaaaaaccaaaacactttcaggaatgaaaactagacacagctcactaagtaatgttaaacagaaatgcctgtatcgtaatcaccaattatatggagccacagcttaaatgtgatgccagtgtttgttattaatcccttttcactaaagttctggtggaatcttaaaccgggtgtggctgatgaaaatagccatgatttttctcctccacacctatgttcttacacagtcatataaatgtgatcagagtcaaagttaaggaagtttactcttttgcagtaaactccctgcaaattccccacagcaactgtctgctgatatcagaggatgactctaccctccctgggatagggttttataaacatccccagcttgcggcaaaagaagaacaactttcagggtgatcatcatctcaaaaaagacctcttcctcccaccccacccctcaaaataaaactcccactactttagagttatttcatggtgacattgtgaattgtccctcccagctgcaggagctggatgaaaggagctaaccccagctgccttgctggctttgctatttaatggcctcctgcctagcacggcaacagctcacccaggatcagcagcgcccagtaggatagcgcctactatggcctcatcatctcacctaggaccgactggcagtgcccagcatagcagcgccttgcccaggactggcagtgtctagcatagcagcgccttgcccaggactggcagtgtccagcatagcagcgccttgcccaggactggcagtgtccagcatagcagcaccttgcccaggactggcagtgttcagtgtggcagcactgcagattctgcaggagctgctggctccgctgtagctcatctgcagtgacctgtcctgctctctttcagcttgctgctacttgccaggccttaagtggaagaatggagtgttgattgtgtcagtcaagagtaggtgtggtaagagataggcatgggcctttccctccctccctttaactgagaaaatgttctggagaggtcctgaatcacccccaaataatccccaaaatggaaggtagagcgtactaccctaacaactcagcagggtggttgagagttttagaatctggcagacctgggtgaatttctgcactgttactgactttgtgaccttgtatggatgacttaacttctctgaatcttatttctctcatctgtttaaaaaataggataatgtagtatcagcttcataaaattattgcaagaaattcacatgataatgtatgtaaacacctaccatagtatccatagtgacacagcccatgctcagtcaagattaatgatcaccatcactatcccacccacccctgctgttgaatctttttactttcattgctccaagttggtggctcagacctgactcatcaactctttttcttgcaggaagttttgcgaagcagcttggtcagcctgttgtttccaaaaccttagggtaagtcctggatgttcaagacagagtaagggttggattgctttcctgctgacttgagcaggataggtctggggagtaagtcttggctctcctaggttataataaccaaagggcgggagcctagtacaatgagatgtgtcatttacacagcacctcctgacctggctgcctctgtgattggctcctttgactggcccagctgctaaatgtaaggaagtgggagaggtggccagagtctgcagtggactctaacaatcaaggcaatagtcagaagattgaaataagcaagcctagaagaggcgggtaacagtagctgctgtaacagacaagcctcaaatcacagtggctcaacccagggaaagtttgtttcttactcagggaaagttcagttcagatatcctggaacatggggagagccttccacattatcttccaggagcccaggcttcttccattttatagtttcatctcctaggcccttgagcccccactgggccttctgcatctcaccagcagagtggacgagagactgcagagcctcacaggaggttcttatgagtcggccctggaagtggcatacagctcttctgctcatggtctcctggctaaaacccaggctttcagccagggctcagtggaattcaggcatgcctaactgcaaggaaggctagtaaatgaagtctagctgcatgcccaagaggtagaggaaataggttttggtgccacacatttttctagagagagcatgagaaagtttctgaggcataaaattgggaaggctacactttgatggcttctgaccttaacttagtgcctttgagtgaggtggagagaggatggttgaattgctgccttgtctgggactggattctctgccaatttccttacagggatagattttcagctccagcagtggagacccgtcctagcatctggggggagtgcccaccaaagtttgctaccaagctgggccgagttgtggtcaaagaaggacagatgggacgattctcctgcaagatcactggccggccccaaccgcaggtcacctggctcaaggtgaggtttctgtctgccctgaccctgatccagcctgtattagtctgttctcatgctgctaatagacatacccgagactgggtaatttatgaaggaaagaggtttaatggactcaccgttccacatggctggggaggcctcacaatcatgacagaaggtgaatgaggagccaagtcatgccttatatggcggcaggcaagagagcatgtgcaggggaactcctctttataaaaccatcagatcacatgagacttattcactgtcatgagaatagcatgagaaaacccaccctatgattcagttacctcccactgggtccctcccacaacacgtgggaattatgggagctacatttcaagatgagatttgggtggggacacagccaaaccatatcatagccctagggaccctgaaaattcagggttagacccttcaactagtaggagtctttccattctgttcctcctgtttcaggcggttctcaggggttctctgtatgtttgttagggatgcatgttcctgtccctattacaactctccctctgttactcagaccacagtgttctgacaattctcacactcacaaaatagcagaaaacttctgagtcaagacaagcctgacaatctcaagagtggactgtgaagttagggttctaggtgttaagccacagctccctggtttataaagcctgtgaagctggataagtcatttgacttcttggaatcctggtttccttatcggtgagatagaaataataccacctacctcaaaatattgtcaggagcctccatgtagaagggatttataaatcattcagggctgggggaagtgaagcttaagggggagaggtgggcgggcagggaggcagtggcatggggttggggatggctgttaaacagggcagtgaggatcctaggggaacaggtagagtcatggccaggggaataggtttttcagagttggaatgcctgggtaaaagtgggtattgacaccttttacctgcttcctaattctcttgaactcccctaggaaaagaataaaaggaatggggaggtaaggaaaaactgaagtgaggaatatgggatttcctacctcaaactcaggctcctttgaaacagttttcaggcaactgctctaagcaggacagagcaccacaccacatccacagacctcaagtcagggcccctgaactgtttaaagttggctctctgagcacattgacagggcccacagcagaggacgctgctgcccaggccctggagtctatcccactaggattggcaggaggcaggaggacacagccagaaggtgagcagatttgtatgaccaagttaccccattgccatccacagggaaatgttccactgcagccgagtgcccgtgtgtctgtgtctgagaagaacggcatgcaggttctggaaatccatggagtcaaccaagatgacgtgggagtgtacacgtgcctggtggtgaacgggtcggggaaggcctcgatgtcagctgaactttccatccaaggtatcgaccagtggacggctagtgcagaacgatccctgcctggtgccgcaccctcctagaggagctgcttgttcactgcgcacctgtgtgtgtatacacctggcccactcacacacccaggcactccccaggggcaggtcttttttttttttttctcttcagacagagtcttgctctgtcgcccatgctggagtgcagtgacatgacctcagctcactgcaacctccgccacccaggttcaagcgattctcctgcctcagcctcctgagtggctgggactacaggcacacaccaccacgcccggctgatttttgtattttttgtagagacagggttttaccatgttggccaggctgacctcaagtgatctgcctgccttggcctcccaaagtgctgggattacaggtgtgagccaccacgcccggccacaaggggcaggtctttgacaagaagaaagggtgaacagggcagcgcagacctggccacgagggaagatgccctgtgcttggctgccaccttcccttgtgttcccatagtctcccccaccatgtcttcagtcctttcttctcacccggactcccttttgtatctgtggttgccaactggaagaatgaatgttgctaacgtcttgccatcaccccaaatttaacctgcccagaatttactgataatttactctgtctttcaagtcaggcgatccttcgacttgaccccctctaccagggttcccatgttccttcacacccagactggactttccagcatccttttgacccctgcctctttctccttgagtcgtcagccctgtcagttcttccttgtaagtcttgttgaacacgtctcctccttacagttctttggttcctcaagtccgggctgaggagggagtgcagggatggggaaggggctgcatgtcactttactggagcaggaactcgggggtcaggaagggaagtggctttcagtccttcctccttctttgtccctctcttttcttctgatttttctgttctgcatctccttcttcttagaaacgattcatctttgctcttgttactttttttggcctgggtatttttcacaatctacagaaagaaatatatttcacagtacattgcaacccagaacatgtatacataggtaaacaagtttcaggaaaccatcctgaccgtactgtgtacagtgcatgctggtattctctatttcacttgacatcactaaaacaagaaatcctggtcctgaccggaggacctgacttggtggctcactgctgaataaggagatgccaccagacacccagagcaatgtgtgcctgccctgacattcagttaaatactattccctcctgatggacttcatgacaaaatatgttgcctgatatttgttttaaaatactcaaaaacaaataaacgaaagaaaacaaaaatggatatataagactggcaaaatgtggtatctccttaatcgtggtgatggctttcagggtttgttatctctttctactattgtatatttttaagtttaccatgataaaatttgagaaagaatatagcaggaaaaatatgtattttatgttttttctttgaagaactggataacattaaaagtatgcttttctgtacactggtaagttacagcatttgggtttggaattttcagtagatgtttgtttgtccctggattggttttttttccttctgtttagtgaacagaaacagattccatgccctcagggtatggtagcaccagccactattaagaagcccaaaggacagaacctgaagctttgacaatgtactctagggctggggggagttcaaaggccaaagacgttcagcaccagggaagctggaaggagccagcagggtgggaccacggtgatgaggaagtgcctggggagggaaattttggtgtatacagcattctactaacagtctttccacccttccccctttttccaggtttggacagtgccaataggtatgtctaggctttgtgacttttacgttttccctcttgaaatgccctgcaaggatgttaccgagaaatgccctgaatttctgaatcatcttatggggcagaagaattggccatttggaggatgttgttttattttgggtgttttgtcttgttctcctattgtaatatgacacacgggttctatctcaggttgctgtcagtattgagactggaaaactcagtgttgccacctttcacagtatctacacagtctcttctctggttagcatcctgaggaagaacactgctctgagaaggccgccttcctcattccagggcggaatctgttcactcatccagcccagacccagcaggagcctctttcctgtgtgtgaggctcggcgctagatgctggatgtgcaggggtgggcgtagaggagggcttaaaccacacgaacgcacattaccaactgggatgcgtctgtgaggaaggacaacaggaaggcactgattagaatagaggggcagggaagccatttcgggaacttggtatttgagctcagacctgtgcaaaggaatgttagctggtgaagaaaagctcagggagtgtgctccaaacagcagggatagcatgtacaagctgtgaaccaagagatgggcccatggggacccagaaggacgccagtgtggccgcagcctggtgaatggcaggccaatgtctgtacgatcaggagctggcattcctgtgggccctcttgtggggctcagtttcattcttaaagtagtggaaaagctgttggaaaatccttgggcttgaaatgacataatttgattaatgtttttaaaagatcgactatggtcgctgtatagaaaatagattagagagggcagagtggacacgggacaccggtggcagaggttgaactacggaggcactagtagagaagggaactgtagggaaagcagggctctgggcagggttgtgggacaggcaagtgtcgggaatggctgcttgtgctgtggcttgggaaactgggcaaactgcagagaaagatgctcttacttgcccttaacttgtgggcttttgtgatccctggaatccgtgcttgtgatgagtaatatttgtgagtaaccagatgatcattctattctcccctctcctcacccaccctacccccaccctcaccaccacacaggtcatttgtgagagaaacaaaagccaccaattcagatgtcaggaaagaggtgaccaatgtaatctcaaaggagtcgaagctggacagtctggaggctgcagccaaaagcaagaactgctccagcccccagagaggtggctccccaccctgggctgcaaacagccagcctcagcccccaagggagtccaagctggagtcatgcaaggactcgcccagaacggccccgcagaccccggtccttcagaagacttccagctccatcaccctgcaggccgcaagagttcagccggaaccaagagcaccaggcctgggggtcctatcaccttctggagaagagaggaagaggccagctcctccccgtccagccaccttccccaccaggcagcctggcctggggagccaagatgttgtgagcaaggctgctaacaggagaatccccatggagggccagagggattcagcattccccaaatttgagagcaagccccaaagccaggaggtcaaggaaaatcaaactgtcaagttcagatgtgaaggtgagtagaggtaattagggtcaccgattgccaaaatgtagccccttggtggccactcccttccttcagcacccagctagtctgcatcacctatatccactcatcttcttggactagctcccctagaaaaccaccttacaagggccttccccttaggagtgactcattgtagaaatgccctttattctggagagacccctaacagtagcctgttgtttgctcttggatagagtactggccctggccctagttcttaccaccctagaagaaacaccctcattatcgccaacatcgaaaagcaaacctcatggtctcctccgccctttcttccccttgcctggctttggccaacctggagaccttgcccatcacgctgtattcatcctcctcaaggcccctgactctctcaagaggtttcgtcttgtggagtgtggttgagggtgaggaagcagactcagaggtgggagggcagctccacaccaaactgagccctttcctccagctcacaccttccccacctacctcacaatcacagggtgctctccagggcatagggagctcacgttctttacctggccctgtagtttccgggattccaaagcctgaagtggcctggttcctggaaggcacccccgtgaggagacaggaaggcagcattgaggtttatgaagatgctggctcccattacctctgcctgctgaaagcccggaccagggacagtgggacatacagctgcactgcttccaacgcccaaggccagctgtcctgtagctggaccctccaagtggaaagtgagtacacttctccaggtcaccccgcattctctgtgggacaaccattcatggggtgcttcaccttctgcagatggttcatctcctatagccccctgccttggtgcacagcccgacagaaatgtcacccccaatcacatgccaaggccaagtgtgttgctctaggccagtgattcataatcaggagttcacatcagaatcacctcaaaataaacatgcatggccccacacccagcccaactgacagctacctttcctaggtccctcagctgtttgaatagtgccgtgactcacgtttgtaaccacagagaactgagtgttcattaaatatacaggtttagagtaatgtgagatgatgtgggatcccacatcttttatgtttattgtactgtctgtttataaaagtaatgcatgttcattgtggggaatttaaacaatatataaccttatgactcagaaataaattatattttaatgttttttatacaaacttaccattgtggtatttgtatactgctttctatcctaatttgctcatgtgatattaacatctttttatacaattcttggaaagcatgacttttagtagccatataatattgcatgaaatggctgtatctaatttaggtatgctgttatttgttgaataattaaattgtttccatttttcactattataacatacctatgataaatattcttgtacctgtctatctctataaaatttcccccttactctaaatgcatatgtaagccccaggcccatgccatacccttgagaaatgcattaacaaataccacaagagtagaatctgcaaattgcaggctgctggaaactgtggaacaaataactttcacccattttttttccacatacaaattgcaagcaaaaaaaaaaaaaaaaagacaacctatagaaaacttatattagaaggtatatagtaacatcaacaattacaataatttttgataatcttctgccaatcctgactgagataatctttaaaaagtttttatgggaacatcaagagaatttggacactgataagatttaatataaaggaattcgtggtgttttaagatgtgatggtggtcttgttacttttttttttataagttcatctgtttgagagatatatcctgagttatttactggtgaaatgatatggctttttatatttgacttagaaataattcatgtttggggagcactggcagggatatcaatgaaataatattgatataaatgaaagttgagagatgggtacataggaattcactacactgctttgtctacttttgtgtgtgtttgaaaattttcaaaatgcacatttccaaaagaaaaaaagagttagtgatgtatccatatagtagaatgccagacaacatcctgtagactgatgctaaaacatgttcaagatgcactaggaagggagaggagcaaagtacaggctcatgtgtaaatggaagaaaagatctgtgtacacacatgcaaaagatgcctgtgtgtgcacaaatcatttctggaagagcacaaaagtccctctaggaaggggaaactaggggttcacaggaaggaatggggcatcttacttttcactgtatactgttgattcactgggattttaactgttgtttaactgggatttttactatcctcgtgaattcctttacaagaaatattatccatgccatttgcaggtgggagtgctggtaggcagagttcacaggtctaggagatcaagcctcatcatccaggccaggtctctatccctgcgcaggggacagaaatatggtgtcaggtccaccacagattaatggcgtatccagagggcctagattctcctgtggcttcttctgctgtgaattcatctaagtctcacagaagactatttttagcctgttcgcgtcatggggtaatacatctcaggttgattccctatcttgttgtgttttgtgtgacagctttattgagatataattcacataacataaaaagcacccttttaaagtacacaattcagtggtttttaatatattcacagagttgtgtggccatcaccatcatctgatttcagaacattttcactacccctcccaaaaaaatcctacccattagctgtcactccctgttctcccatccccacaacccctgatagccactaatatactttttgtctctatgggttttcctcttctgaacatttgatgttaaatggaatcattcaatatgtggccttttgtgtctggcttctttctcttagcttaatgttttcagggttcatctgtgttgtagcaggtgttagtacttcattcatccatgtggctgaatcatattgcattgtatgggtatagcatacagtgttttgtttatccacgcatcacttaaggtccatgtggttgtttctactttttagctatggtgaaaagtgttgctatgcacatttatgtatgagttgttttcaatacctgttttcaattttgatgtttagaccacatatattgttgggtcataaggtaattctggatttaaccctctgaggaactaacaaactgtttttcaccattttacattcttctagcaatgtacaagtgttgcagtttttccacattctcaccaatacttgttattttcttgcttgcttgcttggtttcttgctttttttaaaaaatgaggtcttgctttgccaatggggctagagtgcagtggcatgataatagctcactgtaaccttgaactcctgggctcaagcaatcctcctgcctcgcctcctgagtaggtgggactaaaggtgcttgccaccacactcggctaattttttttattatttgtagagatggaggtctcactatgttgcccaggctggtctcaaacccctagacttgagtgatcctcccacttcaacctcccaaagcactgggattataagcatgagccactgcactcagcctgttttctattttttcattatagccattcacaatcatctgactatgattttttttttttttttgaaacagggtctcactctgttgcccaggctggagtgcagtggcgtgataatagctcattgctgcctcaacatcccagcctcaagtgatccttcccacctcagcctcctgggtagctgggaccacaggcatatgccactatacccagctaattttgtttatttttgtagataaaaggtcttactatgttgcccaggctggacttgaactccttgctcaaacagtcctcccactttagcctcctaaagtgctgggtttacaggcatgagctgccacacccagcctgactgcaattttgatttgcatttctctgatgactagtgattttgagcatcatttcatatacttattggacatttgtatatctccttcagagaaatgcctattcaaatactttacccatgttttaattgcatcatttacttttttattgttgagttgcaagagttctttatgtattctggatacaagtcatttaccagacatgatttacaataatcctctcccattctgtaaaggctggattatttgtcatgtgcggccacagaagtccctgcttagttagtttagtgatcacctaattgattggatggagagttccttaaatgccttgaactaatacttttcccagcctttgccaaggggctctgtgtgtgtgttacgcccatcttcagtgctccggccagcagtttacagctctgctttagcctttactttctgcttgcaccaaagctccaagtcagccagaggtgagacaggagggccttcttacatctttcctgggcaggctcacagccctgcacaaccatttgggctcctcagttctcaggaatctgtcagagcttttcaaagtcctggacatctcattccccagtttttcctttgaagttttttggtcaggctcttgttagctccgaatgatattgctgtctcaagtagctataatgttaaacaattgctactgattgattttaacaaacatcctggagacagggccatccacacagagtaaactttgagtcggattaaacaaagacaacccggaaaatggagtcgttgaaggagctgccagacagggcaaatagtgaccattctcttacgcatggggtttttcaggagctctgaacccatcctgccccttgctaagtggctgattttcacaagtaccataggtactgtcggttttcagagttaccccagagctggggcaaggggcacaagagtgaaaaagcacatagcttgctgttcttaccaagattcagctatgttttattgttgttgttgttgttgttgttgttgtttgttgtttgggagggtggaggggcagggtattgttgtttggggttttttgttgttgtttattgtttttactttttagagacagagtctcgctctgtcacccagactggagtgcaatggcgtgatcatagcttgctacagcctcaaactcttgggctcaagcaatcctcctgcctcagcctactaagtgagactacaggcacatgccatcatgcctggctaatattttaattttattttttttggtagagacaagagtcttgctatgtttcccaggctggtttcaaacttctggctcaagcagtccttctgccttggcctaccaaagtgctgagattaaagacttgagccaccactcctggatgtttgtttgtttttattgaatgctcctcagaatgttgcaagcctgtggttaatttctggcattctgaaaccgttgcttttgactctttttgccagtattgttgttgcttttatggaggagtagatcttcagaggtctttactttgccattccacatcctatcttcttgatgaagacactcgcttttctaaaacttctccagttcctaaacatcctagctaattcttggcagatgagtttaccatgaagcaggtcatctgatgggtgttcttttagctcctcctacatacttctctctttctgttttcctatactacagaatacctgtctgtttcccttcccaagacttctctttctgtcccttcccatcttcacaaggatctgatctaacaatgatttactctctcaccacttcttcaatctttccccttcccttattgagagacctcttttttctccctacaagcatgctgtagttgtccctatgctgaaaaaggaaagaaaatcttccttccacttgagagcccctgcagctcctactctatccctccactctctttcatccctagactatatttgcctcaagtagagtctctatgcacagcttctacttgataataacagctaacactcactgaggatgtgctatgctgggttttgtgctaaatgctctacctgaattgtttcatttagttatcccaacaatcttacaagaaaatcatacccatttcctagataagaatactgatctttagtaaggttaaatgacttgtccaagttcacatgccttgtaaaagagagcatatttctaacccaaactgacctggcatgaaagcctatatccttttttgataactcccaaaggcatttctctaatgagggagttcaacactggccaaggggagggatggagagggtgcctccccacaccttctgggtggtctgtctgaccctccctcagtgccaggcctgtccaggtacaccatcactctgtcttgtcgctgccctcccatcgcctatcctcccctaggatctggaggagaaagtgcagctgtacagtcagagctggctgtaaaacttggcttcagcatcgagttcaactatgggaaattagtaaccttgtctgtaaaatgaactcaagagaacaacctcataacattgtcgtaatcacatctggaaaagtacctggcacatagtaggccctcacatcttattagctttcttgcccataaacccctgcagtataatatgacatttcttctcatttctgtattgaataggctctcttgaaaagcaccagtgatatatcttctaagcaccaaatccagttccaccttttctcagctatcagccaccttgacacatgtacagcatgttctggttgtcatagaagagattatccctattgctcttaattaaggtccccaaactagaaaatgtcccctaattcactgatgtagaaggcttttggaaagttcagctcagcagttctcaaccagaatgtgcattcaaaccacacaagggcatcattactgcatattcccaggtccccggcagctctgagcccttgacctagaatggggttcaagctgtgcttagaaaactggagcacatgtgagtcctatgattcagttctggaattggaaaaaaatcattgtaataatttaaaattgaaatgtcctcacctgtgagcctgtggcttatacaagtaaagagatactcacaagattgtgtaatcactgatgggacatattaaagaagataagagacactagaaaatagagtaggaccaacaagcaggaaggagctctccagaggctcgagggcagcaaaagccaaggcaaagcaggaggcacctgagtcacagaggagagaaggcaggcccaggttctaagcaccccagggctagggtgttttgtgactgtgaaaaagcccctgcgggtgactctgcttcaggctccatgtccctacatcactggtgctgcctgtttcttaagcatgaagagagagaagccaaaggcaggctgccgagggtacccaggtgtccaggacagtgaggcgtgcctgggaggctggggtgactgcaggcatcaccagagtgggcaagctgtgatctgagctgacctgtccttttccctcacagggcttgccgtgatggaggtggccccctccttctccagtgtcctgaaggactgcgctgttattgagggccaggattttgtgctgcagtgctccgtacgggggaccccagtgccccggatcacttggctgctgaatggtgagttccccctgccccagctctctgctcccatcccctgggccctttggcgctgcctgaattctcacttatccctctgagccatttatgccttggacatcctggtggtatgagaaggaagcacagggcacaaagagagcacgggcactgggatcctgctcccgactggctgagcaagttactactcctgtctgagccttgagttctccatctacatggcaggaatcatgctgcctatgtgcagggtggtggttgtgaaattaaattagattatttctataaagtggttaatgagatgcctgacacataggggcatgagcagttggatttcttttcttatggccaaactcatagtaggccctcaattaatatttattgagtcaataaatgaacaaataaatgaataaactaatgaaccactctcaaagtcgcatgagggatcttaccttttatttagtggcaggtggttctgggactcacagaccagttattctttttaaactgatagtcctatagagactcgccaactcttttttttgtcaagtaaggtcctttaaaaaattatttgccgtatattatcacccttttctttttaaaggaccatttaatttcaacagtgtgggagaactctgactttagaagactgagaactgtccattaaactgataagatggagcagggactactgtggggatccccagggagggtgaaagagcccctgctgagagtcaggagacacaggcacttgtccttctccaccactgagtggtcgggtgaccttggacacttcacccctcggggtaccagcttctttatctatgagaagatagggtggaaaagaaggtttgggatctcagctcactctcatacctaatagaatacactccttaagacagcagtgggccaggtgtggtggctcatgcctgtaatccgcactttgggaggctgaggtgggtggatcacctgaggtcaggagttcgagaccagcctggccaacatgatgagacccccatctctactaaaaatacaaaacttagccgaacatggtgccaggtgcctgtaatcccagctactccggaggctaggcaggagaatcgcttgaacccagaagccagaggttgcagtgagccgagattgcgccattgcactccagcctgggtgacaagagcaaaactccaataaataaataaataaataaatgaaagagcgagcaagcgagcgagcagtggtccccaacacttatgcaccaaatagtccccatttgtgtctgcgtcattgatgtattgcctgtgaaccttccttgttggtgtagtttgctcaggctttgctagaagctgtctttagtgagtaagaggaagtgccatctagtcttcctacatgtagtgttcttgggtaggtaagtgagaattgaggtctgccttccctcccagcccttagcaaaggacagaagtcctattggatccagtgattgacttcaaggaggcagcctccttgtggctggaatgcaatatgggcgttaaggactaataacggagtctagactaagtatcaacaaacattttctataaagggccaggtagtagctattttcagcttttcaggccatacagcctctttaacaactctcaactctgctgttgtggtataaaagcagccataggaggctgggcgcagtggcccactcctgtaatcccagcactctgggaggccaaggcaggtggattgcctgagctcaggagttcaagaccagcctggccaacacagtgaacctgtctctacaaaaaaaaaaaaaaaaaaaaaaaaagcaaaacttagccaggcttagcaaaacttagccactgcactccaacctgggtaataagagtgagaccctgtctcaaaaagtaaaagaatagacaatacataagccatagacaataagtgaaagaacgagtgtggctatgttgcagtaaaactttatgaatactgaaatgtgagtttcacataatttttacatatcatgagatatattaattacctttatatttttcggccatttaaaatatgtaaaaactattcttagcttgcaggcgctacaaaaacaagctgcaattagcattctgcccaggagccatagcttgctgtctcctagtttatacatcactcaagacggtgttttctcagcgactcttagcgtttccacacccattccactagagggcgatcatgctcaagttgggtttccttggctgctaactttagtttaacccagcctccgagctgggagagcctaatgtctcccaattctgatgtgccctgagccaacagctcctttctggggcctccatcccatcccatgtttgtggggccacagtgagttacgttccagttaaaggagagctctcaaaaggcttgtcagcacatgtttggacagaagagacacattggcggcagtcagggaatacactggtattgtcaaggaagagaggtttggagggtaccattgtgacaaaaagtaaaaacaaagagcagtgctcacttctctcagtggcaggatccaggcccctgcctttcccagccctcggccccacttttatgaaatgcaataggttgagaggaatcttcccctctagtcctatgatgtgcttgctggtctctttgccaaactgtcatggagacatgaagtgttgctatgtgcagaagaaaacactgcattgcagggagacgacttctttctgtactgtctcccttccccactggccgaccccaattttatgaagtgcaaaccaggaccctggggcctggcaagggaagaaactgacagttgcttcctatatggcagctggacacattcctgctccgaggacagactcttcagtaatgagattttttttttcctggaaatgaaaagtcacatcccagaatgataaactcccaggaacatagagcattaaggaaaccactgaagctcattgcatgcactcctgtctccatgcaggactttatgttacctggaacatgtcacatgtaagggactctggaaaaaaggagccgagtcatttttagttccctatatttatcttttctgtgaaccctaaaatacacctaattgcatagaagaaacgcacctaactgcaacagtgggtgggggatgcagaattgctttttgataaatatctacagtggaaaattgaatcgttgtttctggagacatctaagtggagctgggcaccccatgttcagcctgggaaagctccgttttgcctgaggctgggctatgggccagatgaccgtgtaaaagtctctccaggctcagaattctgtgaagttgaggatgtggatttggagactgtttaacacagaatgcccaaaactctgtccctttccctcctgcatttttaattcctccagattctccctcccccatccctctaggccccgtcttcctcctccaccacacaattactccctttccttcatctccttagcccctggctctttctccagcccataagcctctgtccagctggctggagatgtgcatggtacatcattagccctcagtggatctgagcaagcatgacaagtctcagcgtcatgacagcagcagccctgctgaggacagggctcccgtccctactgccagtgctgcctggcctgagccttcctgtgcttcctccacagggcagcccatccagtacgctcgctccacctgcgaggccggcgtggctgagctccacatccaggatgccctgccggaggaccatggcacctacacctgcctagctgagaatgccttggggcaggtgtcctgcagcgcctgggtcaccgtccatggtaggagcctctgggcacctgggtagaagcacctttcctgcaggcacttctgctttggaggaagggcacatttgtagaaaatggtatcatgagctcaaatccagggagcagaggtgcacatggcactactccacaccactggcagcggcaggtgccgtgacagaggagtggctgctgcaacctcttagggacagaggagagggtccttaaaaagtgctgcacctgcaggtaggaagtgagggagatgacctccaggagttcacagcgacaagggtgtcatcagaggtggccttttcctcaccccctcactccactggggccatggaaaggtatgggggaaagagatagggctcccttagctccagaagctccaggtctggtcagaagaaaacctcgcacactacaaaaggacttgggagagcactcacgtattccctgaacagtcagtggcctcccagtgaccccttacatgctgggggaccctgggtcacagcgtgcacactgaggcttccagagggtcacaggttgtcccctttctgccccccttctactcacgggcccaggcttgtttttacacatcagcagcctggtctccagtaatctgattatcatggtcatccattcatcagccaagcacttagtccccgggaactgcagggagcctcagactcaagacagatctgtctgggctgtggtatcagcaggcctggtgacagttcccgtggaagtgcttcttgggtccagggctttcaggtaagcctgatcccaccatcaccctgagcctatgcccccggctcctgtgcatgactgggtcctctggtgctagcactgagtgcagcgtgactggtctcccatcagacaagcaggaggatacatctctccattccccggggctcaggcctgtcaggaacatctccgtgttgtatgagtagccactgtctgggaggctgcaggaggaagtttcgcagaaaaggaaaggggaagaaacatttgtggcttactgtgttaaatactttcacctcacccgtattctctcactgagacctcagtagcctaggggacaaggatgctgtcctgatttcagacagaaggctctggaagtctcgggaattgaatgtaacttgcctaagcgcatcacgttagtctgcaaagctgcaccctggagcccacagcctgtgactttcaagtctgtgctcattcctatgccctgacctttttcagaggacacatcccctggctcaaaggggaagactggccactgtgggctgggcagtgtcagtcccttagggatgaaggaactggcactgatggagaatgtgactgacgctggctctgtgaagctctctgccgggagtgagcacgagaaactggtccaccccttccttccaggaaacccaccacactgggttcagagcccagctctggcctctgggaatttgcagccagattctggtttacaaacttactcatttatcctcatagttctaacttcatgactccctgggagccaggtggggagctcaggaaattgtgataatgagatttcagaggaaacctgaactgctgagaaccttgtctctgaggtccaggaagcaggactcacctgggggctcttcttggaggccagcgtggccaaccccagagtcaagtaaggggcagcaagagtcagaatgctacacgtagagccgccgtggctcagccctctgttttctgatactccctccacagccacagccaaggactaatccaatgtctgtcctggcttgcctgtgtttagattggattagagtgacccagctgagctaagagtcccctggaggtgggagtcccaggcaaaggatcaagaattctttagggccatcctcctgactcccgggcctgtgggggctgggacctgaaggatcaccacccatccaaaggaaaacaaaaagcacagagaggtcccaggcaaaaactctgccaaggaagtttggatttgctcggagaagaggcctgcatgacagaaccccctcccagtgtgggggatgtactgggctataaagaccagacaggctcagataccataaatggtgaacaaggctgaagacgcagccgcacgctcaggcccggcagcatttgggctcttggcataggattggagcagggtgagcctggcacagcgacaccccctggcacggtgccctgagacactcaggaggctcggggctgctccctgcgctgtcctctgctgtggagtttttctgacttgattggcagccccgttggctctggatcctcgggacaagcctgggctgggggagatgatcacagtggaggtgtttgttccctactgcactgatggctgcttcacccctcccttagctgtccaggtccagccctctcttgcccttagtgtggcaccaggccacggtggggagcatggatgtggagccagcggcctgggtgtgagtcctgctctgccacttactagccctgcaccctggcgttttagcattccagacctcagcttcctcttgtgtgaaatggagatgctgacagtcgcggtactgtgaggattaagtgaatgaatgtgcaaagtatccccagagcataggatagcacacaccctccataggtatgtgctgtgattatgattgtccagcagagcccacctttaaacaagatacaatccttacaaatgccaagactgaggaggggttttcccaaaggatccactttgctacagtattgtgtgtttgtttggccatcagagaatcagaggagggaggtgtccagccagacacaagccatgaacactcgtgcctgcttccaagggctctggccacaaggtggcaccatgcagcaacgcgtgtccctccagttgtcttctctcgggggtggttgaggggcagctctgctgcaagcaagcttattctgagagctcagcagataccgtgccaaaggccagatgcaggggctctttctcacctctcgccttttgccgagattttgcaatcatcgagattgctggtgcagccctcagacgcgatttctgcagccagcccttcatgctttctctgccttccctcctcagtgactctcttcttctccaaatcctggaaactcccacaaatgtcactttctctgggaagcctaccctaatcaccccagaatgcgttccctgaacaccgtgtgcttctagtattacacttacttatcaacaagtctttactgcgcgcctatattgatcagtgccaggcattgttctggggaaactgcagtagacaggacagctgagggccctgcctgcagggtgcttacgttctgatgaggatgccagcagcagtcagcacctggcctcatttcaaatgctggcacgtgctgttaagaacatgagcaggtcacaaaggaataattataaagagaaaaagccagtgagtggggtgtgtgaatcgaggagggtgagagggtgtatctttagtgctgtgaggaagcctcagaggtgtccatggcctggggaaagagagctctaggtgggcagcacagcaagtgcaaggccctgagtcaggagcaaggttgacccattcgaggagtagcaagacagcagcctctgtggctgcagcaaagtagacggggcagtgtgatagaaagtgagttcagaatgcgggggctcaccattccaggcctctggaggagaggagaaaacaatttactccgtgaaaattcactttcattttactctacttgcttaattatcttcctctccacactgtaagctccctgcagggagggatcacgtcatactgtgtgtagagccaggcctgccatgggagcatgcattccctgaatggatgagagcacagaggttgccgaacctcccctgcagtgcagggaggcattccctagaattcctcgcttttctgggggctcagtgcccattagggtgtgcaggaaatctgcaaattaccttcaagagtccctcaacagggctaggcacagtgtctcatgcctgtaatcccagcactttgggaggccaaggcaggtggatctcttgagccgaggagttcgagaccaccttgggcaacacggcaacacaccgtctccacaaaaaacacaaaaattagccgggagtggtggcccatgcctctagtcccagctactcaggaggctgaggcaggaggattgcttgagcctgcgaggtcgagactgcagttgcagtgagccgtaatcacaccactggactccagcctggatgacagagcaagaccctgtctcaaaaaaaaaaaaaaaaaaaaaaaaaaaaaaaaaagagtccctcaacaaatattccttctttccccaacacaggctagggaaaaaaaattccccaatagttaaccaagcaatgaatgtctttcctcctgacccaggatgagtcctgatccaggatgattaattcaaattcctgcagagcccaggaatatctgaaatacagtatatatttcacagcgtttggactgagtcattgctgggggcttccttgggctagaatatttaaaattttttccccctggagtatctccatcaaggctaaaattcttaagtgtctagatttattaatagcctgccagttgtgcccatttgacatagtttctcagcctaacggtttgtttatttaactgaaggcctagtgggcctgtttaaggcatctaaggacataaaatgtgggtaggttaaaaagatgaaaagatcatctctagaatagataataaaatataacaagcatatttattagagtatttgttttgatgcagagcttctaatgaagacaacaggcatcagtgaagtcagcgtttgcttggcaatgagtagaggcacagtttgttttcagattaataccaggcactctgcggggcagcctggagccacctcctttgtcttccctggttatgcacaggtactttggacactatacaatctatccagttaacataacgtatggatcctgacctcctcaagcttaaaaacactgacaacttcttaaatacttacattggctacagaaaaatatattgaagaagaataaataccagttttaacttgccttttttatatatattaagaagcttagtttattcaaaacatctgtccacaagcctttaaactgtaagaaggcaagcaattaattacatgttaaaatttataaccaatattttcattttatgtaggttgagtacagaattgggtttgtgtaccacatgggttctttgtgttacagaaagacttctgagcatatacatgtacgtttgtgcccatgccatagaatttgagcctcattttactaatagggccattatagagctttataactctccacctctacagcccatagtcagtcataattacatagagacccagatcaagaatgctatccagaatcgcaggattgagctcctagtggcaaaatgtgacccatgtgatgacagtgtaactgagagtgtggcttccaggcccgcactgggagggaacagtgggtggtttggatgccatacctttatgtttagagtgtgattatagcttctaagacagtggaaaggctgtggtttcagtgatccttgcttcccagctagcaaccctatcattactggtcagagatcttttttgggatattatacgtcattgttcctttcattcttttcctcgcacacttctcttcccatttgcttcttaagttctgggaggaagggaggccaaaagaaaacaaggctatgggaggaaaaatccttttaatgccacaaagtagccattttgctgacttcaagaaggttctgtttggttaggagacagacttttgtttaaggggaattcagatgccccggggatttacagcttgcacaaaccccctggaaatgggaaggggctgtgtggcgtgtcagcagggagaatgtaactcttctttgatgaatcctccagagttaacaatcctggaatttagggaaaggaggaggctggtggtgatccctggaccatgctggattttgaactccaaataaagaaagatgggggcactgtgcttccatggtgccccctcaattggtgatctgttgaatttccatagtataacagggtttggagtgaatcagaattgctgttggaatggcattttgcattgtaataactaaggaatacagctcatgttcaaagcctaaggaaaatatttggtagatccaagattaaggcaaacatgtgttgaatgcaaatttggatccaggaccttggggcttcagaaagtagcaagttgaccagcaaatgttggcaggtagaaaaacacacttataaggagaaattcagaatttagttgtttttcctactaaaacaacggaaagaaaaggaagggctgtgaagggaagacaggagaattattgtagtgcagaaggagatggcagatcctggtcagccaccaggacaaaggcaacagtgggttcctagtgtcaggtcctagaggaggtaaaggcctcactcctggtgctgggtttgaagaagaggctttactggttattttataagaagaattagtgcaagaggtagcaaactgctcctaactcttcctctaaataaaagctttccaaaacgccatgttgggtatcaatttatattaggtttttaaagtaaaaccactatcaatttgtttttaagaaggaattgtttgataggaaagtctaattggctagaaaagctggcttgttttatttaattctcacaacaactccacttgacacttccgaattcactttacagatgaagaaagtgatgctcaggaggtgatgtcagctgcccacagtagtccaggtgatcagcagcagcaccaggccaccacctgcttcagcccatgggctttctgcatggctgctcttggatcctgataggtcatttgtttgatgcttttgcttcaccagagcgatcatttcatgtttagtttcatgactaggaactggcttcaaaaacaacttctagtgagtcaaaaacagccaaaatggcaaggacggaaaaactccatgggtcagtagaatcataaaggggagagtgcgtatatctgtctgtctctcattctctcccccttcctttgcttcccttttccccctctctcttcctcacattgcctctttttctttctcttctctctgttcttccctttctccattcttgctctttcttaagtcctattaacagcttcgtctacatggcatcgtttttacttgtcagcaatctgcttgggcttattcttagtcattgtgcttgtctttcccattggacgacagcccgatcaatccttttccattctgtcaaaatgggacagtggcagtttaatgactgagtccaggagtgaattggctaataccaagtaacagagcaacagataaatgcactttagatccttaatcctaggcaaggaaagcaaggagactcagccctttctgcactccagaaagaaggccctctctgggctcagtctcagcagagcagcaggaagcacagctgtggggaaacccggggtatatttagtttggccccatttgagctgggcaagtctgtcactgggtctcagcaaagcatcccttgctatttgtgtgccatggccagtgggtgtcctcccaagacgaagaagtcttgggctctctgagacaaccttgtcactgggggcctcttgcctcagaccctggtccttaaaccaggatgatgctagaaggaggccaaggacaagcagagaggagtgactcccagggtaatgggtagctctggacatgaatatggatgatgacagaaagctcctcacagaattgagacctgcctctgctcccaggacagtcaagggaaagcacccagaccaggaccccaccagcagcatctccctcctcatggggcatcgcagccccaggaccttaggacaggcgagcttctttctctgagtctcagctccctccactgtaaaacagacacaatctgcccaatacttccgagatgttgagggtaacactgaattagctatgaacatcttttggaatcctggagcgctgggctttataaggaatcatcgttacatgaaagttctggtttggggggtttttctcattggagttattatcaggttgaatttccacaaccaaaggagttagttgggttgggaaagtcagaaaacattgatttttatactgcttgtgtgccatgtattgttctagctgttttatatgttactttctaatcatctaaaaccctgcaatattaccatgcattagactgatgatgcagacatcatacttctcagtattatgttgccataagtttggaggagagaacaccgaggcttgctttgggaaggttgcttcagatcacacagccagggccacgagttaagaatgccagtttccatctgtcctttcgtattttacttaagtccacagaagagtgagcagaaactgatagaggctagaggccagagatgagccagaataatttgtttggctttggaatgaattgcaatacacacacacacacacacacacacacacacacacacacacacacacacacattgtgttgctcttttcacctggcttgtctctgttctgctttagtttttctcagttgtcaaggatctaggatgtgggtcagctgacagtgtgtttgtcctggagcggtcaccatgggcaccgttggaggagactggttccctttgaagggacgcctacgtaacatcccggccttgtcatcagaaggcctgggcatgagctctgggtctgcccacactggccccatgatgttagccaagtcacttcccgttagttaagtctctcctggtctctacaccagtacagtggaatggtgagttgggactgggtcccaccttgccggtctgagaacaggctcgttctgaacattcactcccaatcatttccatcttcccttctttcttgctgtagggctttggggaacaaaacacaggaccgggggcaatgagtgacaccgaactaaatgtctgccgatcggccggtttcccccaagttcactcactcatctcctggagggggtgcaatgaaagcttgtcctcaatttactttgagatatatcccatgatatttttaagcaacgcatttgtattcctaatagtatttgcctcaggtcctataaaaatgagtccataatccttgggtgaagcccagactccattggttctttgactgctgataaacccattgagtaattgagcccaagtggatagatgtgagtcagttctcatgctaggctcgtacaaatgttctcattgataatgaatggttgtacaaagtatttttacctattatctctttaaaactacccaaagtcctgtgatgataccacgactccccgtagagaccgatgaggaagtggggcttcagacggaggcagacttgcctgaggccaggatcccctccacagctgcaggtggaaccagtgagctgccaggtgggaggcagctcccaggccaccctttcatgcatacttctgagctcccaggggagggagaggcagataggcttttagtccccaatggctgagacccacagggtgacttggctttgccaaacccccaggaaacaggggctgtgggaagaacccagagaaggtggggttgaagaggagactgccacaggcttaaaggggagtgcgctggagttggtgacgttcccgtagcatctaggaatttgagcccatctgcatgaagctctgtaaggctggggactcgctgagattgcagagaggcaggaacagggaatgctatagaaagacaaaaacattttgtccttgagccttctcagtctgtgcaagacaggaaattcctcaactctcccgaggcagccagctctcctgactgctgcagcctagtgagagaaacgagatagatcaatgcatttccaatcctgtgcccccaagcccactcccagagcttctgccaaggcccctggcggccctccatcgaaggctgcggtgctgagtcagcagcaccagagagcagcaggggcctgagagccccatcttccaaggggaccgtggggggttacctgctctcacactcaggctccatgcccttcaactgcacctgctttgggggaagttttcctccagcctcctggaccttcccagcctctccccatccaggttcccagaggctgggctaggagagttctacagtaggcctgctttcattttcagtggcagtggataaaaattcggtggcaactttggaggtgacacctgcccagatacattacataccctggaaacctccccatggctccacttcctgaagaaggtctagtatttgtggtcctgtgttgagaagaacccaaaatgcctgtggccctttccccagaaacttagggtttaagttagagatatcctaaccctccctttctcaacagttgaacctgccaaaaacaaaaacaaaaattgctaaaatggcattactgaaagtcaagctgcctggctcacagaaccaagggagagaccagaggctgggcagccatggcttgtcctgcaccaggattgttccctgtgagacgtggatggcagggccagccactctgcagtcccctccccttcagctcctgtgaggcagggattctaagcatgaggaaaggctgttcacccacctccacaagaaactgaatgtgagtgaggcgccaggcctctcaccctcctccttgacttgccgacacactccctgtctcagagaaattgattttttctcccagtttttattgaggtattattgatgtacaataaactatggagacttaaggtgttcagtttgataagttttgacatatgcacacacatgaaacctttgccatgatttttaaaagtgaaattctcattgtccccaaatgtttcctcatgcccctttataatccaaccccccgtcccctgccccacaccactactgacctgctttctgtcactggactttgcattttctagaattttatataaatggagtcatccaacatgcactctctctttggcatcttcctttttttttttgagacagaatcttgctctgtctcccaggctggagtgcagtggtgtgatcatggcttactgcagcctcaacctcccaggctcaagtgatcctcccacctcagcctcccaagtagctgggactacagcttggtgtctttcattcaacataattattgtgagattcatccctgttgcggtaccctcagtagttcattcttttgtgttgctgagtaatattccattgtgtggatatatcacaatttgttttactcacctgttaatggacatttgggtcatttctagtttgcagctattgtgaatgaagctgctctgaatgtttgtgtacaagactttgtatggatatgtgcttgcgtttctctcagggacatacccaggagtagcatgactagatcctaagggaagtatatgtttaactttttaagaaactgccaaaatgttttcagaaggttctgtaccacctgccatgtatgagagatgcaagtttttccacatccttgtcaagaccaattcctgggatgtgatgtctttttatttttagccattctaatgagtgtagtgtctttggcttttgtgaggtgcttaaaacctcctaggatgggaatggagcaccatataattatcgaaaatgacaaagaagctcttcagttctgtcttatgagagacaccaagatgtattgttaaagggatgccaagcattttgtgtaacgtgctttcatttacttttttaagaagaaaataaatgcctgtttgcttctatatgttacacacgtagatcatttctggcaagatgaacaagaaactgaaaactcgttgcctctgaggagagatcactggtggctgggggatggggtgggagggagacttgccatactctttggtaccttttgaattttgtgccatgtgagtgtatcatttatctgaaaaataaataaaatattttttaaaactcacaaacttataagaactcattgttcattcctggctatcaggcaagaacatcgtcattgccaagcagagaaatgggaggcatcttgttcctaatgatctctagaaactccaaacactctttatctgttagctgccagtttctggtgggaactgagcatcaacacagtcatgtaccaagtggtcatttagtctgtgtttgttgaatgaatgcatgaatgttcaccccacgttctgttttctaccacacagaaaagaagagtagcaggaagagtgagtaccttctgcctgtggctcccagcaagcccactgcacccatcttcctgcagggcctctctgatctcaaagtcatggatggaagccaggtcactatgactgtccaagtgtcaggtctgtctctgcagctctctcttggggattaacatgaaaatggtcttggttgcaatgggtattgctctccgaggacccgctcagatccttgatccaccagaaaatcagatgggaccatcaggtgatggacccaaagaaatggagactcttgtcctctcttttctgccttctctgggtaggattttctggattcatgattaaatggtccagaggaagaagatggccatagagctagagcagtgaaagattaatttgaaaatatagtgtggccagtgtagctggaaggttttgaagactggtacaaaaccagattatgggccgggcacggtggctcacgcctgtaatcccagcactttgtgaggccgaggcagcagatcacaaggtcaggagatcgagaccatcctggctaacacggtgaaaccctgtctctactaaaaaatacaaaaaattagctgggtgtggtggccggtgcctgtagtcccagctactcgggaggctgaggcaggagaatggcgtgaacctgggaggtggagcttgcagtgagccgagatcgcaccactgcactgcagcctgggcgacagagcaaagactctgtctcaaaaaaaaaaaaaaaaaaaaaaattatgtgagaacttcccaaatctcagaagatgttctcagttgcactattcaaattttaaggtcctcccaacaaacccatgaggtagatcctgtttgaattcctattttactgatggggaagtgaaagcatagagagttgttggagtgtttcatccaatatcactgcattcagcgcagagttgctgcatggccggggaggacctccctaaccaatcccccttcccctcctcctggttcagggaatccaccccctgaagtcatctggctgcacaatgggaatgagatccaagagtcagaggacttccactttgaacagagaggaactcagcacagcctttgtatccaggaagtgttcccggaggacacgggcacgtacacctgcgaggcctggaacagcgctggagaggtccgcacccaggccgtgctcacggtacaaggtgaggctgacccactcagagcgagtgggaaggagatgctgctgcagcccctccaaaagtgatttggaggcaaggaaaccacatgaggctactttgttcccactgagggccctctcgtccctcagtcccaccccagccccagaggccagctccctgtccaacatcacaagctctgactgagtggggctgcctttcccagctttctgaagtccctgccctctctgggttactggtgccaaggtgcatagagtactaagagggaaatctgtaatacacttaacaatttggcagcgatagattttgaggtgagttataggcttaacagggtccttgccattagataacatatttaagaggagaggcaagttaagcacacataaagtgagtgacaactcttaatcacacgcattggatacagatcattagcacctggctcggtgccccgtgccttctgggctacctccccttacattggatatacagtcatgttaatattatcctctgagaatgtatccgagatggatgtgcaatgagaagggtgtgctgcatttgtgtatccaatcacagtgatttctggacaatctgttacttgggtgacatgctatcttcccatccttcacctccatggagaattgagtggacactgcctgctgagggacatccctgtttagctctgccctttgccaatttccagagcctcacgatggcacccagccctggttcatcagtaagcctcgctcagtgacagcctccctgggccagagtgtcctcatctcctgcgccatagctggtgacccctttcctaccgtgcactggctcagagatggcaaagccctctgcaaagacactggccacttcgaggtgcttcagaatgaggacgtgttcaccctggttctaaagaaggtgcagccctggcatgccggccagtatgagatcctgctcaagtgagtctgcatgtccagccagcctcccttaacccttccctccaaattcctagctcccctaacctgggtctgggcagccagaagaagcacaaactgatgtggggcttggacttccaggtaaagcaagtgcgggctcagtgctgctcacaagcttttgcttcttccacttcagtatagcaaatgttcattagaactttcccttttgagctcagttccccagaatcctgtcttgttacatccttgttcccccattatgtggtgtatggtgagtatgaaggaaggaggaatggatcaaagttggaaaagcagggggatagggggaatgcatttgttatctgttgctgtgtaacaaattaccctgaaacttagcagcttgaaacatttatcatctcccagctgggaatttggaagcagcttagctggatgattttgaagtttcagtcaagatgtcagcaggggctgcagtttctgaaggcctgacggacactggaggatctgcttccaaggctcactcccgtgactgtggcaggaggcctcagctcctcactggttgtaggtgggaggcctcggctcctcactggctgttggtgggaggactcagctccttgcgttgtggacctctccgtggggctgcttgagtgtcttttttagcatggcagctggcttccccagagctagtgatcgaagagggagcccaggtcagagcttgcagtgtcttttaagacctacccttggaagccacacgccatcacttccgactttgttagaagtgagtcactaagtacagcccgtactcaaggggaggtaaattcagttccacctcttggagagaagaatttgcagacattttaaaactaccacagggaggctacctttccccattacttttttctctccttttcaagggcttgctaggttacatgggaaggtcagctccatgaggcacactgctacatttccatgaggcacactgctacatttccatgaggcacactgctacatttccatgaggcacactgctacatttccaggcctggaacagtggagagcccatagtcgacattgggtagctatttattagatgaatgtgattcagaaatgctcttttaccttgaaaatgccctgtctcttaaaatcctatgccagccctggattgatggagacagaatgccttctgtgggtcctggggttggtgtaagcatcgaagaagagcatttgtttgcacctaacctacaaataggaggtcgtgccacatcctgaggatggttagacctgtcctggcccgggtgcctgaccactttgcaaggggctttctcgcctgtactttatcatctccccatgctgagcccatcatgttcacagctctgagctacaaataagctctagagctaaatgccaaggctactgcaaaacccaatatgtaccccatccccttaggtcctttgtgaccatgtgctttatacctgaatcagttatcttttgctgcataacgaaccaccccaatacttaataactattaaaaatagctcgtttatttttaaagcagtttcattatttcttaggagtctttgggtctcctataaagttctgctgatttaggcaaggctaatctcagctgagctcaatgacatgtctgttgtggtcaagtgatgggatgcttgtgagctgctggtccccctactattattagcggtacactcagaatgcatcaactgcctttgcattatgcttgaactagttattaccaggaaggccactctgcctccaaaatggggagaaggtacacgcttaccccctaggtcagtacaaagaatggaaaccgatgatgtgtaaaaatacctgctgatgatctcgtcagtatagaaggagtagcactttgagataatacttacattactcaagccagacatcctagaggagatgagcttgtttggggattttgatggaaaaggaaggctgaatcttggcaaatgtgataaggcttagctgttgagtaggccgagcaagaaagggtggggtgggggcagagccaagcaaagggctgtgggaagtttgccaggccagagaggaggcgtgcaccaggaggtcggcaggcagactgtctggggccagctggggacagtcataaaatttagactgtcccagcaggaaggggcttcagaagttatccagcctcatcgtcatttaataacgggggacactgaggtctcagggtcgtggacttgcttgtggccatccaaaggcaagtaacagagcccaagttcaagccctcatcttttgacttaaatcagatgctcttccattccttatggctctgcttggggagtttctcccaagtgcacagggaactggaaggacctgggaaaccacactggagcctccagcctgcagcctttgcctctttttcttccccaaagtccagcctcttcattcctttcggaggccactgccctggccttggctttttccccacctgagaagaagcaagtcagtggagagtttcctgagggtacgtggcaggcctgccagagacctcactcctccagcaacctagacgtagagcagggtgcctttcgaggggaatgactggatggctgggaggaagccgggggtccggtgtgcagggggtagaggggtgggcagatcctgcctgtccctgctaggattgtgaggcaggtatgggtgggtagtttctgcctctcttcccttcctagctcttgtctactgtaccaaaaggggaaatgacaaaaagtcagctcaaaattccagctggaatacttgaaacacttgacacttgccaggaaattagttcttttttatttattttttattttttgacagaatctcactctgtcgcccaggctggagtgcagtggcacgatcttggctcactgcaagctccacctcccgggttcacgccattctcctgcctcagcctcctgagtagctgggactacaggtgcctaccaccacgcccggctaatttttttttttttttttttttttgtatttttagtagagacggggtttcactgtgttagccaggatggtctcaatctcctgacctcatgattcgcccacctcagcctcccaaagtgctgggattacaggtgtgagccaccatgcccggccgaaattagttctttaaagtaatttttccatatagaacccatccaagaggtagatgattcagggtgggacaggatccaaggctttgtaaccagagtggaactcttattcagagcttagtaagccaaggcaaaaggactctttgtgaaaggttcagtttataggatgatagccccatatgctctgtggcagctcctgggatggggcctcatcttcagccccggccctgattttgtaactggttatgtgcagatgtcaaagatggccccaagaccctgttccagcagcttaggtgatctgacatgtgggtcccaggcaggaggccactatgaactttataggctgcaaatgaacccatggtttgctttaaaggcccagcagagatttaagggtatggctgtaggaatagttactgctattgccctgccaccaggtgatccacttaatgcgtcagcctttgtatcccaagtcctccacctttctctgaccccttagactgctgggggccacagggtaaggcctggggctggattggacaggagcccttgagaggcttgtctgagtctgtgctccccaccttgagcacaggtcatggaaagtgacagaagcccttacctgcttcccccatggggagaatcggcttactccagcttgcggcacagggctgtccaccaccaaagcctcagaggagtccagctggggtaaagccgccatctgggcagtgtctgctcctgatgtttgcatctgggctgtgttctactggtgacaggaggaaactctgctgaggagatgctgaaagggctgccaggcaaacacagcccttgggcatctcatcttcctgctccatgtcaacccaggcaccacaaggctgtgcttaaaggtaggaaaagagtggcctgacactggccagcagcctggcagaagcagggtgacctcacacagttattctacaagctcacccaaagtccataagcctttttaagtgttgagaactcggggcacactgaggacctcttcgttctcccagggcctggcacccatgaggtttctaattgctgtttgttgagcaaaggaacaacctgaactcaaaattctccagacttgagactccctgcaccttgaatctgtgccctctgacagtctgagcattgaggagggtggctgggaggggacaggctatgggatacatggccagggaggagagaggagtgaaagagctaaggcagtcaggaaggcacctgcaccagcacagcctgggacagcacgagggcactggagagaaggacaaaggagaggagcccagcaggcgggaggagggctggaggacagcaacgattggcttctccttgcttcaaatgggtgccagcacccaagggtgagcagcgccccagagcccctgagaatcctgggccaggccatgggctaccagtgtctgtccactgggagggaggccaggcagagtgaggtggagacccacacacgccagcagaatacacaagaacgcatgctcagatgcctgtccaggtggatgtaactcatatgtgcacatattcccaaacacagacctccaggtgcaggtgcctgccagctagaccagtatatgtgtacatcatgtgtatggttgataactacatatgtgcatgaacacacacatgtcccagaccagatttgtactgataagcacagtagggtagagtgcaaaggtcatagggtcacaggtcccaacccctccctccactagcaagctctgtgtgtttaggcaaattacttaaccttgaccttcagtattatattttttaatagaggtaaggtcttgctatgttgcccaagctggtgtcaaacgtgcgagctcaagcaatcctcccacttcagcctcccaaagtgctgggattacaggcatgaaccactgcgcctggactactttacctttataagcctcatatttcttaccttataaaaacagtggtgactctaatctcacagagctgttctaagattaaatgagatggctcatgtaaagaatctgtcacagagcttggcacatctgctattgggtctgagtgctagtgagacggccacatccaggggcatgagtgggagcactgttgtcagagaccctgagggtcccaccccagagccccctttccttatctttaaattgggcatggcagtactctatacctctctggcatgctgtggatatcaagaaagaactgcgtgtgggtgtcatgaaagctggagggtgctgtatgaaatgcagttgttacaaccatcactagtcacctctggctcgcagacctgcccccaccccttcccctagcctgagcagaaccttcttgtctggtcagagctcagaaatgccagcaggtggcagccttatggggttggagggacaatctgctgcaaatccactgcactgtagccagacagggtacagcccctcccctgagcagagggcctgagcctctgtgcaccagcaggagactgaccaggtttatggacatgaagaatccagagccctccccacctgaaggaagaagagaaagggccactcatgtaggaaaacacttgttgggtttttaacacaaaaagttctgatctgagagcattatcaatgagtgggggttaagggtgcttccattcccgagcaagagagggaaaggaactacttctgtgttaagggatcatggagtcagagtcaaggtcactgggcaggcccaccaccagggcctatctgtctagaccaacctgctacatcacagttcccagcagggttagcctttctccttccccttttattggttgagtgagtgagtgattgattgaatgattatattatatacttacagaaaagtgttcctatttctggatgcctgccttagctgttgtccagacattctttttttcttcttctttttaaataagagctgagaaaataaagggtgaccacacagtgagagggtcctgccctaaatctaaggctggggtgaatgtctcagtcaagccggcgacttccatcttccccgctggccagcagcctgtgatcaagtccacactgaacaggccctttgcccagagggcctcttgatctttattgatctttggaattcttcaggaaccgggttggcgaatgcagttgccaggtgtcactgatgctacagaacagctctgccagagcccttccacggtgagtgcccccaggagctgcccctccaggccatgcccccatccccaccttcctcctggccccggcagctccagcccagcagccctagattgtttgtgtcctgcagctgaggctgccaaagccagaagggagagcctggaaggggaatgagggagggagagcaggggaaggagggggtgattttttttttttttttttttgcacacacccttataaggctactgaagtcattaccgatgtaataaaccaactaagcaagcgagcgcctctcaccaatgttcccatctataaacacagcctggccggcctcccccatcccctcccgctcccctctaccctcccaccctcagggatttgctctcccctgaagtttctttcttacccagccccttttcctcctgctactttcctttttccctacactggttgcagggggagggagcctgccagctgcgaggacctctgtggtggaggagttggtgctgatggtggtggtagtgaccgctatgggtccctgaggcctggctggccagcaagagggcagggttggctagaggaggaagacggcgaggacgtgcgaggggtgctgaagaggcgcgtggagacgaggcagcacactgaggaggcgatccgccagcaggaggtggagcagctggacttccgagacctcctggggaagaaggtgagtacaaagaccctatcggaagacgacctgaaggagatcccagccgagcagatggatttccgtgccaacctgcagcggcaagtgaagccaaagactgtgtctgaggaagagaggaaggtgcacagcccccagcaggtcgattttcgctctgtcctggccaagaaggggacttccaagacccccgtgcctgagaaggtgccaccgccaaaacctgccaccccggattttcgctcagtgctgggtggcaagaagaaattaccagcagagaatggcagcagcagtgccgagaccctgaatgccaaggcagtggagagttccaagcccctgagcaatgcacagccttcagggcccttgaaacccgtgggcaacgccaagcctgctgagaccctgaagccaatgggcaacgccaagcctgccgagaccctgaagcccatgggcaatgccaagcctgatgagaacctgaaatccgctagcaaagaagaactcaagaaagacgttaagaatgatgtgaactgcaagagaggccatgcagggaccacagataatgaaaagagatcagagagccaggggacagccccagccttcaagcagaagctgcaagatgttcatgtggcagagggcaagaagctgctgctccagtgccaggtgtcttctgaccccccagccaccatcatctggacgctgaacggaaagaccctcaagaccaccaagttcatcatcctctcccaggaaggtaaatgagcatgggggttggggaagaaggggcctctgtaccagggccactcctagctcatggagcgttggtctcgctgacccctgttagcagcccataggtaggctgctaacctggtttagcaggtaggagggcctgctgggtaggagggccgcgtccctgtttcctgctaactcaaggataggtcccggctcaggggccttgggtacatgcaccaaggctggggctaagggctgggatcctggtccttgtggcacatgcccacatctcggcacccatctggcagagccctctcatggcaccgccacctgtggctccccagaggagacctgagcctgagttaattccaagctccggcatggagagggctctgtctacaggcttggaggtgggggacacagaggctggagccagggagaagctctgagtaaagagctgtttagagaagcatcttaggtttggggaacggtgtgcagtgaccagatggcacggagctctgagttggggtcaacaataacttcagtcttgatagcactgtgggtttgaagggatctgtcgggaaacccaaaatcccaaaacagcccctacagcacacactcacgggcagacagagctactcgcttcctaatttggatgagacttttgtttgctggtatttcacattcttggatggtggggagaggaggggggccccaaatccttccatctgtgtggacttttggggtctggagttttcagaggagccagtttatacttggagaagagatgggggtgacacaggagtattttctctggaccctcaatttggtttgaagtgcttttgtaaatcccaagtctgggtgggagctctgaggccggccgacctccacaccccattctggcagccagcggagggataggttgccagcacagaacagagtcctgcctgagctgatgctggtggctccagacagggtagggtacaaagaagctcccaggaagtgacatttcacccttgaggggcagagggcagccacagaagaagccggagtggacaggtcctgtcaaatctgagtcagctgaggtgtcagagtgctcttcctgtgggctgctcccctccctggcccctggcagcaccctccccactccctccctcaccttttatcgtgcctgccttcccctcacaagcagaatggagcatttgaagatcacagaatccctctcagcccccggtaagggtctgtcttccctctacatctgggacagcacacctggagcagctgagtatattgaatctcagcgctgaaagagtgaaggggacactggctggcagagagaaacatgttattttctgctaatgtgttgacgcagtaacttttccatgtggatgtcctcagattggcagggtcctccagaagtcgtctcctccatcccccacctctgctggctcagcccccctcccctgaggcatgggggattattgggctggggtgagacttcagaggagcagacgccacaacctgtcctgccgcccctgtggggctctcccacttggaaagtccttggtaaaactgattggaaaccctgactgggaacatttcccaggtcaccctacggtgatctctccaggcaggatgcagggtggcatccaccatcctcaggacaaggttggggctgtcccctggctctctgatctcttttcattatctgtggtccctgcatggcctctcttgcagttcgcatcattcttaatatctttcttgagttcttctttgctagtggatttcaggttctcatcaggcttggcgctgcccatgggcttcagggtctcagcaggtttggcgttgggaggtctgtggctgctccagcctcagggaaactgaggttaagtcagttgggggcagctgttcttgggcttgcatggggtttaaacccagagccatcaacagccacttacaaacaattcactcaactaagcgatgtaaggcagaccccaggcctggtctcagaaactcttctgagccattagccactgtcttctcgtgccctgagtgcctgcagtatgttttccctgctggtcccttagtggtaaagagcctagagatcctagccactccagcctcccttcccatggaaaccgtcccagagggaacagttcagatccagagcagcagcagaagaaatgatccaaggaaggctgcacacgaaggggagagagagaccaggagaggtggaaagggattccagagagagccccaaatcaaactgtaagacatcttctaaatatttttaaattgtgtttaaagaatagctgacatatgttgaacactatgtgttagacactatcttaggcctcttacacttttcacccatttaatcctcccaacaatgactgtactgtccacctaacagagaagttaagtaccttgccaaatgcaaggtgctgggggtaacagagctgggatttgaactcaggtggctgagttcccgtgcctagaccaccgtgctatatgacctcttagttaattcctattattttatcagggtactggtggcagctgagaatttgtctatcaacagaaaacactaatgactatttactcctcgattttgttaagagttgtccaaaggttgaaacactgatggtgcccctagccttgccaggtttctggtattttccctgcagtggtggaagcagaccttgcaatgggcctgtcttgcttcagtacaggagagtgcgttgtctcaaaaaatcggccccaccttctgtcccttcactcgccaagacttcaagagcccagtgttttgttaaggaaaaaacttatcttaaggcttcatctatcagtcaccatttaagcaggtccctcctcaggcagtagggcattctgagaggtggagggagtcttttctcaatagatgtggaaggagaagacacactcacagtgataaaattgttacagccaagtgctgacaagtgctatgagtgtgtcgggaggagctgctggaagtgggaagagagggagctgagtgctggactttgatctaagccccgaagacaggccagaggggacgggcttccaggcgggggccccgcagcagcagaggcgtcctgctaacagcttgttctgggctggagaggatgacatggccccagtttcatcctatattctgccaaggaattccagtctaaaggcagtagggaatcatgcaagattttgggatgaagaacactgtacatgaagctcagtttaggggttttggtggactctgtgcccaaaagacaaatacagagcctactgaagaggtcgagaggaagatggtgaggcctagactagcgtagtagccacaaccacagtcagggaatgaccagttcaagaagcaaggatagaagtaatggcacctgttgcctggcttggaagggcaggatgggggtgggggtaggtaaagaagatgaaggaatggaagaccactaagtgtgggtgcctgagtggctggggtctcagtggtcgtgtcagtgggaataaggaagccggtggttggaggaggcttctaggggaaggtgagggaatggctccgctggcctcccgtcctgcatccttcacactcagctcagcactggccctgcccccggcttcctgacttggagccctttttgctccactgcactgatccccaccctgtcagctctgctacaaacaagattcacttcctccaggatgccttcctgttgtcacccacctttggccacgagagactcttgcactgtcccctccccatcaacctgtgtatctgcgtgcaccaactgctagtggacgtgctgtttataggtttcaggggacttctctgatgtctgtagcttagatagggctcatagcccacagacccccacccaaacaggattacatcaccccatttagttcaccccctttcgtgctgaggaaagcagaagaggtttgacagccatgggctagagttcaccactagttgatttgtggcaggacacagacacgtggaggtgtccttcctcttcctgtacccctagagctgcagggctgatgggattcagagttaccaccaactgggcctgccctctgcccccaagtcttttcctagcccttccgggacctgcctctgctgaggggtggtgggaggccgatggtcccgtgagctgaggggagctctgtggtggcctgagaagagctttatctttatgctttgtttcctgtctccaggccaggctcctcctcctggcaaaacacttttccgagtctaacaatgaggattcatttttgttgctgttgtgaataggtaattcatttttaattgccttcagggtagaattttgcaaaggctttttaaaaacccatgtaagttcatcctacgaaaaatggatttatgcagcatctactatgagcaaggcattattctaatgccctttgttgtgtgcataatccactcaaagaactctgaattttcttttttcagaaactatatattatctttttcaatagtaagttatatttaactgtttgtgaccttttcttacatagatcctaccagatcacctgctacagaaatatgccttcatccttctcagaatgacaaatatgttttactgtgactgcattccaggcttaggaaaaacagtggtgttagacagggtcactgccctctgagagctggtgtgggagacaggcatgcaggtcagcaatggccttgtgagccgtgctttgacatgggtgagctcagagttgggagcacagaagaggtccgcctaggcctgggggattagggggaacaaggaggacaccatgcctgcaggggtgacctggagatgagtcttactgtctgggcttgccaggtgggctgggtaggctgactgaggcagccctatagcagagcctccaggaagctccctccctccatccacatccccttcctcccctctgcccccaactcagaaaaggagagagctgggggagcttcagacccaggagcgcttactccaccacagccctgaggggctctcccaggcggagctctgcagtgatgctgacctctcccatccccctcatctccctctcagaattccccaccaggctgaggcttctcaaaaaaaaacctctgggaaacagcttttcttctagaggtcaagaatgaactgtcccacaggaaataccagattcttcatctggggtagccaagcctgcaagcctgctaggggggcctccccaagcccatgcacatggccaggggtccaggctctgggcaggttggaaaagctgcctgccccatgccttgccctgggagaggaggcaggggccgggtccacatgcccctctactctctgtgtactgtctttgcagcttgtatcattttgacttaagactcaaggcagctgagggactgaaactgaaagaaaatcaaggatttgaacaggatgtgcgttgggggtgggatatctgttcccaaagccttagccccaccctgacttgagggaaaatttccagatgggattggtctctgctaagcctctgagcccctctagttggggccagaggtcatcttggcatcctcccgcccacccagatgaatggaaagttctctctccaggacatggttatcctcattccccactcctgtgcctcacgattcttactcttatgacagacttcctaaaattccagcctaaatcctctccattacagtttctacaaattctgactcctaactacaaagggaagagaacagagtgaagccttcccgaggtttggggtctgtataagggtataggaagtggggagtggggtgcagatcagccctcttgccccaggtggtttataggatgaaggtttctctgtttaaaacagtaccctggtggcaaggagtaaaggggaatattacacccttccttcctcttccagccttagtgaggttttctgggcagaactgatatccttactctttctaatctccttgtatttgctggtcaaggctgtgcatttgtgtaatggggggcagggacagtagttggtgtccactcagaatgcacccagctcttccctcccaatgccagtggcttgtgggacatgagatgggagctccaggcagcaaagtgcatgtggccctggctctgtcctcctgtgtgacggttgcttccctgacaacaggggcagctttgagcaggatgccctgctatttacttgtttgtgcatctgaaagcaagaataaggaactgctgcccttctgcctggcccagcaggcctctttccacaccctgagggaacctccccaaggggtggcccagaggagaagtaaccagttctgggatgagagagctggcaggggccaggacgagaccctagattcctgtgtgtgcctagctgacacctccttccccaaaccaggccagaagatggtgctgggagtgaaggcaggcccaggggagagtccatggagaagaaaggccatccccacttctctctggggcaaccagaagacccaactccgaagggaggcagccccagagggcccctctgcaggtccagtccccctcattggccgtggttctccagctcagacacctttcctaaaaagtcagctcctgggtgtagtcaccacctcccaacagatcttcccacaggccggtgcccctcctggacaagggctcctagcctcctccacccacttctttgctcaaagcttcaaagctcccttttccagaatgcagtcacagcatcactgctgtaaacaaagtgggacctcctcacctgtcactgttcctaacacaggtctgtaaccctgtgtcggactccttttctctcttggtgacgtccagggggcagggcctgtgtgcatctccttgtattgtattggatggtctccaaaggcagaggctatttctctcccttcttttgcagctttctattatgtccccacaagaggactctttggagtgggggaggaggtatcaggaaggaacgtatttagggatcagttattttggacatgggttataagcagaaagttccctggctttggtgaggagtgggggattggttcccacaaggcctctggcttctgggctcccagaggctgcccgtgcgagtaacactcacctgctgcgctccagatgccagggcaggtactacgaccacacctggttcactccacaattcttcctccccaggctcactctgctccgtctccatcgagaaggcactgcctgaggacagaggcttatacaagtgtgtagccaagaatgacgctggccaggcggagtgctcctgccaagtcaccgtggatggtaggtcgtgcccacccatcgccgccacccatacacaggggtcccatttctcagcccctcccttccttaccataccttgcctgtcagacagaactgcctccaacactgccctccctacccaaaggcattcattttggatgaatgaatatcttttgccaaaagaaaaagagacaggaaggaaagtggcagctctacttgatcacctacatggcttcacccctcccctggctgtcctgtccccctcccagtcctgatccccacacccagaaccttctgagctgggaagctggggcactgggcagtagaaaagacacacccacaggaaaatgactacagagtattttacaaaagccacaacaaacaagtgtccgagctggcaggacgacccagcagggtcagccgtgaggaggagggagcagagcgaggtccgtgtgggagacttcctagaggaggtgagtcggggctgagtctctggacagagaggacagggcagcctctgccaaaacaaaatggtagtagtaataataatactgcagagggaggtgggaggacacatcggggagaaagcaggcctgccaggtcttagcggagtttctgtgttaggaagaggcagtgccaagctgcgaggaactgggctttgtcctaaggaaatgcaggaagtgcattcatgactcttttttctctccttcctggggagtatagaattggaacctgagaagtaggatgaacctcgtgatgatttagatgaacaccctcattttacagataagaaactgagggcatccagagaggaaatgcattttggaggggggctctctggcccatttagggccaagctggggccagaaccccatcccaggactcacaacccaggatcatttctttgtatttggcacttacctggaaatgtctcaaaaggtagttttggggaaatagtttcttgcccttgaaatgtctggttaataaccatcagagacacatcaaaaactagtgtccaaataaggcatcttgaagcccagcttggttgttcttctccctcctgtgtgtgatcagttgagttctgaagtcctagcccgtctcactgccattccacaccatgtagagcccgtgtcctcattctggactttacaattggtttcctgatcacagagctgagctctatggaacatgatgaatgggagagaggtggaaaagaaagtcttttttataaaaacacaatggcagcacgaattaattgttaatagccgaaaggtaagctgaactcatctaatactgtgtacttctccttggagatcgtgcgtatatgtgctataggggctctgagtctaaggaagcggacttgatgtgtccaagtttatgctcaattcagagggggcatgggacacattttgaggttctgcacagtggatgctgtggctgatgactcctgtgtgggagtctctcctcacccaggctgtcacccacccagatcacagtcctgcttctttctatacaggtgctgcactgtaaagtatagcgtttctgaaaacatgatccttgaagcccacgtctaacacccctctgctcgtttgggactcacactggttcccgagctagtgaaggaggttatcggctttcggagcctctttaggtcctgtttacatggctagctgaaggcaggagagcaattcattctccctatctgtaaaatgtcagcaccttttctagatttgttttcaagatgaaatttccttttcccctactgaatacacttggggattttttttttaaggtttggggaattcattctgcaacttaaaaggctttgtttgcccagagtctgctggcagattcccttgtcctctccactaatcttgatgaccatcattatttatccctaattccttcaaatgcagagttaggcctccagctgcaaattgggagctgggtcttggaagaagagctagaaaagtgataggagggagcccagctgagataacaggactgactctcagtccattgggtttggttttgttgacagaaaggataagggtggcctcttccccctgcttttctttccctgttgctatacttacagatatattagcatcctgtttgcccacatttagctttattttttcatcaagagcctctctaggaaagtagtaaaggactgttgtcactttgacagctcccctgtcgcctttctatcgtctggtgctccaccccactggctaggctacatctcctgccctcattctgtcccctcatcccctcagctctccctactccccaaggcatcatacttgacttggggatcccagtgggtttgtgcctcccctgaaattacaggcaaaatgttgcattatgtgggttggagcatctttctgaagagaggggtccatagtttttagtcaaattctcaaaaggagtcatgaatcagaatacgttgaagaactacttgccgtaagcagcaacaatgactgaattttcaagcccagccattgtgtgggctcttccagcctgtctccagctgcaactgcccacccaacctctgcatagaaccaggccttcatccctcttatggggcaatgaggtccatctccactaggcgatgggactacagctggtgctgacttcagactggcttccccagccactcagcagggctggcctggcccctgaaagtcgctatcattcactcatcctgtgccaaacaccatcgagaccatacatctgaggccaacatatctttcaaaatctcataaaaatgaggcaaatggggctaaaatagcattacccacactactgattccctcatatcataaagataagggatgtaacctttataacacagcacagctggctattttaatcatgtgtttgggtctttttcctaagaaaaggggtgtttatgaacttgcttgattatggtcatatcacccttccttctgaactcagcagaagacaagggttaacttgtgccacatagaagggagctaaaacctagagtaaacgtggacttgcccgaaaactcacccaggaggagaacaagctgaccttcaatgcctgtcctggccagagactcttgtgcactttgcattttcagtctatgcaacagttgggcagggtgtctttctcagtgagcaaactgaggctcaccaagggtcagctgccttccaggccccacagacagtaggtgtagatctggtgttggggctccaccctgcacagtgaattacaacatgaaatatcctggcaggactcagtggtctggctctgaaacctgttcctttccacagcctgacacagcctccccgggcagtgaattaccatggtggggcccgctcccagagtgatccagacctccctgagtaacagtcctccctgtggggaggtccttctgcacgtgggactcagtaacccctttcctctcattccaacccagatgagcagtgaggaaactaagtccttcctaggccagaatcccatgagaggactcaaaaaacaccttagcccctcactggctcatccagtcattctcaactcaggcctcctgtccccagccaccctggccagggcatccagcttttggtaccagtgagaccagggctttgtgaccacagagggtcatgcatgattgtgatgggaagggacactccagtgggtactcatgccatcactcagtcattcaactaatatctgagtgcccactctgtgccaggcactgccataggagctggttttaaaacagtaaatgaagtaggaaaagttccagcttttgggacttttctagtgggaaagaggcagtaatgcaggtgaacagctgtgtcatatcctcaggtaatgtcaccagctatgaagaaagcaaagcagggtaatgggggagagaataccatttttggagggggtggtcactgaggcccctctgaggaaggaacatttgaacagagactgaaggaagcagggaaggaagagggacaaggtgacaacaagagcatagccctgagctgaggacactgtgcttaaggcgtttcaggaggcaggaggccagggtggtggagccatgagcaaggggcaggatggtaggaagtgaggttgaggaggaccgtggaccagatccaggcagtgttggctaggacaaaaaaaatgagattttattctaagtgttatgggccaacactggacatttatgaaggatcactcatgtccatgtgatgaccagacccaggatgagtcagagggaaagcagggagcacaatggggggttgccacaatagggacaggaagtgatcagattcataacctctttggctgtagagctgatatgagttgctggtgagctgggtatggagagagagagaagttaaagatgactcagttttcatgggggagtgaagaccaatggtggggctggggggcacgatcaagagtttagtgcatgtgaagtttaagattgctatttgacctctcaagcggtcctgtcacataggcaggtgtttaggtgaacctggagttgagggggaggtcagagttggaggtgggatacagggagccatccacacacagaggccattcactgccctggggttgaatgaggtccctggagagtacagaggtggctataagaagagggagagagagagaggcaggggcaggacaggggcctgcgaagaagactaagaaggaagtactccagtgagatgggaagaaacccaggagatgggggtgtcccagaaaccaaatgctaagaacttcaaaaaggaaggaatgatcaagattagtgtgccaggccaggtgtggtggctcacacctgtaataccaacactttgagaagcaggtgaattgcttgagccaggagttcaatatcagcctgggctacatggtgaaaccctgtctctacaaaaaatacaaaagttgcctggatgctgtggggcatgcctgtagtcccagctactcaggaggatgagccaggaggacagcttgagcatgggaggttgaggctacagtgagccaagattgtaccacggtactccagcctgtgggacagagggagaccctgtcaaaaaaaaagaagaaaggaagaaaaggaagaaagggaaggaaggaaggagggaaggaaggaaaggaaggaaggaatgaaggtaggaaggaaggaaggaaggaagaaaggaaggaaggaagggtcaggtgctgctgccaaataaagatgagcctgagcactggctattgggtttgccaacattgaggtcattggtgaccttgcaagagggcttcaggggagtgatagtaacaatagcctcatctcaggcaaacagagactgagtcacctgctcaaggtcaccctaactagcagagtgggaagttaaacccaagccttggtgcctaaccactgtgatccactgttatcttggcccctgggcacttctgattattgctgagctgattttgatccacccctcctttcttggcctcagccctgccatattactaagtctgctcccacccccacatttatttatttatttattttgagacagagtttcactctttttgcccaggctggagtgcagtggcatgatctcggctcactgcaacctctgtctcctggattcaagccattctgctgcctcagcctcccaagtagctgaggttacaggcacccgccaacacgcccagctaatttttgtatttttagtagagaaggggtttcaccatgttggccagtctggtctcaaactcctgacctcaggtgatccacccgcctcagcctcccaaagtgctgggattacaggcgtgagctaccgcgcctggcccacatttattctttaaatcatcacagacaactaacgggtattatgtgaaactaaataaaattgctgtttttgtaggtcaaaaacacttcaatactggcgaatggtgtagttcaacctgatctgagcatacaaagtacttagcaccgtgcatacatggagtcaatacccagtaaatgtcagccatcaccttacgacttggccacacctccctcactcttctattgaggtgatgttatttcggttttccttgtgaggaagctcagactcagaaaagttcaggaacttgcccagggactcacaactcctaagcagcagagccagaaagcgcaagcatcctgatctctcttccttactacgctagcacactgcttgcactcagtcagagagagaggccagcaaggagggatgagccaacccagggagaggctggagcccagcccctctgccctgccccactgggggcccctagaagctggacccctcccagaagcttcccaagacctcatgccccctgcgtggggtcagagttcagggaaccagcctcttgggggagattaaaaaaaaaaaaacgctgcccagagagcttgagtccagagcccaggagtgggaggggtgaggcattgtctatataaggacacattttcctctcaatgtagaggccccccacttcctcacacctccatcttcctcccccacacttctttggggacacaagcaaaggacttcagccttgggggcctagatctagaaatggagtttaatttcatcacaaaatgattaaaatagaaaatacaagctgctcttaaacttatattactattatttttatcccctgggcagccatgtgagcacaaagctggttttgattaggcacatggcccttcgagcccactccttgctgcagttcgcatggaggtctgctggctccgcatccctggcagggccccgtggtgcatgcacagccccaccgtgctgacacttcaagtggagcgcggccaccccctggggctccgagtctggggtgtgcctagtttgaaagggggacttcagcccctttcctcatggccagatggaaagataaagtgctgcagaaacttctaaaaataagactcaaagcacattacagggtagtgtactgacacgtccagtgaaaacccagcaccctagggccgaggacggaggcagaggcagatggggcagggcagggagtgttttctgaaggtggaaaattttaaagctgattcagaaggaggtaagggaatgtggctatcaagaggaattaattcataagtgatcattttcattttctttttttttttttttttttcattttttggagacagggtctcactctgtcatccatgctggagttaagtggcatgatcactgcagcggcacgatcattgcagcctcaagctctgtgggctcaggtgatcctcccacctcagcctccaaagcagctgggactacaagcacatgccacagtgcctggctaatttttgtaaattttgtagagacggggtttcaccatgttgcccacgctggtcttgaacttctgggtccaagtgatccaactgccttggcctcccaaagtcctgggattacaggcgtgagccaccacgctgggctgataaatgatcatttcctgctttccaaaacaccgttgcatgtgttctctcctttgggcgtcaaaacaccatgaggtagagaaaataagtgattcccttgtacagatgtggaaacagagatgggacagtttaaattatttgcccaagttcccaaggttgctgatgacaaagccaaagctagagctgtactctcttggcctctactgtggtgatgcttggaagtaaagcccaacacaaccccatgaggacgaaaggagtctcagtacctgctgcccttctttcaggagcccaggaaaactgggcctctcatactttgctttcttgtgcctcagcttactcatcagttaaaaaagcaaacctgatccttcttcttctccctcctctatgctccaagactcaccaggagaatgagtgctgaagccaaggagtgcagaactgcatacatagtctgccctgtactcctcttccttaagaagggccgggtgccgtggctcacgccagtaatcccagtactttgggaggctgacgcaggcagatcacctgaggccaggaattcaagaccagcctggccaacatggcgaaaccccatctctactgaaaatacgaaaaattagtcaggcgtgtactcaggaggctactcaggaggctgaggcatgagaatcacttgaacctgggaggcagaggttgcagtgagccgagatcatgtcactgcagtccagcctgggtgacagagtgagattccatttcaaaaaaaaaaaggggccaaacaaaacaattactgggtacacctttctttacattgtcattggtgactgttagaaatgctggtcttcaaggaagggaagaagggagaggcccggacaagggaagcttagactgactccatgcccctggtttatggcaccctcatccccagatatcaaggggaggctctgctaggtttttctgcctcttggaatagtcctggagccactccctgcgcactccctgtgcttgaggagagacgaggagttttctgttggccaaatatcagtcatccatggagcttctggatcatatcgtgcccagaccccaacccagaccaatgaaaccaggacctgtggggtgtgataccctggcacacgtgcttctaacatacagctgaggctgagatccaccgaggctgacaaataactatgtccagaggatttttctgtagctgagaatgaccacgatccttggggaaaatgtccagtgtaagaaaatgaaatcatccctgccccatggctttctgcttctctgtgtcctcatggaactggcatgctgggttacaggcagcctcctgaggagcttaagagtgtccactccagatagcagggacccctgatgtgccatctggggctcctttgcccgtatgggaggtggcaggagttcagcttgcagtggggagtggaggcaagggagcgttttggtgtcaagtgctacttgaaagggttgctttggctgtctgctccccccaacaccccgtcacatactgctaagtagtcctacttaaggcccacaatggtgcatgcagggctttcggctgtctttggtgggggattgcccccacagcccccggaggcctgtctgcttctgagctgccatgagcctgcaacacccgcacagggcctcctccctggattacccatagcagagaggaggcaggcactaggttgggaagaaagcctatcggggtgatgatgagcagagggactcatgcaggcagatccatgttctggagaaggcgaggggcctaaatgcctcccagaaggagaaatgcatccagaggcagctcagagtccacttgctgggagaagtatgttcccagcccccagttctgctccctgcgcccacccctcagagccccaggagcccagtctaggcaagatcagccctgactgccagtcctggaggcggaccatgagagggcacttcctccccagccaagcctcaggaatgtggcggagcctctgctggaaagtccccccacccacccccacccccacttagcttcctctcctcaggagcaggaaaaggatgcccagggagggggcttcaagggggagactctctcagcgccgtccccaaagagtgctccttgtggggaaaggaaggccagtgaaagtgctggggcccagtgatagccactcaaccagctcctccttatcccagttcctggatggtttccccatagtgtcctgggggccagtgagggcctttccacccagcccagcccagcccagccaagtgatgtcgccctgcttgccctccatgaggaagggtttcctctggcagagggagtgtggaacagagcctgagggcaggcaccgcccagcatctttaggtccgcccagcaggcagctgtgcccagcttcactgggcctgttgggggaggtctagcagaagccccacagtggggcctagaccccgtctcagaggtgggaggcatgctggctgtgtgctcagaggcctccgtttggtttgtcactgcaaagtttggtctgcagaagaaagtcagagaaatcagaagctgtgcgccacctctagtccatgatcccaagggcggggaccctgtcccctcccgcccctgttggagaggagacccaagatttctagcatgagggagacaaggcctgatggaggagaaagccagggaaggtgagcaaggggtgactctgccagcaatggcattccgggggagcatcccaagctccctgggcagcctgtgcgctcatcttgccaaggtgacggtgctgtccccactggattaatcaggcccagggtagtggacggtccttctttgatgctctcatggagagtgaaataggttgcctggacacaggcgctgttctgcccagcgggcacaaagggccctcagagttggggaggagtttggctgaggtgggattttgactgagagaccccctttgctcatttcctcagcagctgctaacatttattgttacctgtttcattccagatgctccagccagtgagaacaccaaggccccagagatgaaatcccggaggcccaagagctctcttcctcccgtgctaggaactgagagtgagtactcgcccagcttcaccaggcagaggcagaggcaggggcaggcaccccggggactgagggcagcctcagagcccccactttctggtcactcactcttgcctgaatccctggaagtctgatgtctgcccacaccctgaagtgcccagtgaactcccaataacagagccagtggccttttctcaccccatcccagtgctctctccagcctgtctccagcctgggtggtgttgcacatctcatctgagctcctatctacctcccctgcccaacctccttcatgccctttcacttcccaccaagactctaggagagctcctcctaatttctccccagttgatcctgccctcccaggggctctttctggattgtaactctgatctcatcactcctggttgaaatatgcagtggcccccagagcctgcaaaacccacaagcaaagctccacatgttagtgccgaggacatacctagctcgcatgtgcacacgtggtcccacatgtggcctgccccccgcctgtctttcccggtgctgcccccagctcctttacttctattttatactcaggccaaactgagctcttcactgcacactacacagcccccaagttccttccttcatgccttctctggcacctctctccatgggacacctttctgccaaactcctctgaaaagtctctcatccctgagttcttcctcacctcagctcccacagtgtcagcacctggctcctccactacctccttcccaatgtcacggagatgtgtctgggtctcatcctccctcctccattgtacagggtctgttcaagcaattacctttcagaatgacacatgctgcgccttgctcgtggaaggcccttcccagtttctcttagagtcaaatcgcagtgtggtataaaaagccaagagagaaaggagcctctccgtgaccataggcagctacctccctctttttggatctcagcttccccgtagcccacacatccattaggcaccatgcgtagggtccacagtgcttttacaggcctgccaaatgctgtaatatcttataaaattagaagaaaaaagggaactcttaagtcaaagaaaaggttttaattcatgacatgaatatattcatctttatacccatgcagttaaaagtgtagtttacataattcaaatataatacttgatatgtaattaaatctatttacttttttttggtggaggagggggctataaaggcagaagtgcctcagaagtcacaatgtcaccctggcttcccttataatttttaatctaactttgacagcagaactaccctttgaaaactacaatttcaacagagggtgcagagttgcttgaacatccccagcacatgctgtgttttaaaacaaacaaacaaaaaacaagatgagctcctaattgcccgtactgataggggaaaataattgagccgggttaactcagactacaatctttttccattacaatgcagtgttttgtgactttattttattcttaccttcctaatgatgaacttgggttcctcaaacataccccagccaggctgttgggggaactcagccttcagtatgttggggcagagaaattggaattaatttctcattgatacttaaccaaggtagatagcctgagaatatcaagaatggacatttaataagttgttggaaatgcatacataataccaagaaaaatctggtgagaatgggttaataattttatcttccaaaaatattccttggacctgtgctatacttggtatggaaaaccgtgagcagaagagatagagaatgtaggaagggcaccaggggctgtgaattggggctatggcatggctgtccccgactcctgggtgcagaagctacagggcaggtattgatctggtgggcagcctccagccctcagctccagcacacccactccagtgagcccctgaggaggtgagatggggtcagagccgagctgtggaggaggaaaacaagcttgagatgatgagcagagcaggagctgggctctctgccctgagaacagaaggctgtggaaaccccatgcaagctgtcactgtccgagtctggagcagcagctcgcacccctggctgtgtgttatattcacctggggagcatttaaaccactgccgcacaggcttcccctgcccccagaccaattacatcagaatctcaggggtgggtgccaggcctcagtatttgttcaagctccaggtcacgtcatgtgcagtcaagctggaaaccagctgttccagggagaaacctggtgcccacactgtgggtcttgagaagcagaagggggtctcccctgctgcctctgttaagtgtggaactgcctcggggaccctcacatcaacatccttagggtatcatgttgcccagagagccgaacaaggcaccttgtggtggagaagctggaagcagggaatgaagctcagtctgagttagtgggggagcagcaggctagtagcaagtgcttcatctttacagaaaacacacattcatgactggattaactccagtagaccccacttggatttcactctgtgtgcagagcccccatgttggaatttcagacatcttgctcctgaaagaatgggagtgtgtgtctctacacactccaaagtcatggccactttgtacccttttgctggcccaccctccaatctctgttactccaaacctgctaccccaacactgagagcggtgccaggctggctctagctgccctccacctgcttgcacccctgcactcttgtccttcagaagcctgtaccctgggggcctgagagataccctgggatttgtttctggagcctcctgagaagctcctgagaaggcagctgcccagagatgggaagtgaaggagatgtcttgttttgtttttttttttttttttgagacagagtctcgctctgtcaccaggctggagtgcagtggcgcgatctccgctcactacaacctccgcctcctggtttcaagcgattctcctgcctcagcctgcctagtagctgggactacagctgcgcaccaccacgcccaactaatttttgtatttttagtagagatggggtttcgccatgtgggccaggatggtctcgatctcttgacctcgtgatccgcccgcctcagcctcccaaagtgctgggattacaggcgtgagccaccgcgcccggccgaagatgtcttttagatttgcacccattcttttctccctttggaggataattgttagtttattgattatatacattatatatgcacacattcttatttaaccattttaaacaatatagaaatatactatgtacaacatgaaagtcctctttcatctcaccccaattctactcacgccccaaaaatactcagtgacttttttctatgcatttttatatacaggcacaagtacatcaattggatttttgtcccacagagatggaattgcacagtctgtatacctctgcaacttgcctttttttcttagctttgccatccccagtcccagacacctctgattccatgagtgatctggctgtgtgtgtgtgtgtgtttgtgtgtgtgttcctctgtgtcaagggctgagaagtacctagtctaagagggaaatccatctttcctgaggtgagcctgagtgattttttcatcaaatagatcatgaccagttccctcttctgcacacccccctccctgctgagcactgacaagcatgagggaaaagccaagggcatccaccccaacccaagcaaggacggggtgagagaaagcggacagaagtacaagttaaccggccagacactgactcacaagtgcaggagggaggtgggagcagcttgggaagatttcgggatgaggaaaacggggtcaggttatggaggaggagaggaatgtggtttatgtggtttggctggagagaaaatgataacatcagttggggagaaggcagacagggaggagccacacagatgctggagtgaagattgtgagggcacctgtctcaggacagctgcaggctgaacaaaatcagagtctaccgagtgcctgtgcactgggagcaccttaggagctcgatctatgtcacttcagccgagtctcactcaactgcgctataaatagctgttcccattttagggatgaacaaaacagagcctcagagaactaaactgccctgtccagggtctcacagctagtaagatgtggaactgtggtgccaaccctgacctgcattctggccactacaccctggcctggctgcagtctcaggatgtactctgtgtgtgtgtgtgtgtatatatatatatatatatatatatatatatatattcatttatttattcatttagatagagataggtacctaccattttaggccaaattggagatatcatgcccttgaattctaactatgctgttgtcctaagaacataactacaatgcaattattgaaatcaaaatcaaagagtaaatttgacattgaaccaatactgttgtctaattgattcatagtctacatttattgtcaattgttctaataatgttctttgtggctatctttttctcctgttgatgaatatttaataataacactcctaaaacacttcgtgcactcctccagcccagagtgggtcctctcctccctttggagatggaacaggaaagaagttcacaggcccaggggagaaacaccccacactcttccacctaagctgagtagggcatggggagacagaaatactcctgtcggactccaggtgccaacttactatgatcagttctggggcagcactcaggcacaagacacagcaagaaagccaatgagcaggagacgaaggtcttggttctcccagtagttaaatatgtggccttggtcaaagcccttcattcctctggacttgggcttccttgccagtcagatggggagtttctccagctgacctcaggcctttcccaactctgacatcagcatcagcccgttggatggaaagcttttgagtgacacagttcagttgagattaataactctccttcatatcatctgaagtgtgaaggagtccaaagctacagcaagtatagtttaggtcacacagcagcaaaagtgtcctgagggaaagaggccttaagcatacaggtttaggggagtcccagctggagggggcccaaatggccaggggagttcttgggaattttgcgtgaggggagacaagcatgctggctgtgtaaaggaggcattgatggggcttaagaagtggccttaggaaatgcacatgaggtgatgccagtttgataccagactctgggagttcctcctagcagtctatataagctgatggtctttcagaagagatataaacggacatccatgtggggcttttacaccttgaagacagaaaccaggtcctgtccatctccaaaacttcattagctggtctctcagtaggtttataataaatatttgatttttcaaaccagttcataagttcccatgctccaagggtccctgcctccactgtggttctgccactggggatgatgccaatggaacatccctttgcagtccatgcctggccttggcctgagcttcacctctgacatcagtcactttggaacatcccagattatgagactctcagatatctttgcctagacctcccatatgtgtctgcctctaaaatggaaagttgtgtcaatttgaaagcatctctggatattaaaaactgtcccttttccatgcaagatttccccaggatcaaatcttttttttaaacattcctcctcaggtcatgaggaatgttcaatcctgatgggattcaaaaggctggaagagaggttgggatttggcatcaagacttgcctgacagtgaaagatgtggggccctgggagagaggctgggctatttccatgaatgtttctgaaagctggcaccaactcccagttactcccaaccaaaatgtgggtctgggaggaggaatagtgcctacctggcacactcccacccacaggcatgtgaccctatgacttccacccactactcctcccaactcacccagtgtctcccataagccagtgaactggccagaggggagacctggaaggtacccaccaagcaatgctggcacccctggcccagcacacctctttcacaaccatcctgatgctctgtgtcctgggggtttgggaatggatgtaatcagaggagcagtgtttctttgcaatctccttatgtgacagcccttgctttgaggaaggtgagcaagaaatttgcccagagatgttaattctgggaaaatgaccaatattcctccacgtatctgtaagcatgtactggatgagaccagcgtatacagtaggggagtgggtcaggtcacccagggccagtgtggtaggactcagccttccatcctcaggtacccccacctccttcctgctccgatacagcctcatggggtgggtgctcactccatgctcaacccagctggagtccttttcaggagcctttggcagaaagttcatgctgattttgggaattttgaaggatttgatgtctatttttaactacctacctaaaaagggaaatgtccccagagaggcagacatccagggacctccctgtacccaaggctggtaaggctagttccctaattctcctttgctttccattatctcagaccttttgactccgtgagacccaccttcaggctctgcacctatcttgcaaatgtttactctggtctctctgccctgctgattttccatgtttcagagcgaggcattcaggtgccttcagactgagcatctggaaacttctgtgggttactgacctccttttttttccccaggactaggttagggcttgggtcagctggaacagattacctgaacaattaggaggctggcctccccacccctgccccaggtttcccaggaggcttccagatccaatgctttgattcatgtttttattgggctatttcacttcctctaatatcaatctcctatctagagtggaaggctcagcacctggcagctttgatcccagaggggacagcagagactgatccttttcatagaaagttatataaaaattcaagccccagggctatatttctcagcatcagtgcccagggctgggggagaatgttccttgggaattcccgggttaacagaaatccttgagggtttcactcattcctttaatggccatttatcaggcatgtgccaggtactatgctaggcactgcagatacagaaggtagaccctatccttgtccccagaagcttgccgtggtgtgtccatgttggggacaggtttctgaaatagcggtgcctgatgaatgctgtgatggagctacctcagagggccatgaaccccgtggggcattagtggtgcatgagctggggcgacctgcccaaagaatatgcaagagccatccaagagaagagggcccagcatgtgcaaaggagcgaaggcaagagcctggtgttgcagaaactgaaagacattccatgtagattacagagcagtacttcccaaaggaaggtgcagggaccagcagcagtagcagcaccagcacctggaagccaagaatctatgtttttattaagtcttccaggcaatcataatgtaggctaaattttgagaaccactgatattgagtattgaggttgtgatgaaagttgttccctcttgggaaagcaagcaagaaagttggggatgaaagccagggacagagctcaaagacctcgtaagatgagttgaatttgatcctgagtggcaatgggcagccactgaacaggttcaggcagtgaagtgacatcatatttgcatttgagaaagatcactttggccacagagtgacaaatgtgacgggggacaggggaccagaagcctaggaggtgatgcagttgggactacaatgctgatggtgggaaggtagaaattggcagactgaggaggtacttagttggtgtagacaacaggcatttgtcagtggatatgggcagggagggggccttgggagaaatggggacagggagcaggtttggggaaaaggtcttggatttggttttgcacgtttggctggcagtacgtgtttggcatctccctgggagatgatggtcaggtagttggatgtattggtatgggctcaggagagaggtctggcttcaggggaaatggaggaaagagaataggggatagaaagaggagctcaaagggcagcgatgagcacagtaccccggggcagtgctctaccaggaaggatgtgctgcctgggctgactgcctaaaggaggtggctgagcccctcttcagaggagcagcctgagtagggcgtgctctgccctccctgcctgtcccatggccagcagccatcatggagtttgcaaaggtggatgggttttattttccttctaggatgttcctctctgactggctggtacacaaagtttagggtgtcagagaagaggatgagagacacagggctgacaggaataataagataataagagtgactccagaggagaggaaactagttagtgagccagggagtactgtgagtttgtttgggcatctggacctgcagaatgtcccctcttctgaggacctggactggggagaagaagcacaggtgccacatgagagctctcaggttagtgtaaggctgaactgaccaacagggtaccacatagatgaaagggccaaacttgtcccaaaggacagagaagtcctctggggatctgtttgtttcagagagcgggggagtggggggaggggctgatgttagaacatgcactgaggctgagcatggtggctcacgtctgtaatcccagcactttgggaggccaaagtgggagctcacttgagctcaggagtttgagaccagcctgcgcaacatagtgagtctctacaaaaaattagctgagtgggtgctgagatgaggatcactttagcccagcaggtcgaggctacagtgagctgtgatcatgccactgtactcatcttggatgacacagcaaggccttgtgtcaaaaaaaaaaaaaaaaaaaagaaaagaaaaaaagaacatgctgcactatatgctatacttcccttacaatgtagcttaactctttacaacaaattttatttattccataccctgggtggcaggaggctcagatcccatttccagctccagaacatcaggttttatgaacctagcaagtcaccagacttttatgagatgccatctcctttttcataaaatggaaacattatgatactccctgctgtgtttgattgggatgagaaccaagtgaaatgctccctctgagaaaccgggttttagaaccaggtgctttcccctataagcccagcacacaattagtggatttcagcagatggtcatataaaatatgtatagaataggatataaaacattgttaacgcttaaattgtttttactgataggaaccaagccagtttcaaatgctaaccaattcaaacaatggtagctccaaatttacagaacaaacataaaaatttgaccttcaatcctatttaaccatgacactgaaagattagttagggcttctcttccagtcaaatgggtttacccagagccaccaagtatggggcaggactttggagtcccctgatttcatgctgtgctcctagctcatcaccccagggattgtcagcctccttctcacacctggtgcccaccccactggtgcccaccccactaatgatgcccatccacagctatattagtcttctagggctgacttaacaaagtacggcagactgggtagcttaaccacagaaattgattctcacagctctggaggctagaagtccaagatcgaggtttctgcttgaaaatggcagtctttcccctgtgtcctcacatgttcttttctctgtgtgtgcatttgtctggtctctctcgctctcctccctccttctcccttcctccctctttctctctcgctcctttctctctctctctctctctctctcctccccctgcccctgtctctcttcttcctaatctcttcttataaggacaccaaattggactatggcccaccctaatggcctcgttttaatttaattacctctttgaaggccctatttctaaatacggtcacattctgaggtaccaagggttagagcttcaacatgtgaatttggggagacacagttcagcccatgacaacagccctccacgtagctcctctgaacagatggcctcctctctccagagatcatatctgggctccggtagaagccctctcttcttccctggagagcttctctcttcccaacagtcctggacaaagaggggcagggcctttgtggctcagccagtcacaggcgtcccatatcccatctggtctcccccaccaaaggatttggctccccgtgctcttccctctagtgtctttgggctctctctctccactgtgccctagccattgccttccaccttgtcatcttctctcttctctcacctcagaagaaacctgagcttcatattccctcttgtttccttgcttctctttgtcctttcacctccaggatccttgactattttactccccactgtttgctcaagaatctcctctggggtgactttggaccatgctgtcccatggaacctggcctctccagcatcaccgtctctcactccatgctgggcacacctggtgctcttcccagcatctgtcctctacccttgcttgtggcgacactcctcctgctctcagggtccttccacagccctctcctgtgtctcggcttctttactgtggacacacctgggatcaaaccctggcctccgcccctctttcattgcattctctttccccaaagaattgacccatcttcaaggtttccattctaatggcttctttaattctggaatctttcacttccagtctccacaaacttccctctggaattctgatcctgggcttctaacctacaaacagattcaagctgaaatattaatcttgtactcctaattctatattccttcaatatgactttccacgtgtatctatgcaagaaatctcaaagtaatctgtgtacctccttcttgtttagccccttaaattattttaactttcctctgcctctcatttgcatcttcttttctgcatggatcttgatcagtgccttccaaggtatggcaatagcctcctaattggatctgtcccgcaagagctggaaagacctatcagggacctctagcccagcctgactgctgtttgagtgaggacatgctgttcaatcaggacaaagccttagctcgtgagcttagcatttgaggccagcactgtctaacagaaccctctgtgatgaaagaaatgtcctacgtcaacacaatgtgatagctactaaccacctatggctattgagaacctgaaatgtgactagtgcaaccaaggaatcaaatttttaattttctttcttttttttctgagataaggtctctctctgtcacccaggctggagtgtagtggcaaaatcatagctactgtaacctcgaactcctgggctcaagcaatccctcccaagtaactgagactacagacaggcaccaccatacctggctgtttttattattttttacagagacagggtcttgccgtgttgcccaggttagtctcgaactcctggcctcaagtgatcttgccacctctgcctcccaaagcgctgggattacaggctgagccactatgcctcaccttaattttatttaatttagagtgcccactatcctcataccactgctgtccaatatcagccctgtgctctgccagcctccaccaaacatcaccctgattctcacctctgagccactgtctattcctgacctgtgggttctcctctttctccagttcagaccttccctagccttcaggtccatcttacatcctgtcttttagccttctaactaaccatctcctccaccaacagtgttccttttccattcaaacagccacatcacgttgactgaataacatctttttttataactttctatttaacttttatcttgaaataatttgagactcacagaaaaaattgtaaaaatagcatgaaaaattattgtatatacccttcatctagattcctcaaaggttaacattttactatgtttgcttttttttttttttttttttttgagatggagtctcgctctgtcacccaggctggagtgcggtggcacgatctcagctcattgcagcctctacctcctgggttcatgcaattcttctgcctcagccgcctgagtagctgggattacaggcgcacaccaccacacctggctaatttttctatttttcgtagagatggggttttgccatgttggtcaggctggtctcaaacttccgacttctggtgatccacccgcctcagcctcccaaagtgctgggattacaggtgtgagccaatgcacctggccttgctttttcatatattctttctctccctctctttttccatttctctgttccttctacttctccacacatatatacatgtatatatacacacacatatatatgtatataccatgaacagtttgaaagttgcacacaggataccctctacacctaaatacttcagtgtgtatttcctaaaaacaagaacaatctcttataaagccacagtttgatgatcaaaacatgaaattaacactaatccaatactatcctctaatttattgaccttattcagatgttgccagttatcctataaatgtcctttatggcaaaagaaaaaaaaaaaaaagcctttcctctttcctgtggaccacgtcttgatatttaagaccttgaggcctgatttcttacattgtttggtttcctcctcagtacccaggttagtcgtgtgtactgactagcatttgcctggcacacagtaggccctgagtaactttttggagatggacggatggatcaatgatgacaatgagccagagggaacctggtggaagccctcatcctgggcttaaccacacagccggcagccatcagctcggtgatctcagtgtgcccctgccagggatcactgcctcacgcagtcctcctggggcattcactgggcagcagcacgtgtcctgtcgtggaaatgcacaagttccacaagttactaatttgcctgtggtcacagggcaacccatatccaagccaatgacaccgcttccccttcatctgcagaggtgaagttatctggatgaataattgttaatattagcccactcattcattcaacaaatcgttattgtgtgccaggcccattgatatacagcagtgaaccaaaaaagtccctggcctcaaaaagctcacagtttaggaggaggagaagggcagacagtaaataaataagtgaagatatagtttttcacatggtgataagtgctatggggtgggaggaccataaagcgagatgagaaggatgaggggtgctgggggcagggctgctgtttgtatggggtggttagggaagatctcactggtgaagtggcttttcctcattttttatgttaaggtataatttccctgcagtgaacttcaccctctttggtgcacagttccgtgagtcttgataaattaatgtcatcatggactcccagcatggtcaagatctggttctgtcaccacagaacatttccctgtgcccctttgcagcccacccctcccccaccctacctctggcaaccattcattaatctgttctccattcctatagttctgccttttctagaatgtcgtataaatggaatcatacagtatgtgaccttttgaatttggcttctctgagcagaagaaaaagagaaatcattgagattcatccatgttctgtgtatcagtagtttcttcctttttattggtggcatcaaagtgccacagttcatccatttggataccttctagtttttggcaattatgaataaggccactgcaaatattcgcatacagatatttgtgtgcctgtaggttttcattttatttggatagataggttagatggcttttgagcaaagacctggaagggatttgaaacaagccgtgaagacagctcaagatgttttcgcacgtgcactatattgtgatttagccaagtgaataggtttgtgctgcatgactgttctgtttgagtcatttttctcatttgagttatttggaggaagtaagagtaagaagggaggagaccatttattcattcatccattcatccatccaacaaactttaaaaaaatgaaagccaccagtcaacagtctgtgacccaaaggaagcttgcgacccttggatccacaccaaaggctaattttagttggtttatctgacatgacataatttcctttctgagtttcctgaaagttagggtgagagagtggttaatgagtgtggcattatcgtcttcgaaaagggctatgggagcacgagcattttagagagtttttaatctcattggaggcttcagagaccctttcataggtccctgagaactgatattcttttttgtctgtgaggttgtctgtgtgaaagggcaaagtgatctctcaaaagacatattcatttactttcttttttctttttttttttttgagacagagtctcactctgtcacccaggctggagtgcagtggtgcaatctctgctcactgcagcctccacctcccaggttaaagcgattctcctgcctcagcttcctgggtagctgggattacaggtgcacaccaccatgcccagctaatttttttgtatttttagtagagatggggtttcaccacgctggccaggctggtctcaaactcctgacctctagtggtccacctgcctcggcctcccaaagtgctgagattacaggtgtgagccaccgtgctcagcctgaaaagacatgttcaaataagagtcctccctggatgaggggccagtggacaagactgcatcttcctaggatcaggagctttgtgaaaaaaacagaactacaggaaataacttgtgaacttctttgtttcaggtgatgcgactgtgaaaaagaaacctgcccccaagacacctccgaaggcaggtaattggccacggcactatctggggtcaaagaagtcatctaccatgggggttttgcctttaccttgctagactgacacctgggtatgtgatcccaggagacaccccactgcaaccccacccccaccctcagttccagctctgcatttttcaggctgagtttgctcatggagagcctctgcacagcctggctcctggtccccttccacagctttgtctttccatctgcctcccatgttgacagcatcatacaggactagcagctctcctgcctgccccttctacgaattctgccctgctgtccatcctctgccctacccttgtgtacatgaccctcttggggctatttttgtgcccagctctgtgtgtccttgttatatggaacccttgtctgttttccattggatgacacttgaggacttgaatcaagcctgccagccagggtgacctggagtttagaaggcaaggtgatgcttaattcataagtgagttaggacctcaattcaaaaaattagggtaagtcacaaattccagtacaacccataaatggagaatcatgccatgtaagtagtgtgggtcacttctgagggaatcagaaagaagaggtgaacaaacctagcaggtccatgaacttggatgtcctgcagcaggatcactgcccctcagtcttaccctgaaggttccggaagccaagagagaagccaacagaccactgtggacaatggcgtcgaatgtgatcagaatgcctgagacccttctgcctcgctcactttctccctgtcctccctcagcaatgccccctcagatcatccagttccctgaggaccagaaggtacgcgcaggagagtcagtggagctgtttggcaaagtgacaggcactcagcccatcacctgtacctggatgaagttccgaaagcaggtcagtgacggtatggggtgggcactgggggtgctgggaataatccgtacagcctttggaccgaaagggatgagaaatgccgtgctggagatggcctcactcttcgtagctttagaaatgggagaggccactcccctacccatcgctcacctgccaaacctgagttcttgttaacctttgcttctgaatctaccaataatccccgcctttgtagacaatttgtgtaatagaagtgtgaggggaaaagtagaaaccatccatgtccctcatctggtttgatagcacagtctagaatcctattcagagtcaggaaagtcgagcctgtgacccaagatgacccttagactccatgagcttgctgtgattctgtgccagcccactgattcctgtctgttataaccacttaaacttgccacatgctgaagggacaaaagcaaatgtgagtatttggatagaagaattgtatgataaatagaattgtgtctgactgacccagaaatctagctacaatttatcataatggttcctatggaacaatgtttgaatttctagacaaccagcattgaaaggacttggggagcccagcagctccaccaatccacggtggtagtgtgtgcctgtatgcatgatcagcagagaccctggaatgatgggttggcacaggagtgggaagttgtgaagatttattctgagccctctgttactctgttttaaaatcactcaaattctcctagccccagagatgaacacttagtactaacagggaggaaagtagggttggtctcaaaagatggaaatgagaagtttgcctttagcatcccagagcatgtttgccctgagcgacatctggactactgttgtctgaaataagatggaatctcatcacttttcagagacatttagccaagtcccagctctgtccttcagaactttctgccctgatgaaagtgttatctctgtgctatccaatatggcagccaccagccatatacatggggctattgagcacttgaaatgtggctagtgcaactgaggaactgaatatttaattttaattaattaaaaattgttatagcagctttgttaagatataattcatatgccataaaattcaccctcttgaagtgtacacttcagtggttttcagtagattcacaaggttgtgcaagcatcaccattatctaattctagaatactttcatcatcccagtaagaaaccccagacccattagcagacattcctctccttcccccaggccctgacaaccactcatctactctcagtatttatggatttgcatattctggacatttcatatcaatggaatcatacagtatgtcattctctctgtgtagctttctctttttttgacttagcatactcttttcagggctcattcttattgtaacatgaatcagtacttcattcctttcaatgaattaataataaatattccattgtcaggatagaccatattttgtttatttgttcatcagttgatggacatctgggttgtttccacttaactaattaaaatttaaatagccacatgtgactagtggctacagcattggacagcacagaagaggctagaacccactggagtggatcttgtgaatgactttgctgagatgtgttctcctatcatcccattccagagaggtagagggagaccaggatatttctgggagcagtgagtgctcagctagttcatccatccatcctgcccctgctccacaccctccctgcccaccccagacctggcaccctcagggaagctggactctggatgtaggagagaaggggcctcagggagaagggcagagtccagaccagactgagcccccccacagcttgtccagctgcatccttcaggaagtagggaatggggaggagcccccttcctttcctagcccaggggcccaaggctccagcacctgctccatcctccgcccctagatccaggaaagcgagcacatgaaggtggagaacagcgagaatggcagcaagctcaccatcctggccgcgcgccaggagcactgcggctgctacacactgctggtggagaacaagctgggcagcaggcaggcccaggtcaacctcactgtcgtgggtgagtctggtggctgggtggcatggagcttggggcaaggggaaggcagggagcccccaggcaagatacgtgggcctcaggacttcatcacccattatctctcaccactcctgtgcctgatttataaggcaccacagaaagaagatcacggcaacccacagactccctgctagaccctgctgacctccaggctcagcagaggggccaaggctgggcagaaatccttttccctgtctctatcaacacctctctgtgatagctgttcctggagttccccgccctcaggccttggcatctagcttatttgagaaataagagacatgaggcataaacttggtcaacttcttggcccctacgccacaggtgtctgtatctgtccccatcctgactccaccctccaggctctggggatggcccaccttggtcccaccaaaggctgctcccttctcctgtgctctggaccccaggtccttgggggctccaccatccctacttctctcttcaacctcttcctctctcctggctcctcccagcagcccgtaagtgtcgccatcttagccagatgcacaggcattaataactcctgcaatgttctctctcactctagccaccctaccttctctctctgacaggggtgagtctctactgcacttccgcttcttcaccccccagcaccctccagctgcctatggcctcacccccacgccccattagtctgcagggactgttcttctgaggtcaccatgacctcccaatcctgactccactcgattttccttaccttcataccaggatttccttcatcccaggattgagtggggtctgtctccagactgattctcaagttcacttttcctctcctcccttaacactgtcttcgtgccctggtcagctctctcctggagcatcaagagagttttctaaccagtctcccgctgttgtcatgttctgctccagttgttccccgtgtggcaggtgcttgggacagcagaagaatgagcaggcagaggagcagacagagagagagagtagactctatgcctcatgcatttgtgggccttcatatgttgtgcatgtgaaagcctttgacctggcatttattgatatgtgcacgagacccgagcgggttttccatttgtccttggctttcaagcttatagggtacatttgtgaaaattagaaaaaggggccttgctgggcagagtgaaaagggtacagcacccccagcctcaccccagaactcatgacctggccttggggaggacaggttggcccagatgcccccactagaccccttttatgcagtgcacaaaactctcagctgtgtgtgctgatcccaaccttaacttcctgcaaactagcctttcctgtgtgttcctggtgcacacacacgtgggcacacagaacaaaaggatctgttggtaacagggcttgtgtggctaccgtggttagaagtcttccactggaatctctcttatggaagtatctagatatgaagttagaagttgtagacattgactcttaaggtctcttgtagctctgacattctatgattccccaactctattctctgacattctgattcctcgactctattctctgacattctatggttcctcacctctgttctctggtggtctgtgattccttgactttgttctctgacattctgtgattccctgacttagttctcaagcagtttttctcccctatcttcatctcgtatcatcaccttaggactaggatggacaggactgatgtttccagccttatgcaggagaaactgaggcctaatctgaacaaagtaacatagtgcatcagaggctaagtgggaactagctctaaactttcaaacacttgtcctccagtgccactcatgggagtgtgaagtaggtacagaatgtcccaaaaggtaaaggaacactctggctgcaaaactcatcttgaggggagacatgcaagccttttggggagctgtccacatgccagagagttgttgatgtctgtgcctccatttttctcatgctgagccttaggaagccctgtagcacttcccttcagcccctaagcagctggggaagaagaagtccttgtccaaccaggtgaataaggaagacacgaggataaaggtcaaagtaatacagagctgggaagacaaatgaggtggccagtgagctatgcccatgccagctaccagaacagaccacaggttccacaccctggcccgactccccagagaggaagtactgcaaagccccctggaagattgtccctggacacaggggacccgggagagggaattcacagaggactgagctccagcatccactccccacccccagttgtccatatttctgtttaccttctctcttgctctgttcctctccctggccttgtttctttaccctgtgttctgtttcagccatttctcagtgtccgtcaccctgtcccatgtcccctcttttccctttgtcttccttcctctgaccctgttcttttgtttcttttggttagaagtttcagatcggggaagactggtgtacaaaggggtcagggaatgggtttttcatttctaaaggagaagaacaacccttttctcactctgtctctttttggtgactccaggtgtttatttgaataatttcctcccaaggagtcaggaacctgtggaggcttggtgctagtgatccactttactggtacatttagatctgttctgaagcactgatttggccctgtactcccgtcctatcagcaagcatcagtttaaacttttctttgatgttctctctcatctgctcctccttaagcaactttggggtcagcttctttgaactgcttttctacagaaaagctctccctccccccagcccccacgatgcccagctcctgcgcagtgccacgcactcccctcctccgatcaccactacgcgggctgcagttctggccttttatggtttagtttcttattctctgcagccagtgctgacagggccattggcgtggctgtctgccagctggcaggagcagcatgttaaatgccgtcctgggaggggaatggaatggaggagaaccgaggctttctgtctgcctccccctcaaagaactaagaatagaattgctcaataaaataggactcacattgatggatacagcaaagccacattcattcagagcctgtacacttagaattagttcaaagtaaacctggatgaagctcagatttacctgtgcatcttcagggacatctctgtattccctgatcagggtttattaagcagatgtaaaatgtacatgaggtaaaacaggaatcacttggtctgctccggacagttttcatgcatttacagaccagctaaataaggccagtttaatacaactcctccttgttagcagcaaacttctcttattgtatattctttaaagggccactttcttttcagatcctctctggctcctatttttcaaacaataataaaaactagcctttccctctgttagcttaaatgagtgatatttagctattttggagacttattattattatattttaaaaggcagcccaggaatttgcaatgctcagagcctcttcctgcacatgcgcccctggtcttggcctgtggggaataagggaggggacagtgagcagcatacccagatggattccttaaggtcactcacccagcacgagaaaagcaggtctcttttcatatctttaaaggagaaaaacaaagtagagagaaccccaaatacccaataatccccaaatactaactgagtttggagcttgcatgatttcccatcttaatgctcagctcaggcttaagcaagatgccttcttgagctcattctgcctgatagcctggaaagtcttgagccctggagcgagggtccagaggctttttggaatctccttttggctctgccactgactactgggttttcttgataagcaaaatgccttagctgctgaggacccatttcccaagggctaggattatccaggtagatgacatgtgggggcccttccagcagctgctgaagtcccagggaagggacatccaggtggggctaggcatagccactggtcatcttcaaataagcgaggaccaagagacctcaagagcagttactctagtgggaagctgtaggacaggatcctccattttcctggaaattagaacatttgctgaggagaaaatcctggagctggtgccactggagactcttgtcttagactgagctgagtttcctattctgttagtcaagcctccagggagccctgggagaattcagaggaaatgtggagtctcctttgcccagagatgcccagggtctccctcccagtctgagtgtgtcgccgtggaggacaagctcacaggagctccctgttctaaggacatctgttcttttctgagagttttcatccctttactagttcagccactgcatggggctcatagcttagaaagaacagaaagcattaggtgcagcccacagctctaaaggcaggtggaggagtgggaggcctccaatctcctaggacttctgacttgggtcttttctgaactccttaatttggtagcaaattccttaaaaatgttggagttttacttggaattaaagtccctcgccccaaattttgcatcttctcttgtgtgacaagtcttacgtatcacatatgtcatgtataggttctcattttcagccaagagacatgtgtaacagggtagggtacaaatggcacctcttctgcaacacccatttctcagttttcttttcttgaccaaagcagaaggaagatcagttggcagagtgcattcgtttataagcccacacaactccaactgtggccaatcacatggtctccaggcagtcttctctgggaggaatagtgggtctgtcttccatccctcttcaggtttttttacttccttagctgggtcttgagaggacttgaaccacttgtctttaagagagtttagagtaataaacatcttagccaaaaccagaaatgtttcaaaaaaggccaatatatctctcagaacaaacagtttttctaagagaacatattaaacagccagtgaaagtgcttccatcacaggaggcctctggcatgactgccagcactgggaagtggctctgtcacaatcccagaatcattcccagggctttggttattggggtagacagtttctgggcagtgcattctgggctggaatgtggatcggcagggctgggagaggggacaagaatgaatatgagtatgagtatatatactcatatacacatgtatatacatgcagatttttcttctccatatacacagggtcatttgcagccattgcctttggccttcctgccttgctggaggtgggagagtagcggtcaagtactttatctatgtttgcttacttgatgcttgcaaaaaccctaagaggtaggaacatattagcaccattctctgaatgagaaagccaggcaaacaaaccagtttcaaatttgctggggttgacatagcttaaaagcatggtttcaattgctagtttgtgaggcttcatgaaatcaaacagcattgggggagatgaagggttaatgaacacaacacagatatctgtaactaaccaaccatctgcaaaaactaaatctgaaaaataggagagttttgctcagataagcaactaataaaatcagcaaaactcaagagcctcattaaagtattggctaccatgatttgacttgaagttggcagtactgctagttctgaggccaggtcatctgaatgagaaggcagccagccaaaagggccacttcttatttgtgtcctcagctcattttctgtccattagtcagggatggctgtgatttgctattgtggtttgcttttgaaattatttatatctcaacagccctctgagaataaaagaggtagggtaggagtaatttttaagtatataaagttagaaataaactcctacaataatcttgatagtaatgactagtcaagccagccactcttctaagaatttcttacaaccacctgtgatacaagtgctgttgttattcacattttacagatgaggaaactgaggctcagggcaattaacagctactgtgtggggacagatctgtgttcaaacttgaatctgtctgacttcagagcacaaacactgtgctataccaccccttggtggggcaggcatttctcaagacccagagaaagtggaggcagacccctagttatgtcacaggtcattggccaagggcctgaaggacagacacacacactcatgctgaactctctctctcaaaacatgttttcgataggaaatagtccacgccttctgggcagcttcctagatctgtttactctgacaaatatgtttatgacttgggcaaagtacaggaaatcgtgacttgcatgtagactggaaaactagcaaaaaaaagcgagggggccttttttggagcaaataattatacatggggctttccgtacaggtgggtttgtacatagctctaactgtgatgtgcggatgagggaaagagacgcaggaccagggactttggattgggttctctaggctgccttccccccatgacacaggtaattcaaaaacttcctttgcctgcaattctggaaagtgtgggtgatgttgtgcttctttatccccagataagccagaccccccagctggcacaccttgtgcctctgacattcggagctcctcactgaccctgtcctggtatggctcctcatatgatgggggcagtgctgtacagtcctacagcatcgagatctgggactcagccaacaagacgtggaaggaactagccacatgccgcagcacctctttcaacgtccaggacctgctgcctgaccacgaatataagttccgtgtacgtgcaatcaacgtgtatggaaccagtgagccaagccaggagtctgaactcacaacggtaggagagaaacctgaaggtaggctgccatcacttcatcagtggcttgaaacaaatgtgcgtgactgaccttgtgtatgtaaagactgtactgaaaggggtgaaaaggaactgaggaaacattaatgatgactggcagggtcttttggggtcttggtttccaagacagtgatgttgagccattcttcaaaaaaagtattaatacttaggacatttcaaaaaacattgaaccagcaattttggcatgctgccaccagggggtgatggtatgttactcaggagcataggagttcaagcggcctcatgttcctcttccaccctccaccccttctcttctcctcttgtatccatatttgagtgtctacttggtgtcagattcttggaacacaaagataagacatggagcttaaaatctagaggaagagaggtgtgtatggctaactataatgagaagggatgcatcctattatagctgggtaaaaaaagaaccaaggggacataacaaaatgcatggagcatttttccatggagaccaaggaaggctttctggagaaggtgacacttagtctgagtcttggaaaaagggataggattctaaaaggcagggaagataaggaaaggcactctacaagaggaaacagcatgagcaaaggttacaaagccatggcagtgtgtgacattttcagatgctcgtgtgtggccaaggcatatgttgtgtgagacagaacaggaggaagtaagactaaaagggcattttaggtaaagttgtgaagttcatcaaagattctcaggcaggggatcgagacgattagagctggttttcagagaactagggaaaaagcagggatttgctattcacagtgcagttgtggaccagcagccttggcatcctgggagcttcttagcaagcagactcccccaggcccttctgggccttgactgaaaatgatccactccttggggattcagatgcacacgaacatttgagaagcactggagtggtgggtgggtcagaggagatgagactgcagtcagccatatcagatgggcctctgggatgacagtccaggggagggatggaaagggcacgaacttcaagcctcaggaggtagaagtgaccatacttgatgactttttgcatagtgagttgaggaagagaactggaagattctaagatgacttacagttcctggctggggtaactgaacacaaattcaagagccagctagaggtttattgttataattcaccatggctaacatgtattgagcacttactctaagcttacgatgtgttaatcactttatatgcatcatttcatccaatcccaatagcccaatgaagcagatactgttattaccctcattttacagataggagaaatgagatttagaggggagaagctacttgcccaaagtcacagagcttgtaattggtgaactgatgcttgaactcagagctgtctggcctgaagcttgtgctcctttggttagactgagggaagaggtcaggctgtcttccaggttcctgacttgagtaacttggaggttacataacagtctgggaggagaggggagctgcggtttcagccctgctgagttgaggcatctaagggctagccgagggaaggtatcctaagactgttgggtctagagcccaggagaaaggtttaagctagtgtggcaggcttggaagtcttcactatttaattaataattgcaaccatgggcattgataaggttacagagagtgtggtagagaaagtcaataccaacaccataaagaaggaacttgcagtaccaggagaaaggactgagaggggagagaaccaagaggaggctggagtctcaaagaaacaggggagggagaaggtgcaaagagggcttcataaactgcatccaatgctaaataaaaatgaaggagatgaggactcagagggtctttggatttagtcctttggttggtagtgatctttgtgatccaagtctgtagagtttccactgagtgaaaagatggttgccctggttaaggaataaatggaagaaagagaggccagaagcatggaatattatttcaagaagttttatgtgaagaacaggaaaaggacattgtaaatttaggataagaggccgggcgtggtggctcacacctgtaatcccagcaatttgggaggctgaagcgggtggatcgcctgagctcaggagttcaagagtagcctgggcaacatggcaaaaccccatctctactaaaagtacaaaaaattagctgggcatggtggcatgcgcctgtggtcccagctactcaggaggttgaggcaggaggatcgcttgaacccaggaggcagaggttgtagtgagccaagattgcaccactgaactccagcctgggtgacacagtgagactccgtctcaaaaaaaaaaaaaaaaaaaaagaattaaagaatataggataagaaaaagttgggggttaggagaaggtggagggacatcaagggaagagagctcttggagacaggagaatgtagagttgtgaggcagatggtagaagactcaagtatcaaaggagactgagctccacatgcagaatgtcacttgaaaaccaaaactgatcagtaggtgagaatgtatttgacttcttctaattacaaggaattagaaatcaagtgaggcaaatagtgaacctgagcaaagctcagaaagcgagaaagcgagcaggcctggcatcaccagggagctagagccatcgtgagtatggaaactgtcatctgattcaatgaccctgtttagttttgaaaaaaaaattgaaaattaggtacaaaataggtattaaaattttactttcaattaaacaagggctccagaaagaaagaaagttagggtaccaatgggaaacataccaactttacaattttatgctagcagctgtgtgtcaggcggcctttacccgttgagccatgtcaatatgcatagagcaggtctccttgagagctatggtgcaagtcacggagacgtgatgcctgctcctgggacagctttcgcagggatcccaaccactagccactcccaaatgtctgtcaggggacactgagtaacaaaactgccatcactgtcttcttacacacacacacacacacacacacacacacacacacacacacaacatccctctgaaatgagcagagtgggggctgcatagagtgtgggtcccaggggggcaatcaagttccagtctgtggtgttaggatgttacttggaaaagtgacaggaaaaggagtaagattgcagtgtgaagatgttcattggctggaaaggaaatcatccaggtctgtgctatggtgtaaagagggagagactggagaatccccgactaaccccaggcagcaggaccagaggccacgggagctacaaggtgtggcccccaggggtctaggacagctgctcccagggctgtgtggagactctgccaggaggaagagctgtgactgcctgtctggggcaagtggcctctcccttgttccctgccatcagcccgctgaaccctctctgggccttcagactcccctcccctgctgccacccctcccagctgggaatagacaaagggcaatgttgaaatcacttgaaatccagaggaggagtccagtccacccagggcttccagacaggaagctactccccagctgaggctggctggattaccaagggggaggaggaagagggcagaacagttggcaagtgttaggcctcagggcagaggactctggttgaggggattccaggcaaaagtcctccacggtctgctcagatgcttgttagttataaagcttcataggccatccctctgctgaagagggaaatggctctcagggaagtggcgtgtgtgttcacgcacgtgtgtgtgtgtgtgttggcagagaggtgggatcaagtgacaggtcattgtaggtcatttctgtggagcagatggggtgggatcatattaaaaaggcagtgctgattaacccacactccatgaagcccggctaatgttggctctgaccttcaccactaccaccacagccactgccactcctgcctctcgctcttctacttcattctcatgcctcatttgcatccctgttggtaccctagccctcatcccacatccactcaccatgtgttctgtgcccctcctgtgttctaggcactgccatgggcactggggatacactgggggacaaagcatgggttccccgtggagctccagtggcttctctatgccagagccactcctaagactagggtccctgaactgacaatgtactcccaaacccaagtgcacagagccagaaccttaccacagccccgctccctcccagcccagccaggtcttgaactgtactcctcctcaaatcctgctgtcactcaaatccactccatccctgctccttaccctaatttgttctagtctgtataattgttagcaaaacagctactgtgactgaggcttcttgcagaactggagcctccttgcaacccccaggacagttcgagatataaagcctgtaccgctcccatcccaggctgcagctacgccctggcctcagaggccgtctccggggcgggggtgccctctagtgttctctgggtgtgcaacagtccttggctgcaggaagggacaattctctgtccaggggactgactggacttgtgccatgtgagggtcctgagcactcagctgatcctctcccaaacactccagggtaacgagactctcatctgtttgcagaaatatctcagaaccatcttccaaatagccttccacttagctcatggatctcatagctcattctgaacagattttttttttttttaagttcagtggaagacccttccctagtggaaagatggaaaccagttcacctttctcaacaaccctttatgcaccaagagctctgctaattgaactgtggtctttcctctacttctctctcactcctccccttgtggtcaaatagaagagaggcaggacaagaagggaaaagcagaaggggatgtagcagcctggaatctttctcttttttaaagagatcgggtctcactctgttgcacaggctggatttgaactcctagacgcaagcattcctcccgcctcagcctcccgaatagctgggactacaggcacttgccactgctccctgcttagtccggactcttgatccgagtttcctgcagcataaaggaacacagtgcactagaaagaggggctggaattccttgagaatgatctaggtccttcccccagagcattagcatgagaatcagatctgccacagacctctggggtgagaggcgaaggtgaggcatggatgtgggctcatgagtgaggccagaggctggccctgtggctgtctacctggactcacagtgacaggcaggggccagctctaggactggatgcccccttcaaggcacgcagggaaagcctcctgctgccgggccattggcaagactgcttctcctgacaccaggccaggaaagctgccctctcctttccctctcactctgctgcttggaatacactggtctccatgccacgccgggaaaatgtggcacaggaacaagaaataaaggatgactcaactggtgaaccactatatcaggcagcagcaccacaggtcaagacaggggcctccctgacagtaaataggatgattctgtgtcgaagacctagtccagtgactggtccacctggtgtcccatcactcattgactccaatattgttgcttctcttaaaaccctgtttataatatcatcactgaactaacctaaatgtctattgaacatacttattattctagtggtacttctcatgtgtgagttccatatccctccagccttcctcctacgtgaggtagaacactaaatggttcccccaagatgcagtagtcatgagttgatgaaaagtctgaaactctcatctcatccttggcgattgtgtgattctctttaaagtcatgtccattttagacttctttcccaacctcagaggcctcaccttttctgattaagacatagcccttcccttcagtggtcttgcttgccacctccagctccattgtggcttttggactgccgacagccagagctccagggcaggcacccagggcgctctcaacagctacccagtactcacccctgtttggggcccatgcacactttgccctgtgacagcatctgacagcccaagcagtagattgaggagctgctgtttctgtcttgggtattaactatggactttagggttcaccaccctaaaaggtagaatgatcagattctcctgaacactaactccattcctggcttctagttgcattgctctcaggtcatcctttccacctgtgaattggacaatgccactcttaactctccaacatgtggatttaggaatattgaccagttaggcccacatcccgacagtaaccgtgaaacccacctctgatacttcagctagactatctgggtgtccctgtctatctcatccttttttatttttccatggcagcttcctttctgtgataaaatatactttccaatcccattcatgtttagttttagtctttttttaaaaaaactaagctttgtcagcagcattttaagaactctaaacacactcacactcacactcacaccggtacacccgcactcacactcatatgcccactctctctcacacacacacacatacacacacactcacactttaaaaatccttttcctccctctatgctttctctcctgtctttgttttgcttccttgggaaacctcccattcattgtccagctgtcagccaggacgcagcccagacgatggctgaggaacacacagcacatgacgaagcgtggcatccagagctagccagggccagagacatcaggtgcaacccttcctcttacagatggggaaaccaaggcccaggaagggaaaggcaatcagccaaggtcaggaagccagagtggctcgattgtcaacaaacaaacctgtatcgaggcaaaggaaggcctggagctctgaagtgggcgtgctgtgctggatgcccccctgttccggggaacccctcctgttccccggaccctgttcactcctgacacggccatgggagcagctggcatgactgtgtccctccctgccctgcctcacaaatacctattggtttcatttgtgtgacatcactcacgccttcattgtattccatcatttcctgtaagacgcaactcaaaggctatttcttctaagaataattgctctcacttacaattgcaccattttgtgtcaccctcctctgttgtgtattcactttgaaccatggtgatatgtgcgtgattatggtacactttgtaaattgttacttcaagtatatatgtttttgcctcttgaactaaattataagctataagaaaggagagaccatgccttctgtgtaatatgttttgaatgcccacaataactggcattcaagatgcttggtccagtgctgggatgccgtcaacaatgttcaatgaatggctacatggatttgacactagaagcagttataagttgctgacttttgagccagggcagaaagagactgtcacagttgtgtgtaggttctgaaagtcagaaagggttggatgagatgtggagaagggtatatctggggaccatgaggctagagaggatgggacagaggggagacctggtggagaagtggagctgagtggagggaggaggctggcacctgccagtctgcactgggccctatttgctatatggactgaccagccccaggggatgcccagagctctggacctggtagtcgtctgcctggggaggctgaggcctggcagggcccccagcacatcttgctctcagtgggccttcagtactaatcacctgtgtcctctctgtccttccttgtgccccccccagagccgaaggatgaagtggaggtgtcagatgatggtgagtgcagcccctgtcttcgggtcaggctcttggggtggagggggctgagtgggggcatctgagactcacaccaaccctgacctgtgccccacagatgagaaggagcccgaggttgattaccggacagtgacaatcaatactgaacaaaaagtatctgacttctacgacattgaggagagattaggatcgtaagtggagtgggaagttgcctctgggctcccagggtgagggtggtgcgggtctcacagttagattcagtgcctcagcttcctgttgctccctggggcctgcctcctccccagactgagagtcctgcaggatccaaaggactgacccacgaaagcatcactcactcacccaggactctctgcagagttgcccatgcggtcctacactgccccaactctgcaaaggctgtgggcaagtccttccttttctgtgcctctgttcagagcccaggaccaaaatgagacacagggaggggaataacactcactggggcctgtcaggggagagcagggggtgcggggagcagaacattagggagaagagctaatgcatgctgagcttaatacctagatggtggggtgttaggtgcagcaaaccaccatggcacacgtttacctacgtaacgtacacatcctgcacatgtaccctggaacttaaaaacaataaaataaaataatttttaaaataaaataaaatgagaggactggatcagattatctttggcaccccttccatttgatccacagaagtcagtgtagcctgatcagtgctcactgtaaagcaatgcctgcgttagtgctccattaaacgcgcagcagtcatcaagctccctcatgaacttggctcgcactgcttactctggcttctccctagggcatggaggatagagtgggctcagaccccaaccctgagccaagctgttcatctgcccttacgctgtccctggaggaatagaagaggtgggagagaaaggagtgggactccacttgtatttccagtggtttctgggaaatgaaggagtgatgcaaactgggtaacagtgtcagaaagaagtcagtgccatcacagaggagccccactctcccctctctcagcagtaggaagcaggaccctgcctgggccatcaccagggggtcagtggtagggagtggaaggaaggaaggcaactgctcagtaatactctgcatttgggaagggctgtctccacccatcttcatgggttccactgcagggaggggaagagatgccatcagccaaagttgacagtaggcttgtcaacattagaaatgtgcttcaaaggccaggtgtggtggctcacgcttgtaatctcagcactttgggaggccgaggtgggaggattgcttgaggccaggagttcaagaccagcctgggcaacatagcgagaccccatctctaaaaaaaaaaaaatgtttaaagataagaaaaaacaaatgtgcctcattgctctagagcaggagtctgggcctttcataaaggctgatatcttagattttatgggcgatatgcctttagctctgccactgtagcacaaaagctgccatagacaacatgcaaacagccaggcagggctgtgctccagtaacaccttacttataaaaggaggtgggccagatctgtcccatgggccataatttgccaaccccaagttagcggaaagcttggctaaatgtggcttttctctcctccccctttcatttgcagtgggaaatttggacaggtctttcgacttgtagaaaagaaaactcgaaaagtctgggcagggaagttcttcaaggcatattcagcaaaagagaaagagaatatccggcaggagattagcatcatgaactgcctccaccaccctaagctggtccagtgtgtggatgcctttgaagaaaaggccaacatcgtcatggtcctggagatgtgagtggcccactgccagcagcgtgggcaccacagggagcccccaaacgtgtctcccctactgccctaccccagccacctctgccccaagatggaaagcactgcagacaggagtgtgatatgtaagatgctcaccagccatacagccaggcctgaccaaacagaaccgaaggtctgtgcacagtgctggccctgagcctctgagcaccagcccagctgcagccttgtgcttatttccaaaacaaaccagtagatctttgaggaccctggtgtctttctcgccctcatctccccatgaaagggccaaagctatccctaggctccttggtttcatttggggcattcacacctgaaggtggtttaggggagggacagggcagcttcctgacttccctgtgaaagataagggggcccctggctgggggcttgaaatccaggatggaagcctctctctggtcctcagtcccatcctgtgtctccacatgcccctggtctactcttgtttgtactctttggacttctcactcactaaagagtggtgctttccctatggggttgtacaaaggcagggggattatcagatgacctccagccaagcctttcgcagaattcattgtttcttctgcacctgaatcctccacctcccttacctctgagctgttggtgcatgcgtgtacacacgcacacacacacatgcacacacacacacatacagtcaagcatgcacactggcatcagcaagccaggcatcccccacagcatctgcattcttaacagtttccttttttatctgaatttttagaatatatgctacaatcacctcaaaaaatattaggaaatacacagtgaaaagtctaatttccaccattattcctgtctatcctttcctaaacactacaaccatcaccaacacaaacaattttattggcttttatctgtatccttccaaagtttctttatgaaaatataagtgtatacagacacacacacacatatatatattcttattttcttgccttttaacacaaaaagtaacttcttatactcactgtcatatactttgcttttttagtttggtttgtttgttgttgttgttgtttgagacagagtctcactctgtcgccgaggctggagggcagtggtgccatctcggcttattgcaacctccgcctcccaggttcaagcgatcctcccacctcaccacaggctcacgccacctcacccagctaatttttgtatttttgtacagataggatttcaccatgttgcccaggctggtctcgaactcctgggctcaagcgatccatctgcctcagcctcccaaagtgctgggattacaggcgtgagccaccgcacccaacctactttgctttttcagcaaattgctatgggagttagtcccatctcactacctagtgagcttcctcattctcacagctctgtggggttttgttgtatagaaaatcacaattcatttaagcagccttcttttgatagagattgagtggtttccagccttttgcttttacaaacaagcatcgtttgtaaccttgtacacacatcttttcactcatgcctgtgaatatctataggataaactcccagaagtgaaggagagctgggttaaagggtatgcacatttgaaatctttagagatattgtgaaattgctttcaacatccttgaaatgctcatcctgaacttggggggtctctgtcctttggtgagggctctgttagcatcttggaattctctcccaggaaagttgagtccagtaagacatccccaagctgtagatatgagtggaatattagtcttttctctcccctcatgccattaacattctggcacacaagtatttcctttccgtatgtgttccttaggaaaggcaatagtagttccgagtgtaggcttgagtcagatgaaccttacttcaaatcccagctctgcttctaacttgttatttgaccttgagtaagttattctattgtaccaatccctagttttattatccataaatgtagatacgacacccacctcatgaacgctgtgggattcaatgcaataatgcatatagggcacagtgctctataatggggagttattgttagtagtatgatacattgactttttttgtatcctggtttttttccacttaaaaatactttttgagcatttaacttccaacaaggtgttgtggaacaaatcctccctagtattcaggaagcctggcttcagtttctgctactattgagtcatgattttgcaattgtcaaatcctatcagcacgaagaagtacttggattagaacagtcaatctcaagatgccccttttggttataaaattctactatttcatggaaccataaaagacgcggtgaagaatttccattcgtatcttacaatctacattcagccccaaattcaaatgttcctccccattttcaggaaatacgtagcccacatctgtgacctcattctttacaccctcacaatagccccgtgggctgcatcttttcacatttattctagaacaggttgcttagtccaggcggtgtgggcatgtgaggacatgtggagaaatgtcttatctttagaagttaaaccttgagcaagttgagagggtgcagggagggcaggagtcacagggcctggggaaggctaggcagcagcaccagtgggcagaataccatacttagcttggaattgggagttggcaagctggatggaaaaagcaaagagaaaatgtaagaaagcttcagctagtctggctttcatccctccaccccatgcctcccctgtggacagcagcaggtcttccatgcccagataccagaaaatttgcctgcacttgggaccttggccaggtcgccaagagtaggaacttggtaagaactcagtcaaccaaagaagaagggaacaggttcatactccatctatacatcccttccagcttaaacactctaagacttgaccactgagaagggaaagaatgattttcaccagtgcaatgtgctaaccttgttggatggagaaactgagattaaaagaaggatgatgcctggggatagaataatggaaatgtattccagggtccctgccttaagtccagttgcttcagatctagtgggaaatagtaatgaatgtgtcttcatcctttctgacttctgattactggatgagcccccaccatatagtagttggtctgacacagcagttccttcaggcccctggcctacttgggcttgtccttttggaagtgcttgggacattccaggtggttgtgggaccctgagcattgaagacaatgtgaagtttaagctgtgtcatccatggctcatctcatgtttgtgctactattagcaaaatttatcaaagaacgttccagctggctgccatagggcaaggagcggagggtctcgagtccagtgatagcaccattccttcttgcttcctatgagagctagccaaggtctagggtttgggggatgaatctgattccttaggatagggatcacttatttatttagtcattcactcactcaccattaatttaagcctaatcttggcccttggcattatcccattactgtgggtggcagtttctgtctatcaaaccaatattttccacccatagcattaagtattttgaagataaacccacagaaccattaatcctgcctctttaaccccttccatcttagaaagttgaaccataggaacagttttcaaaatataataagtatatctgaataggattgaacctatttgaatttatattgaataggtttcctccagaaatgcagcaggaattatctccatggctcagattcccaccactcactgcctcagacattcccaagggcattgaaaacaatggttgcttgctttttcagaatatttaaaatttaaatgtaaacattttggagcaccttgtctgtgccaaatatagtcggaggcaaataagggtctagagatgagcctgccacctgtgatgtgttcagaacttcaaggcaaagccaacttgatacacaaagtgcggagacgaggccatggacataaggccatggaaagtgcagagacaaggctatggacataaggccatggatgcccagtgagggaaagatcattccatgtgaagaaatggggagtgactttttcagagggcgtgaatttcagctggcctcccaggagtggtagttgagtaagccagtatttctcaaacttgtctgatcataaggatgacctggagtaattattacaaatatagatcctcagatctctcccaagactttctaaatcaaaatctccagaggaggagcttgggaatttgtatttttaataagagccccaagtgattctttacatagaaaattgatcattaatattgagcattgactgtgtgccagacacttccaagcactttacctgtgttgactcatttagtctttgaagccaccctgtgaggtgaggctgtttttaatctgcatcttacagatgaggaaaatgaagcacagagatgttaataactggctgagacctaagaatacttgtagatgagagtttgtcttggagccttggcagagagcaatagaaatggagggcataaggacaagagcgccacctgcaggccatttggggaccttcttctcagatgggttttaaagtatgagttctagctccctccagctgtcactggcacagactgaccttctccagttcagcccttccagaagtgagtgtgtgtgtcacgtggcagaggctgtggtatgctgggccccacagtgcatccctgtctctctcctgcaggggtcagtgacaagatccacctagcccaccacagcttatcaaacgataagtaataagtgttgagcaccttctgtgtgttaggcatgatactttacaaagcctcctacattcctaaaaactctatgaggcagggatagataaggaaactgggactcagaaaggttaagcaacttgcccaatgtcacacagctcataaaaggcagaagcaggattcaaactcagctcctttcctcttcgtgaggactctctgtaggagaggaaatacccttgcaagaggacaggcccagaacccacccggccttgttcaactggtggacctacaggccactgcagaaacatgagcttatgactgggtgacagagagagaccctgtctctacaaaacattaaaaaaattagccaggtgcggtggcacatacctgtagtcctagctacttgggaggctgaggcaagaggatcgcttgagcccaggagttcaaagttatgttgaactatgatcacagaactgcattcaagcctggaagacagagcaagaccctgtctcaaaagcgaaagaaaggaaaggaaggaggaggggaggggaggggagaaggaggaaaggagggaggcaagggagggaagggaggaagggagggagggaagagagggagggagggaagagagggacggagggaggaaggcaggcaggacagaaggaaggacggaaggaaggaaggaaggaagataggtaggttggttggttataggccaggcatgatggcttatgcctgtaatcccagcactttgggaggctgaggtgggataatcgctggagaccaggagttccagaccagcttgggctcccctcccctcctccttcctttcctttctttcacttttgagacagggtcttgctctgtcacccaggcttgagtgcagttgtgtgatcatagctcaacataactttgaactccttgtctctaccaaaaaaaaaaaattgaagaagaaaaaaagaaaagcaagcttactgatatctgggtgctgcataagttaccagagagatgctttaaacttgctaagcagagaccaagaaaggtgggtcagagggctaggacaggggaacagagaggactcatgcaactcaggcggtggggccatgcatttgcactgaagggcaatatgctgatggctgagaccccggggcagtccctagcagaggatgcatgcctgtggctgcagaagcaaagttcactagaaatagccaggatccaaagcctatccagttagaaaggattacacagctggggtaaggaaggggtccaagggagaccagttaattatgactgcagggagtaaaccaatactataggcctggccagagtaagcaaatctgtcacagctgtaggtataatgagttacagccaactaattttagaaaatttgctgaggctcattattgatgattgaagatatttttccgttcctggctatgcagaacaaatgcttgtgggaactgtgagtattttgaacttgagttccctgtgactaaaagacacggctagagtacaagaatgttcccttaggcatgtgtggtcatttgagggaaagagactgtttagaggtcactctttttgctaagaagatcatgtctggatctctgtgttcacacccacctctgaaactgcctagtgtagatgcttccctgagtccccagcagcttagaaggtgcagggcagggttccctgatgggaaaccaggaggccctgacccttctcccatgtcggagggtggggattcaggaattgcccatcacccccattccctgggctttcctgccaatttctcctacccccagcctaccctggccagactccctgccagcctggcctccatgagcctgtggcctgaccaccccgtgcacgtgttcccgcagcgtgtcaggaggggagctgtttgagcgcatcattgacgaggactttgagctgacggagcgtgagtgcatcaagtacatgcggcagatctcggagggagtggagtacatccacaagcagggcatcgtgcacctggacctcaagccggagaacatcatgtgtgtcaacaagacgggcaccaggatcaagctcatcgactttggtctggccaggaggctgggtaaggctcatctgcctctcccatggacaccagtgtgtattgcactggccgtttcctctcacactgagtgtgagaggaaacatacagtattggggttaaatccgagaccatgaagacttcccaggtttgaatcctgcccctaccacatactagacgtgacagtaagcctcaaattccccatcagaaaagtgggatcatagtaggacctaactcacagatttgttaggaggatcaaatgtgttaatataggtaaagggatgggaagagtgctttgcacatagtaagactgcttaggtgttagctgtatatatgatgatgattatccccttttgtttttcactctggtgccattagcagcaaaagtcattttggtgatggtggctctgcacatctgcatcatactgtacagtttctagagcactttcacataaaaaataaaccctatgattctcaccatgaggtgagcagggtagattttatgagccccaacttgtagactaggaaacaaaggttcacaatagctttgcccaggaggtcccactgtgagccaggggatgtgctgggattggaacaaggaccccagaccttgctcagggtgctctgcagcacctctgattcttatgctagccaggagagaggtcacaggggtaggcggtcagggtctcaaggccgccctgaaagcactttggtagatgcctgcctggctcacattctgcctgcatccagcctgcctctgcagccctttgatgtcccggtgattgaggaaacagcttcatcctcccttcttagccactgccctgctagcaaggagcccgagggctggggtgagctggctttatttcaccaccctgcaggtagtagaaaggaggggccaaatgaatgccacccaataaatgtctcccacgatgttcagtgctggctgaggctgtgttggtcataaagaggaaaggggtaagcaggggcgaggttccgatagactatgaccggtctggtggtcagcgcagtcaggtgagaaacatgcctcggcgctgggcgcatgtgcctgctctgctctgctcactcctgctaagaggacagggtaggggcagtggctggcatacagggcctgcctttgaacagtgaccaccaataaattaaacaaataggccactgtcctcaggagtcggcagtgtcagagcccagggaacacaatgtccagcttccactggtgagggatactgtgggaacaaccgtgtccaccaaggaccagataactgagaagtggctaaaatgtagcagaaagggctgagaggcaggaattggagcagagctttcacatctgagggctgttaaatgctttgttttagaacatttgctgtgagctctgcgaagttaagcaagaccaggcatagcccacaggtacctgccttttgcacatattaacagacatctctggtcctttatggccaagaggtaccaccctggggttgaagcctctcccgactaccctaccagtagctcctgaaggacagccatgaagctgtgtgaggagtaggagaggcaggagggaggaacggtggtaagcatggctcaggagttggactacctgggcttgagtcccgaccaccacttgttaaccgggtggggaaatcactgcacttccctgggcctcactcatgttctcagtagcacgggcattatacctaccccttggggtgggtgagaacccttgtaaagctgccggtggggtacataggacatagtgaatgctagagattattattaagcataagtcacagtccctgcctaggggaactaactcatgagacagactcacaaaaagaccattcaggggcgggtgatttagcggcctcttctccccctgcccaccctgcacaggacatttgaggtgagtgtgaggtttgttggtttcactggtgtgttgacgcacctgtttaacaaggaggtcagatgtctctgtgcctgttctctgtgccaaagcctgtgtctggcccctcccaggttggggtcaacacacagattcgggcagctgctggtctcaagctggctccgtgatgtgctggcaatttatccctctccatcctggtttcagagaatgcggggtctctgaaggtcctctttggcaccccagaatttgtggctcctgaagtgatcaactatgagcccatcggctacgccacagacatgtggagcatcggggtcatctgctacatcctgtgagtcctggggcacttggtggactggtggaccacttggtggaccagtgggtgggggctgagggttccacaggagggtccccaggctgccctgccattgtcatgatggggagccccccccagagtcaggagggtggcaggctcccctcctatccctggcagcccaccctgctcctgggctcccagggagtcagtagcatgcatattctatagcatcatgtagctacacatgctaagatccccattctgggtgctcactgtccccaaggctggccagcctggggcctttggtcaggagggtgggaaatgtggctggcaccaagtaataaaacctcacttgtgtgggtccacaaagaaggagggcaggaggccaggggcgaatctctgggcatcctcattgtcttcagggcatagcactccatccccaaggcacggggaccccaactactagcctcatctttgagtctagtatatggatgaattaataaacactattgatgatcgagccttcaatgggactaacagataaaagaaagtaacacagtaattagaactgaaaaatcaggtgggaaatccaaagccatttcaatgaacaataatgcaggagaggggaggccagccatctaggccggcacttcacaaacattagcatgcctgactcacctaggcggctccttacattgcagggtttttgttcaggtctgggtgacctggaatgccacatttctaacaggctctaggtttgtgaatgtgctggttcaacgactgcgctctgagtaacaaggcttgagaacactctgtcggtggggtctggctgctttagtccctgaagccccagggtgcggacggtcattagcccctgaacctgtgtggccacatgcagttatgggatggtgtccccaaagatgcagatgtgtatgctttcattcaataatgtttttactgtcagaacaaaaggaaaaatttaacattttcatagaaaatgaggaagacctctatgaatactttcttagacccctggggccttcagactccagtgtgagagaaggttctgggcgattctgatgcatagccaggtttagaaaccagtgttataaaagctttagcagaagtggtgtgaattttgtgcaatgtgactttttcacatgctcaggaactttactcactatagcctgttaggacagtcccctcagtggaacctgcaccacaggcattgtagtccagacagttatcctctttcctgcctgggattagccccaccaccacagccttccccagatcagcagaaaaaccccgggccaggtgtgcatttccctgcctgtttccctgccccgccccctcttggagaaggggcgctgacaagtgaagacagcagctggactggagcttgactccctggctccctagataagtaaggaacagcagggtagggggcggggccagcctgcccctttcagggcggccccaggcctgggcagtgctaacctctggccctgggaaaaacaccagacccttgagaagcagtccttggtcagctctcactgttcagccccagctgcgctgtggtctcgcttggtcccagggtccccctccagccgtcatggagacttgccttactgtttattcttcagtgggttttcccactgccgtggcatcaggatcttctgcagctacagattttcacataggaccttgtttgatgctcacaacaaacccaagagtggatcatggcagggattccatcttcatgtggcgttgaggtgacaggggccaaggaagcccacgtggctgcccacttcccacagtcgggccaggggaccagtcgtcccagtctgccaggatacaggacttttggtgctaacatgggaacagtcccaggcaaaccaggacaattggtctctctactggtcagtgacagagcagtgactagactgctcactaagttttcacctgtgtaacctctacccggatcaagaaaccaagcactgccaggcccccacagccctctggcacccctccctgttaccaacccccagaggtcaccattaccctcaaggctaatgtcaatgaaatcatacagaaagaagtgtctggctttttttgcttgacatcgtttgtgagactcattcatagtactatgtgtcattgtagactgtttattctcagtgttatgtagtatcccattgtgtgaatataatccagttaatttatccgttctgctttgataggcttttgagtgggttccagtttggccattggaagcattctggttcacgtgtttcagtgaatatatttgtacatttctgttggatatataatctagaactagaataattgggtcatagggcactttattgtcaaatgagagttcttttcggtggaggaacatagtaatttgggcactatgttaccttgtttaccagattacttttaaagcaaagaccaagaactagggcagagttttggaaatggggagaagatagttttgatgctgccagtgcttgggcagagggttgtcaggagggaggaggggtgtgtgtgtggcaaggacccaggccaggtggcactgactcaggctggatcaatcctgtgccacatcttagctcctggacccccactgtgagccactgccctctggggcttttccagcctggctctctcagcatggatggaagtcagggagttcccccggcaagccagggctctcaacagagagcggtgctgaaaacaaacattggcgccaaggagatggtttcctttaagcgcctgctatgcagaactctggagccactgctgggagcacccaaaagaggctctctggtggccctcatggcatcctctggcccactctatccctctctttggagcctagtcatctgtcgggcagtccctgtcagggcgacttccacctttgtaccacagagcccctcctgttctcctttctggggccagtgagagatggagaggccagggagttggaagggaaggcaacagaccgtgtcaccataggacgatgtgactttactctctcccacccagcccagccatcagggcagtttctggccctatagggaaggagcagaatggggtcgtggagcccccacactcttaccccggatcctgaaaggagatagtaggttgtgtgagtacctagagaccttctgaagttagcaatacccatgtggtttctggcaggaagtgagaataccagagagctggaggccacacttccatacgggagaaatcctaagtccacctccgtttaagagccctcctccccctgctgtctccctcccctacttcctggacttggtacttccttgctgcctgtggggaggccacaacagctcttctccgagcccttccctcaccctactccacaatgccttctctcccagcctccctcaagccagagcgaaccagcaatggctgctctgcttcctcctcctgcctcttcctgaccaggcccagcagcacagccttcccattcatgcttgtttgtttgtccaacacccaccgtggtgcagacagctgtcagctgtccctccccaccctggtgtgtggtcgggagatgccaggagggaggagaggtgtgtatggtggggaggcaggtcagctcttctggtgacagctgcccagtcagctgaggaggggtcacagtgccggggcatcgggggcctcctcagaccagggtctgactgcagggctcctcagccagatccagtaacctctgccttccccacctggggctgccgctgccctctctgctgctgagcctggaaatacgctctgattccagccctaggatccctgttccctctccaagcccggccaccaccttcaacttttactaacacaactaaaccccaggtcgctgcttcctcggccagtccacaaaatgatgcacagctcttcctgtggacctactcagccctctcagctctcccaccagagtatcagatggctaatatggataaaagactaaccccttcctagcagtcagtagttccatcagcagatgtgtggtccccttagctggccactggtacagtcggggcatctgtctgctgcttgaaacacaacacagaagccaggtgcagtagtgtgcacctgtggtcccagctactcaggaggctatgatgggaggatcacttgagatcaggagttcaagaccagcctggctgatatagcgagacccccatttcttaaaacccacacacatacacgcacacacacacacagaaagtgtagtccaagaggcatttctgcaccctctgctctcctaaccttctgcccccacagccaaacaggcttccacatcagattccctgggggaatttctttggcaatgagctgagaattaagaaattagaatgccctgcattcatgaccattgtgtttcatcagcacaaagactaatatttgaccactaaaaatcaacatgtagagtctggctgtacttgatacatccagtgaagaaaaagtaaagcatccaaggacttgcccagactgattatagttttgtgaaaaacagatcaatccattagttaaaaactagataagaccagggagataaagaggtgttttaatgctaacattatttgttgaccggttgatttttttaacaaataatgactgttatctagctgggcgcagtggctcatgcttatactcccagccctttgggaggccaaggtgagtggatggcctgagcccaggagtttgagaccagcctgggcaacatggcaaaaccccatctctgcaagaaatacataaggtagctgggcatggtggcgtgcgcctgtggtccctgctacttgggtggcttaggtgggagggtcacctaagcctggggaggttgaggctgcaatgagccatgatcacgccactgtattccagcctgggtgacagagcgagactctgtctcaaaaaaataaaaagaaataataataatgactattttataaataaaaagacaaggctgggcacagtggctcatgcctgtaatgcactttgggaggcagaggtgggaggattgcttaagctcaggaatttgagactagcctgggcaacatggtgaaaccccatctctaccaaaatacaaaaaattagccaggtgtgttggcgcgcacctgtggttccagctactcaggagactgaggtggaaggatcgcttgagccagaggttcagtgagctgagatcgcactactgcactccaacctgggcaatagaacaagaccgcatctcaaaaaaaaaaaaaaaaattaaaagacatgatcccttatgcaaattctgccacaaagaaaaagttccccaaaaaggtttttaaaaatcctgtaaaaccccaccacccagcaacagcattactgaaaattcaaacaccctctttgtcaacatgctgtgtatgtattatattttttattccagacacatgctctttaataggaagaatgctgggggaacttgggcaggcaaggagccaggcagggtgaggagagtatttcagatggataggctgccaggaaggaggagtgccagaggccagaggcgaggaggctctccctgactgtgcccagagttgcagagattaagacctatctttgcaggattatagttcctaataaggaagggaggtttgcagaaggggaactttctgcattccacagcagggttgtttgcttttcctgccatcttttggagtactgccggacttcccccctctctgtttccagtggaaaatgtaaagaagcagcaggtggctgacaggcaagagacaggctgcttcctgatggggcttgcatgggccacgtgggggtcggggtcacagagacagagagagctgggaggcccctaggaaatctagcctagtccccttgatgtataaaaggagaagctggctaggcgcggtggctcatgcctgtaatcccagcactttgggaggccgaggcaggcagatcacgacacgaggtcaggagatcgagaccatcctgacgaacactgtgaaaccccgtctctactaaaaatacaaaaaaaatagctgggtgtggtggtgggcacctgtagtcccagctactcgggaggctgaggcaggagaatggcatgaacccagggggcagagcttgcagtgagcagagatcgcaccactgcactccagcctgggcaacagagcaacactctgtctcaaaaaaaaaaaaaagaaaaaggagaaactgaggcccagagaggggaaaggagcagcagataacagtgcagactcggggacaggtaaatgcccacccttccctcatggggacatgaccgagaatgattctctttgccttcttaaaacataaatcagggtcttgctttaaaaaaaaatcccatccacaaagatctattattcagaaacacaaatatgttgattaggatgagacaattcacattgtaaaagctttcttctctttacaaaaggtttcaccagagggttcctcccatggcaagctttttctcccaatatttcaagtggggtttgttctgtcaaactcaaccaaagccttactcctgaagctgtcagtgcttggcttatgatgatggattcataagcatttgggagaagggacattggtaaagccctaacttgacaggttgatggcaggagggccccagacccatctctctttttttttttttttttgagattgagtttcgcttgttgcccaggttggagtgcaatggtgcgatattggctcactgcaacctccacctccagggttcaagcaattctcctgcctcagcctcccgagtagctgggattacaggtgcttgccaccatgcccagctaatttttgtatttttagtagagacaggacttcaccgtgttggccaggctagcctcaaactcctgacctcaggtgatccatccattttggcctcccaaagtgctgggattacaggcatgagccaccacgcctggcccccagacccatctcatggggctcagctgagatcagggcaggaacagctacacaatttgcaacatgaaaggtggggccacttgttcaaaccttattgagaatcttgagacgacagcagcagagcattaaaccaagcacagggcctgtctaagggtgggactgtgggcaactgtgctggtctaacacccatgaggctgactcacaaggccctcatgaacagtggggtgagttgttgctatgaaggtgaggtgcacagaggtgagaggtaaggtcagtaagccacaaatctgctctattttgttttgaaattctttaccttataaagtttatttggcttaagctgctggtcacaaagtcattcctgcactcacagcttggtaaggcagtggagggaacccagcagaactgcatgagatctccgggcatggaccgcctccttactgtggaccaggcctggtgccagtgctgaacactgcaatttacttcatctttacagaaatgttaggatagtatagcatttaagaggacaggctctagaggcagatacctggcttccaatctcactggctgtgaatctttgggcaggtgacttgagcctgggctgtgcctcaattccctcatctgtaaaacaaagttataagaattacttgcatcatagggcagtgttaagattaagtgagttcacttgttttaggcacttgacccagtgcctggcacatagaaaaacctcaatgaatgtctgctgccatcatgatgatgatgaggatgaagaagtgaccaccctatagttaaatggcagcttctccattttagaggagaaaactgacacagatcagggaattgtccaaggccatacagcaagcggagaggctgcactctgtcctctgccatggcacctcatagggaagttttctagtttggcataaatgcctcaagttccccgaacctacattgctgattcaaagtccatctatccattgggcacacacttcacttgctgagcctctcttatttgccgggccctcttcttggagctgaaggtgtgtggagagaggtgggaaggaggggacagaagggtgcagtggtgatcactaccatgtgcccagtccacagagagggggcaggagcacgggaggaaggggcttggagaaggctctagcctgggctttggggaataatagaaaaccaggacagagggacttatcagccctgccgcgtaccctgcagaagcccgtaatctaaagccaacctgctgcacctcagcctcacaggtaggtggtgtcaagaggcaggtgaccaagaaaagacagggctgtgaaccacaccctcttttctttccacaagtggaagaaaggcaggtgcaaggcccacagagcatgagtttgggggtggggaggctggccgaccctcgcctttgacctcagttaccactcacctggtcgtcgcgccctctcctagccacacctgctgtcctgctcttgtctctccagagtcagtggcctttcccccttcatgggagacaacgataacgaaaccttggccaacgttacctcagccacctgggacttcgacgacgaggcattcgatgagatctccgacgatgccaaggatttcatcagcaatctgctgaagaaagatatgaagtaatgagttgggatttcagtctttgcttccctactccctgccctgtgttgggaagcaaagggggattcctttgcctgttggggtgccctccttgccaccccgccttgggtcgttcctagcattccctgaggaagggagggtgggcatggtaagagacccgaatgcatgtgggttggggaggcgacttcctaggccctgccccctggagctagacatgggattcaccttcagaggctcagacacctgacttgaaaagcgacacttgaccacgttacagagcaaggggcagctgttctgtgtgaataatgaccacccttcttattttctgggtacagttgtggccagccacagccctcttcaggggctgcaggggaaggaccctctcaacaagcaagagcagaggacacgggcatcttagaacttctctgtgggtcccgatcatatccccagattattattattattctggcttagtgtttttttatatctcagttatttaataactgcctgcttgaatacagccaggtacgttctaacatctggccaaagggaggctatgatcccagaccactgggcttagccctctcccagctcctcctctgttgaggttccccacctgtgcctgctgcagctgtgaacataggaaagtgaacagtgggaggtcagcatgcatgggctgtggggaaaggtcaggcactcaagccctctgggtttcagtagaagattggagcttggagttgtagaggagaccagagtgggaggttggctgaaggtgggcagtgggtgtgcctagacagaatctcctggaaggaactgtcctgggctctgcatgtgtagggagagctgcccagggaaagggagcagtgggactcaggtgagaacagctggcctattgggcagctcacccactctgcaaataggtgactagatgaggcagggcctgactgtaggggtgccgaggagcttggagctatacttggcaatcccagggagcagttgtagccttgccaagaagggtggtgttgacatgggtggcgtgctagagagaaggggaggggcctggctccagggcgggcaggaggctctgcactcccaggtgactttgcagccttgcggggctgccgatggctcccctgaggaagaatggctgttcggggcaggaaggcacagttagttgctgaaggagcaatattggagtgtctcagatggctctgtcaggctttcctgtgatgcaccccactctcagtcctttttagccagttcagggccaaactcccccagaggccacattctacactccttgacaatgagatctttttagccttttgctgtcacagtctgtatcagaaatgggcatgacccaaggagaactgagatactgtgggaagtctaaattctcttccaatatgagggacccccacacccaaggtgcctcaggagatggaaacctcctcagtaactctggtacaaggatggcttttgtcatccaagctttattcactgaagatttggtaaacaaggtattgtgtgtgtatatatcttattttctcatctgaccttgaattaagtcagtaacaggctgtactggatccctctgtgctcataaaatggattcaccaaagaactgatcttattcaaatagatcaagacactaaattcccataaactcttatacccagcctctcttcaaccagaaatcaccacctatcagcacttaaaaaaaaaattccttcctactataaaaataatgcatgaaaattatagaggatttgaagaatataataaaatttaaatcatctataatccctttatctaaagttcactacattttgctatacttctttccagtcatttttctatgtatgttagcatttggttctttaggctttcctagtcctgttacagttaaggcaatggctctaaaatgtttctagatccccagagctttcagaaagatgaagtgagtttcagcgcagttctaaagtagtcataattcataggttataggcaggacctacttctttgagttgtaatggaaaaacctgatattcaacaacaccgtaagacattaaacatgaaagttcagtgattgtcggagattttatcctaggatttaactctcccctcctccagacagggtggcaggaggattaggctttgtgggccccagccctcatgagaggagcagaatgacgccaccctggaatagggtgccagccaatcccagaaacgtctgccctgcagcacttactcttcctcgatcccaagagcaggccatggagcccagtcacttccttggtgcttgggctttcattaacaccaacccatgctggttctggttagtgtgacccagaccaagtgaggagaaaggtgaagagcacagtgatcctgatcacggtggatggtccgggagcaggggccctgggctctgccctcatgaccagggacaggtggcctcccatttctgaactaaccagtggtctctgaggtctcctcctgctcaaaaatctcctgatctctgcctctgtcagaaaccgcctggactgcacgcagtgccttcagcatccatggctaatgaaagataccaagaacatggaggccaagaaactctccaaggaccggatgaagaagtacatggcaagaaggaaatggcaggtaatgagagggtcactttggactgggatgttgcccctcatatttgtgttgttcaagccactttcattcccagcttgccctggcctcacaccaagaaagtttaaatttatttctgaagtagtctgggaccaatttaggcagctgattaaggtacagtggtttgcttagtcctgagtgcagagtccctttctcaaggagatgggatggattcttagcttagctgtctctctgttcctgctcacctttgccccaggggaccgtaaacccttattcagattaagccaatgacattttgtgtcttcatggcttgggatgagcaacatcactttaaggtccatttgtcaaccctgagaatggggtggtagtatggtggtttcacatttctttatgatgaaggagggcacatgatctaaagagagagacatggtcccaccatctaggaaggttgtatgttaatagccatgtgtccttagcaaatgatgtaaccttgctgtggatttttctcatctataaagcggggataatagtggtaccaacttcacagcattgttgtgataattatgagaattacacgagatcatcctcatgtggcctttagtagtacaatgcctggcacatggtgagtgtccagaagcgatcccagtcgctaataggtatgaaggtaggccatctgtcagggaccatttaaagcactatctatgcactaaatcttttaaccctaggaggcaggtactattattatccccactttacagacaaaattgaggcagagaaaaggttaggaaagccatccaggatcacacagctaataagcagaagggtcaggattcaaacccagagcttgactgcaaaacacatagtcttaaccccaagactgcctctgataaaaggcatgggtggataaaattattatccaaaaccacaggatgtttttcagtttatcaccatcatcacctattttatcatttttattaccacaattagaattacaattcttttttttttttttttgagatggagtctcgctctgttgcccaggctggagtacagtggcacgatctcggctcactgcaagctccacctcccgggtcacaccattctcctgcctcagcctcccaagtagctgggattacaggcgcccaccaccacgcctggctaattttttgtatttttagtggagacagggtttcaccgtgttagccaggatggtctcaatctcctgacctcgtgatccacccgcctcggcctcccaaagtgttggaattacaggcgtgagccaccactcccgacctagaattacaattcttaggctgctggagaagacatggtttcttttttttttttttcctcgagacaaagtctcactccattacccaggctggagtgcagtggcacgatctcggctcactgcagcctctgcttcccaggttcaagcaattgagaggacatggtttccttactcagggactacgtagtgcaatggggaactgaagcaactagacatgaaaggatgtaacacgcaccaagatgtataaactatccggatagttctccatagccatgggtgtgtatggatagaacggacctggtcgcaaccagagttggatgtgattatgaggaaatgctcccaggtgcaggagtttgaattaggtgtggaacctcagtcagaatacagagaagaggactgcacaggtggaggagaaggcacagaggtgggagccggacccattccggctgggcttggctggacaggagcagagtcttttagctggatactcaagggacccaggggcattgagactttgcctgggtggcaaagaaaagggaaatcactgtgttggaggcaactggaacactggtcatttaccacaccaggtgactaaatcacagttgcctcagaaagtagagtgtcactcagaggttgaaagagggagcaaaggcgaatgggggccacaagtgtggagtttaagtgaccaccatcctgagcacatatcagctgtgctcctccaccatggaagtcagttcctggctacacccctcatgggaaggtgggtctccaggcctccctcaagtgcaaggtgagttgaaacatctgtagctgcttaccttttggtgccactaggatctgagtagcaaatattctttttaaaaatgtgggggaggatctacaaagtcaaagtcagctgtattaataatcctgtagccagcaggtctcaaagaaatatttctggaaaggatagggaagctgatgtcagggcggggcagtcctcagagcagtgagtctaagtggatattgcttggctgaggctataggttaaggggcagccttatcacctgggaacatctgcagatgaactaaagccaggaggatgcctaaacccaggggctaggagcagagaagagatgaggaaacaggagaggaggcaaagggaatttttcagttaaatcagtcagggaatcatagtggtgctgatttttttttttttttttaaagagacagggtctcatgctgtcacccaggctggagggcaatggtacaatcatagcttactgcagtctcaacctcgtgggctcaagcaatcttctcgactcggcctcctgagtagctgggactacaggcatatgccaccagaccggctaatatttttttttctcctttggtagaaacagggtctcactatgttgcctagactagtcttgaactcctggcctcaagcgatgctgctgcgttggctgcccgaagtgttgagtgcccagcctatgctgatattttaatcaatttttttttcttcttgtttacggcattattagccatagggttttctggaagggcgggggaagaaaagggtagaattcagagaatgaaccttaattttatattttagtatagatggcgacatttggaaatgatttttccacaaaattgcacacaaaagttgtccacaaaaattccattcaacaagtagtttccctgaagagtagcttccctggtaacagctctaaccatttcatgttacgttgctccctcaggaaaacgttttctgcattttaactgcaatcaccagggccttagctccccttggaatatgagggttccctcttgcagcagccaaggttctgtgcagtggggtggagtgggctgtgggcgggggcagagggagaggggaagatcaggctcaggtggcccagaactctctgcagctgtgccagagaaggcaccttcttgttattctggtgtggttttcataaaaagccctagaaggaatgaagtgacatgggaacaaatccctacaagcaaagctaggctgggtatagatgactaatcatattactcatcttggaatcaagttattccgaaagaaggtatattttaaatttatattaaaagaattttacaaagatatgttggaaaggtgtagcaatgggggcaggtaggttgagcagattaacagggtttccgcatgcacactggaagcaaaagactagacatcagaggcccttaggtagccatctttattttctgggaaccataaagaccccagcagtatggaccaagggcattaggggagaaaacactggactcagtatagcacggagtattcttggccatcccatttggatggtatgcactgctcaggggaaactgtagtcttggggctactggtatatatggggggctttgatgggtaaccagcttgctgtatgtatgtcagggaatgtcttagtattggtgccaaaagaccctaatcctgggaaactccacaagcctgcctgggcaagccaggatggctggccccacaagctctccaaggggcagggaatttgtgctgcatgaaggaggctggtgcagatactgctcaccagcgacacaggaacccagcctgggcaattgccctcaagcaagaaaaagggagaaattacaaaatcaaaacttggcgatcttgatgttccaaaaatttccaaaggtctttggtcagtaaagcaacaaccaattgtcagctcaaaggcataaaactggaagactagaacatactgatatattcatttctagttctgacaaataacttcctcggcaattttttttcacaaatcaattcccaaatatttttctatgttttagaaattatatgctggatatctccatcttttagaaaagttctccctatgtgagacatatttatttgttaatatatttactacttcctctgaaatactataactcttttgtttcctcattctgatagcttcattttagtcattttgttatgaaataaaatctggaagaaaaaagacatcgtctcgccacaccacacaggtgaagacagtcctcatcagtcccaatcctgatgtctggaattggggagcccatgggctcaaggcgggtgttccttgctacacatttatggatataaaccagagtcgttctgtagaggtctggaactgcaggaagattagaatcttctgctcccaggctactgaggcccagagaggggaactgacttgcacaaggtctcccagcaattagggttagagaactaacctgtcccttgttgggaatgaaccctctgggtttagaggctcctagcccaggacaaaccaatctgtgttggataaagggaatggagagcagagaagggccgagtctgagaatcgggttgattaggaagcaggctggtctgacattgactacgtagggagggctgccatggctggtaccacctcttacctgttcctgagggcagggtaacctcccatgggaagagctgggtctctctctctctacactttgtctagcacaacaaacaggttgaaccagtaacatctcccagaagagcatgaaaggttgccacgtggcctgagcctgcagaggcattctccgcagggccacacggtggttctgcgcacagttaagttgttcagttttcatctctcaccatcttcccctcctcatcacctccacctggggctgcgtggattctgttcagcgacccagcctcactgtggtggcagaggccagaaacatacccacaccatacagtgtgatgtgtgtgagaagggatggccaggggacagagcaaggtgaaatgtctgtccaaagtgcatgagagcagtctgcagcaaggatggcaggaggcatgacagtaaggtcatcccgctcactgcagtaggtctcctctttaaccatacacacacgcacacaattttctgtatgtttccttagcacccagaagttattcactttcaaaatgatcagtctttttactgaagcttactggctttccaactagtcctaaattgtgaggctttactgaagtacttgagcatgtgaagtgaactgaggaggaaaatggctttgccggcagagtttgagatgcaacgagtacaagccatttgcctatgaagaggctgtttcctccctctctcagggaggacaagtagccagtctgtggtgacatctgttgtctagatgcacagcttttcgatgcctaaaaaagatgctttgggtgcaggggtggaaagacttggttgtgccttagttttcttatcttagtcattcctgttaaccttagaaaaaaggtgaaaaacttactgaaagataagaaacaataagacacaattgtacattattagggatcctatgcttggtagaattttcgcaatgtaaataaattacatctcaagttctgatccttttcagcagaaattctttcctctcccaagtctagtcactgagaagcaaagtgccgttgccttttatttcttcaatgcttctttttggtgcctgaatgcacaccaaggaagagctcctctccagagcttcactgcatcatagacttgtgcaggggccagccagagtgtttctcaaaatcttttaagtctctgaattataaacagagctaaatgggaccttggagatcatcttgtccagccccctcctagagaaggagactgaagctcagagtggttaagtgacttgcccaaggtcaacaggatgctgtgttattattattatgattatttttgcatcaggacttgtgggatctgtagtaactattctcttggccaattataatcacatcactggcattgttttacgagaaatagccccgctaggcccagtcagcaataagtctttggagctgtctcagcctgcagttgctttatataaaccatcccttttatgggagttgaagcactgtatgaaaagggtttttgtctcatgttgaccttgtttagtcacattaacgcacacatcagttccaggccccattccattctctgaacatcttctgacacactgacagtgctgagcagagcaaggttgggttcgctcctctggcagaacctcggctctcaggaggtccttgttccagggaacagctgcttctctggggctgggctctactccctgcagcccctcgcactacccagctggaaccagggacaacgcctgagtccaaccctcgtgtctattttccagaaaacgggcaatgctgtgagagccattggaagactgtcctctatggcaatgatctcagggctcagtggcaggaaatcctcaacagggtcaccaaccagcccgctcaatgcagaaaaactagaatctgaaggtaaggaggagtttctccagccagctggtgagaaagaaagggctggggaacaaaggggcattttgaggttttggttggttttgttctttttttttttattttaatattccctgcaaggataaattcagaagtaattttgggttgccctgacaattactaagtctaataattattcttaatcgtttaactttaagcttaaccattttcggagggaaagttgttatttgtctaatagaactagatgacctcagctatgctttttcatatattttgtgttaaaattaacaaagattgtattaaaatcttcttttgttcttatggcaaaagtgatattctatattaataggcaaaaataacattaaaattacatgtagttgtgtaagatttataaaatattctattttctaccatctttgtggttttgttttaaataaaaattaactcatatggtccacattctttggcattgttcatgatgctgaatcgtgtcatttgaactgggcagactgggactggcaggtctcctcctggagactaatagggtcagttacttgctcaccatcttagatgctgtcccgtccatctcctcagtgaaaaccccagccttttcctgcttcaggtgcatgcagggccagacccttatctcatttggccagagacaccctctgtccctccctgcctggtgctttttgtatccacaggtgagaatctgagtttagattcccttggtgagcaaaggtagggttattggtgaggccagcaactgcctgctctggagcttcctcacagccagggatagagactgcagcacacaggcctggtccctcctgagccacttctgcccctcctcagatgacccagacatagcctgaagggaagggaggagatacaggtgtccctccaagttacagcttttccctgaaccaatcccacatcctggtccacagtcacacagcatgaaggcagtgtgagcatggagaaagagccactggaagctaaagatgcggctaggacctgactcctcccttgtaaaaagcaggtggaacacctgctgcagaaggaaggcagagggataccaagactaggaaggctgatgaggtcctgccctgctcagataccctcagctgaatcctaaagcagcatgaaatgcagccagaaatcctttttaaagatgatttcctctttcaacatgtcagcataaggggaagggggagtctgatccttcctcagcttgggcacagttccttcttctgccaaaaaccatttggcagcaggccaacctgtccccaggagaaaggcgtgcttatgattcagttctcaaagctgccttctttgctaaatcatagcaacttttttaaaagttagtttctttaagctagaggcgaggcgagaacaacgagtgaagaaatgacctggtcttcttctctgtcttctagaagatgtgtcccaagctttccttgaggctgttgctgaggaaaagcctcatgtaaaaccctatttctctaagaccattcgcgatttagaagttgtggagggaagtgctgctagatttgactgcaagattgaaggtaagttgtagctgtgcttctcttcaccatgaatagggtgtggctggatggtagagtccctaccatgcaccgtgggcaagaagtcagttctgtgcagctggggacaatgaggaactgccaagctttgggggaaactgggtcagcaggagctgctcataaagggctatgccctgcactcccacctcctgaaggtgtgtccttcagtcacttccccagggggcacatttgaaatttcacctacttacatcagccactagacctaagtttagaaatggccttgcatggacttacctggctttggaacatgcttagtgaaatgagctttgcaaactgctgaaaagcatgtgacttgcccatatgaggccctcaaaggaaggctggcacaaaggcataggatgtggaatcggcaggctctgctactcgtccacaggctgtgtgaccttggatggtggtccaactcccctgagttacggtccctctgctgtaagatgatagctaagtcacggagtggctctggggattctgtgaggggacatatgtgagaagggggaaccttttagatcttgtaaagatgtcacagagcaaagggaaaagttgtgggactggcaggtacagagagagtgcatgcattgtgacttcagactgaggccagttgggagccaggcacccgggacaaagcactcagccggcaccatcttccccaggctgcttatctgcctgctgggaataatgcagccacagacctgtcagtggtcagagctcaagggaccttaaggggtcatggcatagcacctgagaaatgagcaaagttgatgacacaaagcgtttccattttcatatagattgcaaccgtctagaaagagaagggacaagataagacaggctctttgcttcaagtctgtgactttcacctgccaaccagggtggtgggttatcacccattttggtctgaccaaataaagcacagaagtttattaggcaactttcccgaggccgcatagcacagtacagcagtcaaaacaaactgtgcctcccactttctttgattctccagcaatgtgactagacaatgccttttgagtaaaataacccaaagttaggaatggaaaaaatagtttttcttctgcatctttatattatcaaagtgccttatcaatgcttcgcctaccatagtcattttcctttcctcactcaattaaaagaaagtggatgtgctgcctttgataatgtgaaaattctcggactggggattctgctgaaggctctggagccactgcttgcaattctcaccattaccattgcatttgggtcttctgaagtttcttttcctttttgaatgttttaaaataacataatgattatcattttgtacttaattttctctttgggattgtttcgtacttaattttctctttggaattgtttcattgatatttatgtaacttttgcctggggctctgatgagaaattaaagcatatggatgctgttttgataaaaacaaaattgaaacttttgcactgagggtgcagggcatgggagtggagggtactttatgaccagctcttcctgacccaattttcctcatggtctgggtgttcctaattacttcgaaaaaacaatttctaaaattattttgaaaaaacaacattgaaaagaacattagaattcttgatttcttatgtataatttttattctggttagggctcatattagcctgtttgcattgctataaaggaatacctgaggctggaaaatttataaagaaaagaagcttatttggcttggtgccagtatctgcatccagtgaggcctcaggatgcttttaatcatagcagaagcaggcatgtcacatggcaagtgagagagcgagagagaaggacgtgccacgttttaacaaccagatccgcatgaaatgacagagcaataactcacccattacctcgggaagggcaccaagacattcatgagggatcggcctccatgacccaaacacctcccaccaggccccacctccaacactggggatcacatttcaacatgagattcaaggggcacaaatatccaaaccgtatcagggctacaatttttttcctataaaaatacttcaccaacatttaagagaaagtcaggtggaatatattgtatatttttaaatgtatgtatatatatgactttaaaagcggggtacatgtatatactatgtacctgcaaacaaaatgcataatgttggtaatgcttctgtacatatatatgtacacatacacattaaatacatataatatatattttatatgcatgtgtattttattttttaatgctgaactttgcagagatatgactaatgcataaaggctcattggtgaggtccatttccaattgtccataggcaaattacctgctttggatcagactaagacaaatattgctttcttcttcttagcaatattatcagctcttttaaattatgttttatatagctgttattagctttattcagttataatttatatactataaaattcacctattttaaatgcacaattcaattatttttaatgaatttataccacaatccaattttagaacattttcatcactccaaaaagatcccttgttcccattttgttttgactcttatttttcatttaaattatttcacttaaactattatacaaaattgaaaatttaggctgggcatagtggctcacgcctgtaatcccaacactttggaaggccaaggcaggcagatcacttgagtccaggagatcaagaccagcctgggcaacatggtgaaaccctatctctacaaaaaatacgaaaattagctgggtgtggtggtgtgtacctgtagtctgagctatgcagtaggctgaggtggaaggatcacttgagcctggacattggaagttgcagtgacccgagatcatgctgctgcactcctgcctaggcaacatagtgagactctgtctcaaaaaaaaaaaaagatagaaaattgtattttcggccgagcacaggtagctcacacctgtaatcccagcactttgggaggccaaggcaggcagattacctgaggtcaggagatacagaccagcctggtcaacatgctgaaaccctgtctctactaaaaatacaaaaattagccgggtgtcgtggcgtgcacctgtaatcccagctactcagaaggctgaggcacaagaatcacttgaaccaaggaggcggaggttacagtgagccaagatcacgctactgcactccagcctgggcgacagagtgagactctgtctcaaaaaaaaaaggaaaaagaaaattgtattttcaatctaagaaggtattcagatctaggtgtagagttggaattggagcagtatttcaggtagtactctatttttaatttttatttttttgccatgttggccaagctggtcttgaactcctgcccaccttggcctcccaaagtgctgggattacaggtatgagccaccatgcctagcctcaggtagtactctatgtctgtttaaagatgggtgggtgtggtggctcacacctgtaatcccagcactttgggaggtcaaggtcagaggatcacttgagcccaggagtttgagaccagcctgggcaacatagggagaccctgtctttacaaaaaaaaaactttttaaaaaattagccaggcatggtggcatgtacctatagctccagctacttgggaggctgagggaggaggatcacttgagcccaggaagttgaggctgcagtgagccatgttcatgccactgcactccagcctaggtgatagaatgagaccctgcccccctaccccccaaaaagtgaaaggtgtgatgtttaactgagcacggtcgctcatgcctatagtctcactactcaggaggctgagaagggaggatcgtttgagcccaggaatttgagcaacagtaagctacgatcatgccactacactccagcctaggcaacagagtgagactcatcactttaaaaaaataaaaaaactattaaataagttttttaataggtgggatgtggtgctagtccaacatgtgtgggaaatggaacaactttaaaatattctatttggggtttcagatattggtatttacaagacatgtccatattctaatgtagatatcaaaacagtcgataaaggccaacatcaaaattttctccttaaccaccttaatcaatagtggtagcttacaagttgcttgcatgagttgataagaaattttgaataacagttcctgcaacttgtgttctctccctgtgatgcaggatacccagaccccgaggttgtctggttcaaagatgaccagtcaatcagggagtcccgccacttccagatagactacgatgaggacgggaactgctctttaattattagtgatgtttgcggggatgacgatgccaagtacacctgcaaggctgtcaacagtcttggagaagccacctgcacagcagagctcattgtggaaacgatggaggaaggtgaaggggaaggggaagaggaagaagagtgaaacaaagccagagaaaagcagtttctaagtcatattaaaaggactatttctctaaaactcaaaaaaaaaaaaaaaactcaagatagtaaaagcacctagtgtgatagattatcggttaggtcatttgtgggttgattcttcagaaacagcagttgatacctagcagcgttattgatgggcattaatctatgttagttggcaccttaagatactagtgcagctagatttcatttagggaaatcaccagtaacttgactgaccaattgattttagagagaaagtaaccaaaccaaatatttatctgggcaaagtcataaattctccacttgaatgcgctcatgaaaaataaggccaaaacaagagttctgggccacagctcagcccagagggttcctggggatgggaggcctctctctccccaccccctgactctagagaactgggttttctcccagtactccagcaattcatttctgaaagcagttgagccactttattccaaagtacactgcagatgttcaaactctccatttctctttccccttccacctgccagttttgctgactctcaacttgtcatgagtgtaagcattaaggacattatgcttcttcgattctgaagacaggtccctgctcatggatgactctggcttccttaggaaaatatttttcttccaaaatcagtaggaaatctaaacttatcccctctttgcagatgtctagcagcttcagacatttggttaagaacccatgggaaaaaaaaaatccttgctaatgtggtttcctttgtaaaccaggattcttatttgtgctgttatagaatatcagctctgaacgtgtggtaaagatttttgtgtttgaatataggagaaatcagtttgctgaaaagttagtcttaattatctattggccacgatgaaacagatttcaactgataaagagctggagaactccatgtactttggaatctcctccaagatagccagagtttaatacatcttcattctcaacactctccaaagaacttgacctaccttatgggttccatatttttcttcttaaatgtgcatcaatcatgccttgcccccaacctttaaatatattcttagacctggtaaatgcactcagacttgcgtctttaggaatttttaactttctttcactacattggcacttaaattttttctttataaagctttttgaaggtcataaacaaagaccataattgatgatagacctaatacatttcctctgtgtgtgtgtgtaacattccaaatactttttttttcttttccactgtttgtaaggtgcaacaatttaatatttttaagggactttttaagagttccttaagaaccaatttaaaattacttcagtgcaatcctacacagtatcaacattagaattttgatattagtcttatgttatcttccattctatttttatctgctttttgctgctagtttcaaactgccagtatttttccttttgcttttaaaatagttacaatatttttcatgatagccacagtattgccacagtttattataataaagggtttttatttgatttagcgcattcaaagcttttttctatcacttttgtgttcagaatataacctttgtgtgcgtgtatgttgtgtgtgtgcatgtgtggcgtatatgtgtgttacaggttaatgccttcttggaattgtgttaatgttctcttggtttattatgccatcagaatggtaaatgagaacactacaactgtagtcagctcacaatttttaaataaaggataccacagtgcatgctgtttgttcaatctttgcagacttctctttctttccatgctaccagttgtaaaggacacagctatatcctggaaatgaaaaacaaacactgtggtgcctagatgtgaagaactggcttatgtggttgtgttttgctatggaacagaatgatttaggaagttcttgtttatataggtagccgaatttacacatttagttcaaaatttctcttgagcatcagcttagtactatatcaatcattctagaaggatatcttatagagcaggtgtccccaacccccggtaagtagcctgttaggaaccaggtcacacataaggaggttagcagtgggcaagtgagcaaagcatcatctatatttacagccgatccccattgctcgcattaccgcctgagctctgcctcctgtcagatcagcggcagcatcaggttctctcaggaacgaactctattgtgaactgctcatgtgagggatctaggtttcacgctccttatgagaatctaacacctgatgatctgtcactgtctcccatcacccctagatgggacagtctagttgcaggaaaacaagctcagggcttccactgattctacattatgatgagttgtatacttattttatattataataaaatatattattacaatgtaataataatagaaataaaatgcacaatacatgtaatgtgcttgaataatcccaaaaccaccccctctcctggtccatggaaaaactgtcttccatgaaagtggtccctggtgccaaaaaggttagggaccactgttacagagtatcaggtcctcaagatgctaaaatctatatgacatttttaacatgtgacattatcatcatcatcatcatcatcatcactgatgatactatttaccagggcatggtttgaattggtgactttggtgcagttcattattggcagccaaatgctttatccataccttcatattgaagaatttgttatcaggaaactaccagtcctgctttacaggaagtctgttatcagatatcagatggcaagttccccatgtcttcagatgttcaaacaatattgtggatggtctagaaagagtttaagacatgctgttaaatgtagggctagataattctctgattctttgatgtagtctggaaagaaacaatccattgtccagttaataaatatttagtgttttcatttttaagacactcacaatccacaaatgtccctaacaatttattatttttaaagaaaatgactttttattccttgctagtgaaaaatgtacaatttatatgctgcactgagaaaaataacagatatactttcttccattcattttcatcccaaacatataaaaaataatccattgattgttccttgcattgcatatcttattaaaagatatttcctacatgcaactaataagacatgctgactgttgtcagctctaaatttatgtaaagattttttatttttgttaaaatgtttgaaatttgctttttgctccacacctcacctgtttttgataaatctgtgctaataagtacataggaggtaataaataattgagttgtgagaaacccaattctccatttttcaagaaaacacaagtagcactactctctttatcccttgggactccttcctgtaatttgaaagggggggctaatgttggtggcagttgttgctaaggatctctgcacagagttagggcttcactctcggcttcctggttagatggggccatgtgactagtcctagtcagtgagctgtgaccagaagtgatgtatgtaccctcgggaccagagcatttatgtgctggtacaagcctctccataatgacgggcaacacatgagatggtggctgctgcagccatctgggtctctagccaacccaaaatggggacataacacaagcaagaaataaacatttgttcttataaatcaccaagattttggggttctcagtggctgcaacataacctagactatcctgatacaggcttatcaccatgttctggatgtgtggtgaccaggatggtagccactactcacaagtggctatttaaatttaagttactttaaaaaataaaataaaaaattcagttcctcagttgtatgagttacatttcaaatgctcgacagtcacatgtacatcacttttcaaattatgtgaaattaaaactgaaaagcttgtgtgaaagtctagagagtatggtctatagtttcatcaattgtattggataatatagtctcgatactcaa

SEQ ID NO: 65 - DNA, 102335 bp, Homo sapiens
gtgaggatgtgccgggtggtcctttcctcctcctcttcctcctcctcccggctccctgcctagtctccatataaaagcggcgccgcctccccgccctctctcactccccgctcctctccgccgcgcactctccgcggcgctgggagagggcggagggggaggcggcgcgcggcgccagaggaggggggacgcagggggcggagcggagacagtaccttcggagataatcctttctcctgccgcagtggagaggagcggccggagcgagacacttcgccgaggcacagcagccggcaggatggcgaccgtggtggtggaagccaccgagccggagccgtccggcagcatcgccaacccggcggcgtccacctcgcctagcctgtcgcaccgcttccttgacagcaagttctacttgctggtggtcgtcggcgagatcgtgaccgaggagcacctgcggcgtgccatcggcaacatcgagctcggtaagtggccccgcgcccccagagacgcgcgctgggagacgcgcaaacacgaccccacccagggcgcgacggtcactgcgctcctcccgcgcgccccgcacccatgcctctcctcgtcacctctcatacttggtccagaccctttctgggctaattaagaataatccgaattattagatatgagacccagagggagagtctccaataaccttgagggatctgtcaccacgctgagtccgcagcctgtgctgagttggccaccgcctctcccgctaagtgaaatgcaggtgtcaggggagcagaggccacaataaagccgcaaccgcaggaggcagaagggtgggggagacctgatgcaaccactcctttcagtcctcttctggcctcaggaaaaggctgggacccccaccaccgcagacctggggccgaagcccatgtgccagggcccgcgtgggattcatcctcaccacggctacctcagcccctgagaaacgccttttctgatttcaaacctcccgatcctttctttcctcagaatgactaggctagtcctagggccacgcccgctccccccgcccccccctccccggggagatgctgggatgcagaaccgcctgcgcttcgccaccagacagagcccgcctcgctaccgcccttggggccttggctgcagctctcagaaaggacaatgggaccccaagttgcggggtggggctgctgcttttagaagtcccagcctcgggagtggtagcttgaagggggtcggtgagggagacgtcagcgggtagggtcagctcctcgcccggtgctcgcaccagtggcgcgctctgcggaggccgaatagcggtacgccggggaccctgggcggggccgtgagggtccggcgggcacagcctcgggcgcacagagagaccgcccccagccccacccgagctgccgcagtgcctccggaccgcccgccacacctgcccccccacactgcggcgcccccgtcgggcacggctggctgggcttgcgctccgcccgggcctcgggctggcgggggccgcgcgcccccacctctcagtttgcctggctttgttgccctgggagtccctgggtgggcagctctggtctctgcctttccctttatccctggcgtcccggccctcccctcgctcctgacagaggtcgccgggtccctccgcagccccagcccgcgctctattctcctggggtggtgctgaagcgtttctccgggagacaccggttggtgggcgtggtgcagtccgcactgcggtctctacggcagcccgaggcggacaaagggcgttcacgcagccctcgttccccactccccctccccaataaaagacgaaagaaaaaccttgttttagatgaaaaaataaatgcttgtcatctgcctctgcagttggaaacggccacttgtccccagaacaaaaggctgcagggtggggactggagttgcagacctggttcttttgtttaactttaaagcacttgattttcccttttagcttaaaaaaaaaaaagaaaaaaaatgtgagcagaaagtcatagtattttattccaaaaaattcaagaacaagagatatttcagtagtgaaatgtcttatttgagcatctcaataacccttcattttcagactatataggcctttggtctaatctgttctaatttagtttatttgcacaattttctcctggaaaaattttacacatactgactttgggtgtggctattgtgggaatcaatgactttggatttttttctttaaaaaattatttgtaagtagcatttctgggaaataggaatatattaggaggtgcttttctatctacaaaatcttcataaccattcgatgtggtggtgctaggagagggatcatcaaccccgttttagagctgggggcccagagaggcaggaagggtaagagaaccggctcaaggtcacagcactcataagtgacagaagtaccagtactgcagcgtcactcgttttctgaccctgtcatgatgttagtgcagggttggctaacatcctatgatgggaggaaggtttcagtacaacagttttcagggcttgcctttgtatggccatccacttgtgggcagcgccccatgctgggagatggttcagcaatcaccttcggatcgtaattatcttcctgctttgttactcatctgatcatcctttcagcgccctattcctcagagggtttatacaagctgcatctatttatggagaaaacagacgcatccacgtactgctatgaagaagggctccctgcctttactcgtttttacactactagcacttagtgacaaaattcagatttgtcttcttgacattaattttttaaaaaattcggttgaagtattatatagagaggaaagggcacaaatcaaagatgagcagctcaacgaattttcacaaaacggacacgcctgggttacccagatcaagaaacagacattactggaaccccagaagcccccttgtgttccctttgcaatagacatcatggcttcctgattttttaattccctaatttggtcaggtttttgcatggaactccgaaatgactgtattgatcccattaagaatcaaccaagtgagtgagcagagccgtttctttacacaccgtagcagatgctgcttttcctctgaagatggctctcctgggttctggggtcttggctgcagctcaagatgcaggcccttccagcgctaagtgaaaatcctgctcccatagcttttcagacagtctgagatgacttagcaacagagcaggctggtcctgttttcctgtgcacgacaagctgctgcttcagccgccaggtctcagctgggcctcctccagaggccactgctgttgttgcttggtgcctttgggccttgttgtgtgaagcaagatggagctgctccaggggggccagctctgatgattgtgtgttgcaggctgggaaggcagttccgcatctgttactctttcttcctatttcccctcctgccttaactgagattctgggtttggagaccctggcgacttggattcttgccatccgattactgagggctctctgggaagcctagaaaataatctataaatctgtagagacatggtggtaatgcagtaaatcaacaggcctggaacgtcccaatgtggatgcttcgtaaatgcctcttgaaaccagggaagagagatggtccctcttgctttctcaactatattcggaaagcataatgaaagctttggacatgtctcctccagagtttggaacaatagtgtttcctcggactaggctagcttcatttatttagttatgcaggactttattccaaatcgttttcgctaccaccaactactactctttggcacctcctttttctcctccctaattagcccccagcatggatttagctagtggttctcattttcagcaaaaccctgcttcttggttttattttaatacatagaggacatacatccgtgtcttgcaaactgaattctagagccttgtgaacgttttcattgtttcattttttttttaaggaactaaaacatataaagaatattaagtgtctgttggatgttttcaattaccgttagattataacttttcctttagttaacactgggaatcagcaagatttgttggtgaaaagatagatgaatgtaacatctactgctctgcatttttagataaaagtttagctgattacattgttacattctgatgtcacttaactgaatgtccttcagtctaagatggtaagagaatttaaaacccaggaaagatttggggtttagttttccttttcttttaacaggggaaataagaaaccaataccatatgtggtgagaattaaatgttagagagtcttaaatttactatatttgcctatacttttcaaagtcgaagacagatggatttctgcttgcactgcttaattggtattatctacgacagctctgtgatccatgctgaaacacaaggcagtccccaaatttaaggtcattaaattgttcaccttctctaagggcttactttaaaaaaataagttataactttttagacaagcaaataattatgtcacttctcatttgcttgtgttgtaagatgttatctcagacctaaattatttattatcaatgctttgaaactatgagctctgtatgtaagatattatcgtcattacatacatatgttatgaacatcaagttgctggctttaaaaaaagaaaaaaagcaaattaaagatgagttcaagggaaaaaataagaattttttcctctgagaaataaagcattcctaaatgtagcatttcctttagttcatttatttagtttatgatttcaatctgatttcagaccactttttagcatagttttacaaatataatcttatgattctaggttaatgatttaggtacttggaaaaaatatccaaaagcctgtttttcagagggagcaactaaagcccataaaggaaaatcaacttgccaaaggcccaaataactgtcagatagaacccatgtgccatcaacatacaatgcatggtcatttcattttgctttcttcaatccactgtcacctttagaaatatgaattttagcttttaaatgggaggtgcttttttaaattgttggtttcattaaacaaccctgcaaaatgcttacatgattggaaaacttggaacaatctagcctgtacacaccaagagtacctgacttctcctcatttttcaccctgacttgttctttaatgacccctccctgcctccctgccccataacctattcttttctccttttctcatctgtgtatatcatgtgcatgtcagcctcccttgtgtgcactgctaccacctggggtcagagaactgagaaggaaagatcttttgttgctccctggtcccaaggagctcactttcagggctgggcaatagccacagagcaggcccagattgttctcagagatgacggatgccttttggctccagacattgaaagaatggggttcactgcctccaactgcctggagttattctgcccccacctgggtaagcccagaaggggtacagtcttagaatgctggggaaacaaagcctccaggaagagcttgacttggtgtatattggggtgaaaattagaaagagggcttccctgctccccaacagagaccaggatgacttgcttctgaaagcctctttagaacctcttcaccaacaccccaggatgccctccagccagattcagagaggggagaatatgggaagggccaaagagatatttttctgtcctgtaaactttagagggctcactgttggctccttgttaggcacaaaggggaactacataaacctactaaatgcaatatgaaccttcattaacaactactctttgcctttaccaatattatccagcaggagatacaaagtaattacaaattattttatttctaaaattggtatggaaagtggcctgattccaaaattttcctttccaactaaaatagctggcaaatccaacataacctttattttataagtggtagtagtggttgtgcattgctaagaaacaatttgggtggaaattgctctcttgaaaaaagaaccctacatttttagtttcattgggagtgtaaaaatgagaaatatttttatcagccgtttactagtataatttagaaattactaagtggatttatcatttagtactttttctattgctaaattacaaatatgtcaaaaataaaatatgtatgaaaatataaagcaaacatttaattgtgtgtgccatgacaagttaactgaagccaagggaaaatggcaagtaacaatgtaagagcaagtctgcagataaccctggatgaagtcattcaaataatgtaccaatttagacattacttagaacaaagacagaaaaattgtatgaatttaatttaaatgcatatgtctcattattaacttattgacccagcttgacagggtagaagacaaagtagagctcagacctggaacaaggagaattcagtcaacaataccaattaagcagctcagacaggaactcgatttttttgcactagactagtatatagtgtatacattgaagtaaaatattctaatgaattcagacctctcaacctgtcaagctctctgtgaaacaaaaagaacccatttatcatttctgcactaaaaagatctgcgaaatctcaacatgcctttcttgttaaaattcaaatactccattagcacaaatgcaaactgaggctattaatgtttccaggaagagccataaaattctcccttataatttgacctttccttaagcacgttaactcttccacatctgaattcttcccattgatcatatgagaaatttctgcctgtatttagtggacacacatctatttgaaaatattcctcctggttgaaaaggtctgtggtgtgtaatctaaagatattttagatgtgcagtgaactgagtttccagaatcttttttttttgtaatgtctatgtataatccaccttgattctttacaggataggaagactgaatacaatataaccaagggtaaatacaaatatgccttaaggatccagtgtgtatttaagtaacacactgctatttattccttcaagtctgtatacatgactaatgtccaacaaaaatgattacatgactgggtgttaatttagagatagttcacctgctgtgttatacctagaggttcaagcccttacctttaggaggtatgcaataaatgtctgttgttctagagatttgttcctggcaattgagaatgctgtatacaaaggtacaatgatggataccacacactggctccaccatgagcaacctattaggaaaaatgtaatatataatatgtaaacatgtaaaacacacacacacaccagagttctggggttccccaactttccctggcttactctccagacctcccttctatgatgctctctggggttccctctgggccatcccctttgggagggcaggagaaagaggacagtgggaggaggaaggaagaggctagagagtagggcatgagcacaggaagctgccctcatcccgcctcttgccctcctgttcctctcaccctggatattcctttcagcctagggaaaggaagtctgataggacttcctttccgttcagcctagggtaggaatagctgattcatgtccccaactccataaatgttttataaagtataaaaagttgccatttttctttgcctctggataagaaaattgaatacaatgaacaattgtgaataaaagagctgcctgccaagctactcaggtaacagaaaagtgcctggaaggacagacaggccaagtcttgaagattgagtggatccactctgtttatcaaagatcacataaatcttggattgatatccagggctcgataaaccaaagtcaaaaacgggattggtaaaggaaagaaattacacatgtatactaccagaacatcattttagaaacaaaggcccgtgcttgaatggcagcccccgtgtattttctttgcctttattctacattttcttgccacctacaagtggagttagtctgtctacaagctagagttagtctgttggcctcttagcttcttaagaactaacatcttcctgccctttctagtccctccctggagtacagcctgtcattttcctaacaactgttttctttgactcttccagaagaggtgcatttactttttatgaggggcagaagctcagtccacactgctaattatccctcccttgtggcctggtggagagacctccctggccctcccattttgtgggcatccactgctaagccaccaagctcttcagaaaaggagttcccacatcctccctgaaagcctgagaaatattacagtgatgttgtccaaaccactctgaaatgactaactggaagtctctcaactgtctttctttccctccctaggaatccgatcatgggacacaaacctgattgaatgcaacttggaccaagaactcaaactttttgtatctcgacactctgcaagattctctcctgaagtcccaggtgaggcttccgctcagtgttggtcagcctagaattccaaaggacaaggagcaagctagaaagctttgtctgaggcagcaaaaagactctcttattgctaaaaggatactttgtatttgttattatcaactaggttagccagcagccacagtttaggaagtcactctaggttatcactgtgtgggttatctattttgtggattcttaatgagtttttaagttctagggttgtgtatgtgtatatatatacacacacacacatcaatgatcacacaaattttgaattgatatccagggcttgagaaagagagagagagaaagagagagagatagtatagtgtgtgtatgtgtatctcactgtactctgagctcaagggactacaaactatttaaatgttaatcttactcaaatgaaattctgaatacaaattggatgctcctaggatcccagaactgtcttcctgcaaaagaaaaaggaaacatatactgcatttcaaaatgaaatatacatcatcatttcataattgcattatcacccgccattgcattaccacttatctttcttcgtgtgggtaaaagaatctgatattacaaacttctgttaaaatagcctttttttcagagatgaaaaagaatatcaaagaataattaaaggtaaggatgcaaaaatttgtcatatgtgaagatgttcccactaaccagccaccttcctggggctatgatctgacccatgcctctggcgctggagatgtattcatactgacccatctcgtcttcttcttgtgagcaataacctatattcctcccatttggtcacatttaggaattatgagacagtttctggcccataaagactccaaacctggaatatatttctccagacctttgccattgacccatcagaaacactgtattacatcttatttcttgaccatcacttgaattttacataagagaaagctattttctgcccatatgcttttgttatatgattcctaattttattggcattgatataacatcaggaatgagattcagcctattttgactggttaggtcatattccattagtcgtgtatatacattgatatttgaaatcacttttatagaatatcagtgccttcgtgaatcacatttggctgcagtaatatgcccataggactgtctcagttcttccttttgagtttaatattagaataaaatcccatacatttcagttattgaaatgcattgtagctttcaagtatggaattgagtaaatgtgctaagaaaagcttagcaagaaatggtttattaaaagttaacttcctgcaaagccacatgaaaaatcagtttttaagtaactttgctttgagaaaaaaggaatccagagactgtcagacagcatatgatttgctgaaggaaaggtacagtataaggttgtttctcttgttgttattttattgtatttttgtcttgcgatatctccgtatcttttaaaaccatctcacaaaaaaaatgagggaagtgctgttttccaaaaagtatgattatttcaaaatgtaaaaactacaagcttttattttttctctgtaggttgttctggcttttttactatgattgtttgtaagacttctttttttgtgtgtacaagtcatgtggttctcattgtgttcattcatatttggactgactttatagagtgacaactgcatattgcataatgaaaggctgcaagcattgctgaagaattaaccatttctagacccaagacctagtattgctcctgtggagtaggaagatcaagttcccccaaactgtcactttagcctaatgtaccccattctcctctcctttctcctgctatcaccttcagtaaggattagttacctacctagttgtatagtgttatgctagaggctgtgtttggagattggcctttggacacacagcatctttactattcttgccaatgctagaaaggactgatattacgactttccctgtcaagcctatgagtacgctttacaggccaaggctcccctctgggaattaagcatctagaatagagccattatagtcatgctcctgtgtggggagcatgaaggtttccaaccaggactgtaaggtgataaaagcacatgtcagattcagtttcagataagtgtgttttaaagagaagagatgttagaggataagaagacatggagatcacaggatgatcactggattgggcccagggaagcctttagcttttcctgaacaaactggaaaggttttatggaaaaatttgaagtctgtttttaagtgggtccaagtctagtggtctctagctaactcatgtacttcagttcccctgaaatggaattagctgaacattttcctttagagtttcaagaatctttcattgttttttgagacagggtctcactatgttgcccaggctgctctcaaactcctgggctcaaatgaccctcccacctcagccttccaagtagctgggattacaggtacatgccaccacacctgcctaatttcaagaatcttaaattaacttagaaccaaggagcaagatgaaggatggatcccctaaaaaaaaatagagccatttttcagccaggtaaaacattgttaaaaatagcacctacaatataccaggcattatagggtgcttggtgagtgaggacactgtgaagaacaaaacaaatacagtcattacctttattacacttatattcttgtgagaggagaaggcatttaacaatcatatacagaccaacataaaatctagccccctgcatcaaatccaggcttcaaacagatttttgggaggtttgggtttaaaaaaacatagagacggggtctcactatgttgcccaggctggtcttaaactcctgggctctagcaatccacctgccttggcctcccaaagtgctaggattataggcatgagccaccatgcccagccacagttttgttttgttttaaggccagcagagttatagtaaaatatttattgccttttatgacataagtaaattaaggctcaagtcacccatatatctgtcttatgttcctgttggttatgatagcttttgttgttttttaataattggagttcacttgtaaagactgaagatagcctcaaattgcagctaacagattgtgcaaatggcacaagattgattcctttatactagtttatcccttatactagtttttaaatatggttttgagatttgatttgactatttcttcaggattgtaggtctcattcaagaccactctgaaagacttagtcatcttgaataatatcctttgagcaggaatctgaaatatgagtgctttctgtacacaaggtgggtggtgggtgcctcagttccccagaatgttagttctgtgatctttaagctctgtccaactctggcatactgtaattcttggagtggtcagtcatctgggcttatcttactattattttgccttactattgcagccttgccttgcctaaagatcactcaacaaacctttgctgtgtgcccagggcaggtctctgctgatttgccttgatgtaaagccattcctggccacatctaagctggatcaagtgagaacagtcatcttgaaagaaaaggttaggtgttcctttatgaacactctctaatcttttactcaaaggaaagttcagtagttgagtcttttcaaaatagagcaacagtcttttgttgttgttgttgttgttttgaaacagtcttagctatgtcatcgcccaggctggagtgcagtggtgcaatcttggctcactgcaacctcaacctcctgggctcaaatgatccccccacctcagcctcctgagtagctgggaccataggtgtgcaccatcacacctaggtaattttttgtatgttttgtagagattggatttccccatgttgcccaggctgatctcgaactcctgagctcaagcaatctgtctgccttggcctcaaagttctgggattataggtgtgagccactgtgcccggccagaacaacagtcttatatttctttaaagttatgattttaaatactatcataaaatttttatttacctattatatcatatgttttttgtaccctaatcatgttggatgagaatcattttggttaagtctgaccacaaaagcaaagctaggcttaccatgctgtacagggtttatttcattttccgttgccatttgcttctttcccaaatgtaactttaggactgtctatgtatagtagtaaagaaggatatctcccaggggttgtaagaagtgccccataattatctgtcgtagacagacatcattttgaaacaagcaaacaaataaaaactattctcaggacaagtgatgtcagactgaaaatcagtttcaatttttattttttcccttaattttgccacttttatctgcctattaaaataatttaaaaattttgatcatctgactcctcatcagcagcctagcataatgatgaagagtacagattctggagtcaaactgccttgtttgatcttaaccccacggtttatttgctgtgtcatcttggacaagttaactaaccgttttcagtcttcttgtttgtaaacaaggatgatcagttccacctcatagtttctttctttttttttttttttttgagatagagtcttgctctgttgcccaggctggagtgcagtggcgcaatctcggctcacagcaagctccgcctcccgggttcacaccattctcctgcttcagtctcccgagtagctgggactacaggcgcccaccaccatgcctggctatttttttttgtatttttagtagagacggggtttcactgcattagccaggatggtctcgatctcctgacctcatcatccgcccacttcagcctcccaaagcactgggattacaggcgtgagccactgcgcccggccccacctcatagtttcaatgcagatcaaatgaattaaagtgtgtaaagctcttaagacagggcttgtcacatggaaacaaatgtgaacgagtgctgtctcccttctggagtatctatttgacttgtatatttggtgattgttattatccgtgggaaataccgggtattgatatttggctagtttcctttttgtagtaattttaaatttgtattaaagatgtttctcagagaaacgactgctttcagcattctcagaaggcgcagagctgctgactatgtgtaaagggtgacaacattctatggctgagcttctaaggtcctttgggcttgagagcaaaaagccggcaatgctttaaagtgctggctggtaaagcagagcctgagagggggttggagaccatttgcaaaatggtcctgtgggtgcccacgcaagggctgtcagggaacgtgtgcacagtttgagggctggcctgcctccttgctatgataacccatccatggtcactccctccacgccgttctacactcgcttttctcttctgctctcaccaatcaacaggtgactatagacgttgccaggtttaagaaacagatttcttgtggtttattttcttagctgaatacacagtaagaccttgatatatttacattttgtcactagttttataacatctagatcacattcacaaaaatcatcataaaatgtgatggatggtgtatatgggcagttttgttttaagaaccgatgcctttttcctagaagataaacgaaccacagctgagcatctttagatttgtgctgagtgattgctaaaaacatcttgcctggagattggttttcgatggagaattagaatcagccctttgaatttcagtcatgcgaatcttctccctttgacattaatgaggcacgggttacaactaatatttaccagttgagtgataagaaaatgagaaaatactcttagaaaaggtctaagaatattttaagccatctttctctgtctagacttgtgtgtttagtctgttgtgtgtagaattatagcttaattgtatgtgcctagaatacatcaactgctctatgacagggagtaatgaatgtgttttcagccctgctccaacctttaaacaataaggcacacaaatatatgttctagcggcattcaaggggctgactcaccctcagggaacctgcaatttcagagggacagccgattctttatcctcatgttttctgtgttgtttgtgtacacgcacaggtctaggtacttgtccccatgcctgtgaggctctgctcatctttcctcattgcatcatcatacaaggttataggagaaatcgtggtatgttagaagaaaatgacaaatagagagcattatattcgttaaggtaaccagatctctgtttaatattccttgaggtcattgctgcctgcctgggaaggagagtcccattttaatgcaaatccctagcctttctcccacttgccccgtgccctgagccctcctggcccggttgcagggaacagagtgatcggcagctcctcatgctgtccgctctcaccccagtgctcccattgagactttgccgcccaagcagcagacagcccagtcacccccacctgcatccttttctagcggtgaaagagccagaccttccaaggagaagattagaattttatagtgtacgcagcataaggcataattcctgcaagctttacatcttggtcaactttcaaatttcaggattctttatatccagatcctcacatacaagggaattttttcccttggtgcaggtgtggccagcagaaaggaataaaatggcatttcactgccatgttcaggcttcctcattcctcagggtagttaataatgggctctttcagaccaccctagaaatacctattcatctcactttttttttttttttttaagagtggaaaggatgttttactctgctgactgtaatggctctcacgcagttcctaatgggcactgtggaaccactcagcatagacaggcataggcaggaaggtagcagaaaatgggctgcctgggcccaggagccattttaggagatgtcaataacccctccattaaacccaactaagtgcgttccacgacagctgctaaccaaggacagcacctcatgctgagtgtcactgcttttgtcttcatctccagagaccaaagagagctcatgatttttgttagtagagtttttttttaaaggttttttttaagtatgcagcaacagcaaaccatcaagcaagcacagtctctttgctttttctgcctgctttttggtcttcctctggggcagtttgttcagcacctatggtagcctactagaaataatggtggaagatgaagaataaagcataaactaatagatcactttaaaagtgccaagtaatgtttttgagtgcttattaataagaaagcaactgtaagggaatatttggaagaatgaagtatttcccactgtttataattttgttgggaaaataagtcattcacagctttaaaattcactgtgtttctcaacaaagaaagagagtttctttttatttttttaatctctttttgtttttgagacaggttctcccctctgtcacccaggctggagtgcagtggtgcaattacagctcactgcagtctctgcctcctgggatgaagctaccctctcgtctcagcctctgaaatagctgggactaccagcctgccactatgcccagctaatttgttttttttgttttttttttagttttttttgaagatggagtctcactctgtcgcccaggctggagtgcagtggtgcgatctcggctcactgcaagctatgcctcccaggttcacgccattctcctgcctcaggctcccgagtagctgggactacaggcgcccgccacgacgcccggctaattttttgtatttttagtagagacagggtttcactgtgttagccaggatggtctcgatctcctgacctcgtgatctgcccgcctcggcctcccaaagtgctgggattacaggcgtgagccaccgcacccggcctatgcccagctagtttttaaattattttgtagagaaggagtctcactctgttgcccagtctggtcttgaactcctggcctcaagcgatcctcctgcccccacttcccaaagtgttgagattacaggtgtgagtcaccctgcccagcgtgagagttctcttaatttgcgaactgtgtatatgtgtcagagagagagaaagagagagtgtgtgtgtctaattcctaaagaagaaaggggtgaaaatggagagtataataagcattgcattttgattgttcaaccatgggtttagtcacaatgacaaaggttacccaggtaccagcaccccactcccagctgcaacccaggactaattaaatgctacctaggcaacgatcaagtatccccagacatcatactccagggcttaccccttttgttttctcggctgtgatctaagggtaatttctattgcatgtgaagtcagatttccttggtctgagagaaacgtgagaaagtaagaggtactctggggaagcgcacttagtgcaccacagggactggagaaattaacataaatacaagacaataataatgttattttaataaactcttctaggttaaaggattgcctatagtcaggactggtgaaattgatgcttatagaaaatgcaacaagagcgtctacatgtgatttaaaaataaaagtaagtaattaggaatgaaaattgaaaagctagggtagtgttttattgaatgtggctcctctctgcagttgtaccgcacctcatttgaaacactcaagctgaggttgcctctcaaaattgctgccttgcattcctgaggggttaagacgaaatatgaacatcctgaggactgtctttgttgtcatagagggaagtcctctaaacacgcactttgccattaatctggccatttctttctcaataaaacaggttttcaatgggagctgtgagtaaacacgccactgttgagcattgtggctcaaattcagatttcttgttggcttctcacgtggatagtgcgaggaaggaacagctattcccctgagggagcaacacgtttttagtgcacctggccccaggaacactgctctacatagatgtggctttttggatcctgaagtgtatccatcaatgggaatgtcacatttggagaagttatccttattgcaataaaattaaagatcaaataagttctggaacccaggcgaacaatgcttccttagtgcagagccattttgagcagttgtctcttgtgccttttaaaaacctctcacttggaagttttgatgtgtgaaagatgtgaaaactgcctaagagaattcttcctctttttaatggagctcgatgcctgtttagggatgatgtagcaaccgcttttttatctagaattccagatagtttcccagctcaaatactaggagtttttggtggtgcaattcaattgaaagtggtatttggtgtgaagttccagcagccccacaagatgctcaagtgccttgtagttagtttagtataatgtgcatatgtgtttgtgtgtgtgtgtttgcatacatgagagaaagagagagagagaaaaccttatctgttctcatctattataaaggagacaatcctttcattttatatggtatctccttttgaaggtgtcctgttagtgtcctattatcagccaatctgtcattaaatatttatgttcctgcagcaaggcacagttcagttcctagctctgcaggccataagaagacttgtaagtaaatcctgtcttcagttgtttacaattgagtatggaaataagataactaatgaaacaagccagtctataataagtgccaaatgagaattttgcaaggaggtccttctgtaaattctatttgttcaggctattttaaaaaaatctgtgtgcataaaaaaagcattaaaataatattatccatgcaaattggggcataaatgcaacagatcctaatgcactgaatcatctttgtgaccagggaattttgaatccagcctgaattaaaatatttcctagtttggagctacattttagattaagcccattaattcaatgatgaagagttagaatcgataatttaagaattcacccttctgaaatcatgtgagaacaaaactcctgacctggatgtataagcttaatttcaagattgtctttatctttgagtgctggaaaattgtccattggcagactctgaagacactagggaagagattgtgaaagtgaaatgttttaaggaaataaatgtgaagtaattgtttcactgccctgaggctagaatgggtactttggagagtgtctgattcagctgtccctgtgttgagggaagcagggaggggacaccaattgcaagctgctttccaggacccttccccctccggagagaccaggaagcctgacctagtgcagcagctctgggccacacctgagagcattgttgcccatggtgctccctgaagagctgctgtcagtcctttccttttctgtaaaataaagggattaggctagatcaggtcatcttaactttgttctgccagccattagttctgcaaaacattaatagtcagtggaaaagaatttcatggtgacttaagtttgaaaactgtgacatactccatctaattttttgaggaggcataaattgtatgtgtataaacttgttcaattttgtctaaccatacatttccttagcctatttgactagtcacttctatcaccactctctcccatggatctagattcctgtaaaacacaatctgggaaaggatggattaaatgattgctgagtcccttccagtttttttattccattattctatgaatttttactaaattgtctcatcactcgtatgtagatgggagcttgtcttacttcattcagcttacaatggcttttaatccaggctttaaaatatcaatgaaagaatttcatttagaaaaaactgcctgtcccatccatgagtattcttaattttaggaaagatgcacagctttatgacactcaggctgatttcccagtttgggaattcttggccctggcttttcccacctgtctttaccttgcagacaaaccaaacaagacaaaatttaatcatgtttgcacaatgtcaaacacttgcatagagactatccccaaagtcagctcatgggtgttttatcttcacagtgccaaataggaaatagctacatatgtttcccattaaaatgagaatttccatgttggtatctggtgttgcattgagcttcaggttagctgcttattcactgatctttggaaggaggctgaagattgaacctcaagagttctagggattatctgcaggttgaaggtgttaaaagtcccaggcacattgtttgttatcgctaactgcggatggcctgaattttaataagcatggtcaactgtgcatatcttgtcatgtgaactaccaattagcacaccataatttagcaagttagtacatgcagatatgaacacccttgggaaggaagcaattttcgaatcagattattactgacagtgtacaatttacatgcaggtaatcattatcagaaagtcatgattatccagaaggaaaagtgatttttgtggtaatatatctttgaatggctgttgatttttaatacctttaaggtaaaaacttcaatttgttccatccctaatttgatcatatttgcaaaaaagtgttaattcactcattaaaacctaggcgtctgatgggtacagcaaaccaccatggcacgtgtatacctatgtaacaaacctccacattttgcacatgtatcccagaacttaaagtataattttaaaaaagttaaaaaaaaacctaggtgtgatattatgtgtttacaacaaagcttaccaagtattctaaaataacagaaagaaataatttatgtacaataacaacattaatgataatatatccatggataatacgttttggttaatcaaatattctagctaattgagagttgccaataatccctcgtgggattattatttttcaaagttgtagaatccaataatacagtcatttcttttacacaaacacctaaaatttatctagaattaacttagaatttcctaaaccaaatttatacattagcccaagatatacttaaattatttatagaagacatgaacttacaaatctgttgtttcttctcccacccaaatagaataatatcttcaaagacagtctttttttaaaaaaggacatattgttccccttaggtagatactggcattttattgaaatatagttcaagagacatgcattcaggcaagatgagtgcacaccgtgctacctacttggaacccaaactcagaacagtagaattgaatcttccttggaagactcaggaggaagatcatctctctgtgcctcagggtcctcatgatgaacctattggtaattatactgtaaacatgagggtgtgcggattagtagcgatttcttatcactgaatcattagtgagcaaactatttattttgaggtggtgtcctcaatactaatatgattgtgcttcaatatagaacaaggaatatccctggatgttatagtccttctgaaaaagagtcattgattgcagatattgttttaaaaaaaaaaaaaaacactcaaaactgctacagagaaaaaagaaagtgtgaaaaaagagaccatggctatcttctaggttattcgaagaaaatacctgagtttgcaagtatgcactagctcactgcatttgcactgtcctgatgtgcatacagtggggtgcacccgcctctaagtcccaaccatttttttctttctacttcctgtatccccttgcctatgaaaacataatttttattttattttattttttgagaaagggtctcactctgcgcccaggctggagtgcagtggcaccgtcatggttcactgcagccttgaatttctgggctccagtaatcttcccacctcagcttcctaagtagctagggctgtaggcacatgccaaggcaaacaactaattttatattttcatttttaaatttttgtagagacagggccttgctaagttgcccaggctggtctcaatctcctggcctcaagcagtcctcctgccttggcctcccaaagtgctgggattacagtgtgagccactgcatttggctgaaaacgtaattttttaaatagacaattgccttctctgttgcaccatctccctccaaataagctaataaacacaagaatccaaccaaaaggtaagagagatgagaagtgagattttttttaaaggcttaatcacttgtgctttaagatttatctggaatatctttagatcctaggaagagacaaggttgtctagctaattgtgtagccatttacatgtacatatgtaattgtatgtgtgtgtgtatgtgtatggctttgtttttatattgtatcaaaatgtatttcgcttttcaagaagcattagaagatccaagtaaatagggccgggtgtggtggctcacgcctgtaatcccagcactttgggaggccaaggtgggcagatcacttgagatcaggagttcaagaccagcctggccaacatggcgaaaccctgtctctactaaaaatagaaaaaattagccaggcgtggtggcaggcacctgtagtcccagctactcgggaggctgaggcaggaaaatctcttgaacctgggaggcagaggttgcagtgagccgagattgtgccactgcactctagcctagctgacagagtgagactccgtcctaaaaaaaaaaaaaagtaaatatctgttgatgaaaaaactgacacttcctatgggtttacctcctttccttccgttgttttctctttggtatccctcacgcgttttcccctctccgctgcagtcacctatttcccacttgtttttcttctctccttcttctttttcttattgtgtcctccctgccaccagtcacaggcttgtggtctacaaataatgctggtttgggtttattttaaaacatctaacatgagatcagtgcctgctttttaaagaagcattacattatgtattagttatacaaattattagacaatgtcttatctttattttattgttttacacatagaacagagactatttggagcctttggaataacattccagcgtataaatataaatgaaatagtttggcaaattaactctctccaggggtcatctagaaatatgattctgtcatcagatagaaattctattgctagagtcctttagccagcaaatggattttctatgcttggtgagcaaattcatcacaaatttgaagctagttacaaataaaataaaataaaataaattaattaaaaagaaattttaaaaatcccaacttacagtttaaaaagaagaaaagtggaaaaaaaaaaaatgaacaaacaaaaagacgaaagggcttaaattaaataatcatagggatacattgtttaatctttccgaattctaacttttcagaaatggctttttcccaatgtcaactgaatcataagaaaaaaggaatgcaattatcttttaaccatcgaaatagggaggccttaggctaattaatggcccttgataaagagccttagaatagtgccaggcatgtgggcttagtatgtgtatgacaatgaatgatgaggtgtcataggcttgagaaactaaagttagcgcttaggtttgaaaaataaactgcataagaaatctcacatcttttattaattatctatattgcaaacaatttctttgttgcagatttcctttaaacattaagatgtggtaaagtgtttatttacaaaaactatcaattacttttcagagacttggcagtctagaagctctggtaaagagccagtgtcttgaactccatggacagagcacttaaggaatggaaccgggggcagaaaatctgagctttaatcccagttctactgctaagtagatttgtgccattgtggacaagttgcctagcatttatgaacttcagttttattatctctaaggtcctatttatgttaatattctctcatacaagtgaaaaaagtcattcaaataatgttttttcaaaaaatagtttacatataaagttggcaaacatagctgatgtataaaccaagatgtgtggtttttccagaaagttttttgagattcttaggacacaattacttgcttggctgaatatactcatttcacaaatatattgtttgtctaatgggatctggtaatgtgtcagtactaaggttaataaaaataagcaaatgaagacacagtccctatacggtctcccatggagctctcagtcaaggtgaggagacagacattgatgaaatagtcacacaaatttgtattacaagctgtgctaagtaggagggaaaataatatggtgctatctaaatatgtaaaaggagaaactgatgtggtaaggggtaagtaaactttagagctgagatttatgaagagtgctttttattttacatttaagacattggacactgtatttttccctttttaaaaattaattttattattattattttcccttatgtttcctttttaatacagcattagcaattcagcctagttttataggtatagagtacgcagatttatcctggacttcatatggatcaatgtgaggttataatagcacatttctgaggaaataggaacaatccaatagaagtgattctaaaatattttcataagatattcttataaggattccactactctgctctgagttaagaataaagtaaaagaaaactatctgaatatttattggcctcttaaaaacatgggattgatgacaagttttctgggctgcaaaaattctaatgataaatagagaaaggaaagcaaccaacatttctgagatcagaatggaaaggtttgtgttgtaacataattagggctccagagtgcctatagaatcatagtttatgtccatggtacttagaggttcattcaataccttcctcccagtgtcttctctgtacttgcttatgagttcctcacctggtcattgttaggccagtcatctctcagagtgtttgctttcttcaggccaacagtacgcagccttcttgcatcacgtctgattatctttcatacaccatttactttttggttgaaatgtccacttcttttctaccatgttgattgatatctcttggtcctatgtgatgaagtatctaaaatttcaacttttgcatataaagatacttctattacttggaggatattactgaagcaaataacctgtatattatttagaaccaatggcccttgttggaaaaaataaagcctgccttcaccattaaatctaatgaagaacagattttcttgttctatgtagtattttacttgaaggtgttcataattcagttgcgaagtaattttctcagtagcgtgtgcacaaatctcagctgatctgaatctatctgaaattaaaatacggtgtaaggaaatgttgagatacaagtatttttcattaatttttttctgaaatgctctgaaccctttcagcctggagacttttttccgctagcaaagttctttcccatgtgctcttatcattgtttctcttcctgttctgatttcagccttaagaatatgtataattcttaaaatggaacttcttagatctcatcctccaactcatcatttcctcttcgatcttcttctgtgtattctaggagaacatttcacatttgtcctgtacatcactgggtcaatattctgcaggatttgttctgctcttgagtgccttaaatgcagatttaaattctgctattgcattttgtatttccttgaattcttttgttcattccactggggacttctttctaaatctctgcctgtcattcagcccaccctgtttttattgttctctgtcgtttcatagtggcaacgtctgcatcttttataggagccaagtgtcattttctaaaattttattttgttcctatggaaagtcatttttagagatatattttttccaccaaatctcaagacagtgctcatttttccttgtgctgcagagtcttttcaaaggtcccatttagagctctgtttgtttcctccttcctgtataagaaggaggttcaggaatccctgaaactccctgtccaggttcagcatttgccagcagagggttgtagggactccttagcaaggctgcccacttgggagctggcaattttacccgctcatctagaacctggaagtcaggttcaggtgtataacctccaccctgggtccatggtccctgagcagccatgcatctggcgtgggatgctagcctgggaagaaatagtctgtctttactgtccaagtttctgcctgtaatcctagagaattagatagaacttgcatttcttctttgtacaaatattacagaccatgaccagcatgcactcctctccaggatcctcctgcctctgcctgtacttacaggtgtttttcctgagacaactgtccagctcaggctgtaacgcagaacagctctctcctctacccccagctctgttgggatctgaggtgaggcgctggaggcgggatggagagcagtggaaaaggaggtatctgataccctgcagtaagcttctttttcctgtcttgcatcctaggattaggggcaggtatttgaagagtgtgtcaaaaactttccaaccttctttgagtccagcagaatggtaaagcgtgggggcccaggagctacagtggccaagttcaaatatgggcttcacctcatgcacaaggtctctgtgcctcagtttccttatctatgaacctactttacagaggatttatgaaaattcagtagctataaggcatgtaaagtgtagaaatacatttttaagagatgtttaaataacaatgcttttacaaaatacaaagacagtcttaataatgattaatgcttttaacttgccattcaaggaaatgaataagaaatgttggtaaagcaggaaaagctgattcatcttgactcagtgttcaaaccaactgtaccattataaagtctacagtattattcagccataattggttcaggattatggtttctttgtagcattatcagttctctatacttgaagttcccaagagccaaacatttccatttttctttaatcagaatctgtcacatttcaaaactccctttcttctttatggatattgtggaaaatcccttcctgcaacctccagcttccgccaaaagtgtcacatgcattcttattgtcactatgtgaacaccttatgaatgagggctttcttttttaactttagttttcacatgtttgtgagtgagagttttgtgtgtgtacatgttgtcttttgtgacaccacagtttgatttgattgaaaaagaaaaatgcaattttatttaaattgctacttggggatataaactttgtatcagaacatcaagcctgaatccatggtcagtgaagtcctttgatttctgctccttttagtattgtcgcagcaagactccctcactgcattagtgggttccattgtatttccaaggagggcccagtgagaagggcttgcctgcacctcacggccacctcccttcttctgcagggtaagccttgtaattatagcagacattacatttgtctccagcttctaggggatgatgtcattgcatgtcaaacaggggattagcatgaggagagaagtcctattgacattttcattttcattaagaagaatttggttttgcttcattttgttaacggaagctgttgtcttaccacataggagaattttttttttttaaagaaaacttgaaaacgtagaagcaggcatgtgctgactgcatgaataaaaatatactctgtagtggcactctatcaattagtgaaagcgtctgggacacaaagcatgcctgggaaatctcctccttttcttacaaaagcagaatatcattcttctcaaagctcacaatggcctgggccctgctgcagaaaatgttcctgaaaaaggaaggcagagacttggccactgctgagtagaaaaggaaggcaggcggctggtcccatcagacctctgaaatattttgctttttcgtgatggcattgatctagtatgtcttaaagtctcattccttatgtctcagggtaaggctcttagttcccttcccatatgaaaaaattaatcaggagcgaggtggaatcctgatgtttcagatgctttgagcccagagctgagttggtggaagagtataatttttatcagtcatttccagcccctcccgcaataggaagaaaatcattgtcagacttggggtagggagttgtggcctcctttcaagcaatctaacaataaccctgagtcagaaaatctaggttcaaataccagctctggcttttactgggctatgtaactgtaggcagcttatgggattgctccgagccttaactttctcatctgtccaatggcattaattggcaatagtacttgcatctcaaagggttatgcctggtacctatcaaccattgtttttcacctctaaaaattatttcctttcaaaacatgggccagtgttctgaggtgaccttattacttgagtgagtaaaggtggtggttttctttttttctctctctctctcatttgtgtcagtgttttgcaagtacaggtcaggtagccaactcttaccagtcttgatttcctccttgtggagtagacccagtagctatgagattgagggtcacctggattagactggctttggaatttcaggttttttgaattttcccaaagcactggaagaaaaagagtccttgtgaatttttcttgggagtttttagaaacccttacaatagttctcagttctccatatttggatcccagaatgttcctagcatctagtttccctggaacagagtcatcctgtgaaaaaggatgaatccaatccagatcagaccctcttgtgaggtgataattttccatccagatttccctgggacctttccatttgcattcttgttttgccttgaaaggcagctggtgagctatttctttttcctcattggacttttcatgtccaattacctagatgattattgctcctgtaggactgatattttagaaagaatttggaataacactgggttttgaggtgtagcccaacaggatttgaccaggagtctccatttacagttcttcaaggccagtgcatttggtgagctggttggaaggaaactttggagtgttctagaaagaactagaccatctgaatcacctgtcctgatgcccttgtgtggaataaaggagaaggcactgccttgtgctgagtacttaagtgtgctgagcacctaggtactaagtaaagtgctagttactgtactaaacatacccatgggcatgtgctatcccctgagtttctcctgaacctatggaatattgccctcatttcctctattcccacccccagcactccttgaactatctgacatacaggacagctctcttaccacaagctacctgaatgtaaatataattcaaaggaaggacattacaaacaggaaatcagcaattgactatggaagctgaaattgctgtctggagatggccagatactcttttcctgggtggctcaaggagtagtcgggtcatcttcccagggcctcaattgtgtcctctccaagctgtcagtatggccctgtcatccaagacttgtcctcatctctgggttcagttctctgggataatttaaaacctacctccttctccccaagacctcataatctagatggaaggaaaagggggacattctcagttgtttttcataatcattttactactaccctctgtcagatcctgccccaagtcacacctagcctaatgttttgtaccttgactcaattgttggccagccactccctttccctccaattagggtgtgtccttgagttgttttgtatcctcttctgattataaactataaacatatacattttgactactgaccccaagccaaactacaaggaaaatattgtccagagggtgctaatatgggtgcttaaataatatgtgaattattattattttttgccaagcccataccaagatttattttgttattaaaaatgtgtgaacttggttttgagtattttacatttggtcattttgagttgcagggagattctgatttctgcatcttcttccaccctatgggccaagtgcccttcactgctactgaaggcttgtttatggcacatgaaattggctaggttattagcatgatttgcatttttgtttatgtcagaactgtaggctgagtaataattcacagtacaaaaaagtcagttcagtttattcataaggatggcttatgacaaagcagcaattccatttttatcttcctaggcatgtcagaccatttgctgatagatcctgtagactggtgttgacctccacatatatgagtgaattcaatgacctattggccctattgctatagtcaatcatcttgacagcctaaatttctgtagaaccttgagtgtattattttcttagactagtctacaagggatgataggcaataaatatgttccatgactattgttttatgtaagccacaaattaaatcatattttctagttgaattacataaaaagcttatgatctttaactgctgagatccatcttcattcagaattaaatggcaggagcttcccttaatttacctggccaaatcaagcaaatattgattttaaatgatctgtataggtctgaagctctggtttgaagatgtctgtttgaaaataccttttgtgaaaataaataataaagttactcctccctgtttatctgattgttaaattttgtcaataattatgattccttaaaacaaagtacaggctcctatgcccagaattgacaacagaaatggctttgagatgattcagaactatactttctcttattaacatctaatatgtatcaaagccttttctccccgtttaagtagagaagtaaccttaaaaatatttaaatgtgatcaaaggatcttggtcataggattcatgtgtaagaaatgtcataaatagcctcaatcaattactcatttttcatttccaaagttttaaaatagttgacatggaaaaagtattaatatgcatcgtatcttggaaacatgaagaattatcaactattctgtttctttaccagcaggtggcatgacttgttgctctgctggtgacaatataaaacctaacccaccctatcactttaaattgttacataattaaaagagattcctaaagtacttgccccaaatataaaagttgaaagtttaatatccttatgatataaagagttcttacaaataaataagtaaaactttaacatttcagtagaaaaataggtgtaggatatgaacattcaatttacatacacacagaaggtgggtggagaaagacacacatatacacataccaaatggccaataaacgtatgaaaaatgttcaacctctttataaattaaggaatacaaatgaacccaggaagatacacatttttacctccaagttgcaaggttttaacaaatgataccactgatcactggcaaagaggacaagataggcaccttcatattctgctatttggatataaacaaccttctgaaatgaaatttttcaatatatatgaagagtcatagaaatgctcacgtacttcacccagtaattccctaccaggaatttattctatggaaataagcagagatatgcacaaaaaatgttatgtaaaaaaatgcttattgctacgttatttctctatgtgaaaaactggaaaaaaacctgaagttctcaacaatagggcatgtataatcagtaatgattaatcaatagaattcagtatttggcctgcattattataaaccatatcttcgaagaatctttactgatgtgtaatgttgagtgacaagggaagggttcatgaaggtatttttcaatttgatcacaatttgataccaaaataatttttgtcttttccttgacacccaatttcaatgacacccaaattgtaatatgggttatcactgagcagtaggtgaacaggttattttaattttcttccttatctttttctgtgttttttacattttatgcagtgggcacatagtattttacagtcaggaaaaagtatacacattttcaaaaatggtaagccaagcattggagacatgaatcactatcgcttttgtattcctcatggaaatgagattcaatagtaagttacgtgtctggggaaaatagagctcatttgagtcagaggttggaaagctcttatgaatactaacctcagaaacctcaaaatagtatgtggtagaataatgacatggcacgaaaagccacggatgtcagtctgagttaaggttagagtagatacatacaacagtcataagagaaaaaaacttactaatctatgatctccagttctggtaacctctagggtcggtctgtgcctccatatcaaacctttatcacagtgcagtgtactggggctgctgcaacttggaagcctgggttctcgttctggctgctctgcaaatatattttgtacttaaccttgggcaagtcaccaactctctgaactgagagttttcttccagggctggatcgttattcatttttggagtttggcattctgatgcactttctagccctgcaaggtaagatgtaagtctccggggtgtctggccaatgctgaagcagattgaggctccttttgggccaacccttggatcagaggtgtccgaagtcatcttggttcagtcgttttttaataataagttgccgtgacataagttattggaaaggaccacagttgagggtaagaaaggcagtttgattctcttgtggaggttataaaatgaaagcagagatctgtccctgaatatgaggaaacctcgtatatagtttaacaatgtatttttttcttacataaaaatctaagtttgaaattaccatcagactaaatttcatcccatctgtggtagagatggttttaaaattgagactttagaggcagcagatctttatcctgtacacctgatacataagaaaagcccagttcagaggactttagtttttaaccttaaagacaaacatattcagacatatattgtataaggatgtattacaaactttttttttttttgagacagggtcttgttctgtcacccaggctggagtgcagtggcgcggtctcagctcactgcaacctccgcctccagaggctcaaacagtcctcctgcctcagcctcccaagtagctaggactacaggtgcatgccaccatgcccagctaatttttgtattttttgtagagacgaggttttcccatgttgcccaggctggtcttgaactcctgggctcaagcaatctgccctcctcagcctcccaaagtgctgggattataggcaagagccacaggacctgtcctacaaacttcttttaccttaaccatggtatagaaaatacaggctgatccatgcatacatctaaaattgaaacaaaagtttaacaaaacaatgcctatccttattatctgcaatgcattatgacattttctagtctgttttattctatactattaagaaacactggctttgaccatttcatgctacagtaaagtattgcagccttcatttgaagaacactggtatagaggtttttgaagaggtgcgcataagggagagaaaaacagctgcatgtcctgacaactattaagtatcactcataaatttattttcagcaacatgggaaaggaaaatagatcctttctttattaagttaattgtgacagaaactgggacaaaaataacgtgggaggaacatgttaaaagaggagatttacacatatccagtgttttccagcaagaagaatgcatctgaaagaggtaaaactgtgattatcgaagcaatcctattacacctatgcagatgaatgaaatcaccaactttaggcaacatgaaaaaataaaagggccaagatcaaagtggacctggtattatttctagcgtccatcttggatttttctttttttgtctgaatccccatctcagggtatgagtcgttatgaatcaaaggatcaccgcccaataaaaccattctagacagaaaccttttggggttgggggtgcaccattctcctcttctacagcttccagaccactcattgcccatggatacccaccagcctcccacgttcacacgactccatctgctttttttggtgtctgtgtcttctggagcattgaccaggccagtatagggtaccgttccctgcacccagagtttcactcccacctcaaactcttttacctcctggggtacatgtccacgctttactcctctcctgccctccagcttctttctttctttcctcccatttctcctctcttcccctcccttttgcctttgctctgcagagacactggtgccgtgacacacatctgagcatggctggtggggctgaccagtggtcaccagtgcaggatttaagtggttggagcttaatagtagctacaagtctttaatttcttcagcaggtttttaatggcctttgatgcacgttagaaaagacatggaaagtcctgaattcagagccttcatgctgggtattgtatagtcagaccagccctgtctctggactgaatgggtctcttgaaatcataaatgcattgcttagggatcagtagcctcggagtgacctttctcactcatggctttcctgaggctcagaaaggccaggccttgtcctgggtgagccagcctctcagtaccctgatggcatgactcagaaagctggacaatgccctagaatgactttctccattaagcccaagaaatattgcatagaatcagtctgtctggaaattccttatatggagaggttctgagacgattgtatgtttggtttgcaagaggatcatggtttaaaaaaagaaaaaaaagcctaaggcagtgatatcatattacttacaggcttggttaaaaaagatagagaaaatactccttcaaacgtttccaccctaattctggattacactggggacgacagcaaatcccattccactggttctggctgaccttccctgcatcttggagcaaggaactctcactgtctgcctgtttctcccagcacagcactgcagagaggcccagaggctataaagccctgccacgtgtttctccaaatgggtggtttttattatttctggaatgcagtccccagccccaaatcctaatatgctgacaaggcaaaagcaaaagagacctgtggaaccccacccagtgacagtttggtgtccctccccatctgggcttggtgcccaccctgtgaccctcactcttcctacttcccccaaggtggctgggagtggaaggcgaattggagcacattcaaagccagagtggaagggagtgatttaagatcttcctgtgagatggagtcctgggcggtcgcttattgtgcagactggattgtgctatgggatctgctctgcctgtggagggggactgtgtttctacatccacctcatttcatcaggcaaggaggaggggcaggtagtctgcaaaattccgctatgtggtttaacacagtgaagacctgaaacctccttgatcaccaggaaagagatggggaaactgtacctaggcgtttctaagccaggagaccggagctcgctgaggaataattatgtggaaacaaatgtaaagttaaaccttaaaaagacaatttaaaatatatttacataaagttatatacttctcattttaaaagatgatttaaggagatttgggcctaagtaaggagacatgaaataaaagaaaaaagggattttttttcaggaaaaaaagtgctccccaagtagaacaagaaaaattctccagcataagtttcaattaaaaaaaaaaaaagtaaattgactctagcacatggtatggggctaaataatagagtggagcagaactgttatgggtcatttttatataggccgtagtgcgtaaacattttcgactgtgttttttattctatttcttaatagatgaggggtggcattgaggcatagagtttttaagtgatttgaagtcaagatataatcattcttggcccagcttcatagttcattctccaaaaataagattttctagttgttgtgtgaaatccatagtgaaaagtctgattgcataggtgtccatatgctggagttctaatcatagattcttctgttgtgttctcttgtgtgtgtgtgagtgtgtgcgtgagtgtgtgcagttgctatagaaagacaaataccaactaagtgtagaaacatctttgcacgtatcatagagaagctgtataattttatcaggattcccagagaagaaaatgtgaaatgttagtcccaataatttagtaacaaaagaatacactgccgtgttgagatgccaaatagaaaagataatatttagtgcaatccaagtggcaaacaaatacatttcctttttagggctatggggtgaggcagtacagtgaggccttgtttaagtaccctcaacagaatccagccttttaaaaaccaattcaaggtcatcattatgaacgtcatccacaattgaattatgtctttatatttgcagtgtcttcttggagaggacgtatcggtttgccaccagacagaatgatgccagctctggttttttaattcatatgtcttttaaaaaacatatctgtcttggtatcctccctcgatatcacactgccagtagtttttttctaaactaccttcagtgtgcttgtttctaagtactcttctatgttagttccccagggctgccataacaaagtatcatcaactgggtggcgtaagtaacagaaatgtattgtctcacattccaagaggccgaaggctggttccttctgggggtactgagggagaatctgttccatacctttctcctcatttctagtgatttctgccatcctccctccttagcctcccaagtagctagaaccacaggtgtgcaccatcatgcccagctaatttatttattttttttgtaaagacaaggtcttgttttgttgcctaggtaggtcttgaactcctaggctcaatacttggcgtacttggcttgtagatgtatcattccattatctacctccagtgtcacgtggcgtgttctccctgtttgtctctgtgttttctcttcttattcagtcattgaataagattcccaccctaatccagtgtgacctcattttaactaatgacttctataaagaccctttttccaaatgaggtcacattctgaggtttccacgtggacatttgtggggaatactgttcaatctagtacaccttccttctatgttgttgttctgaatctgctgtggattggaaaatctagtcactaagcttgttagacctcctctctaaagaagaaaaagagagagagagacttgatcccgaatcttccctaaggagtcttccgtcgtataaagtctttgagctgtaagtgctttgacttagtggtatctattttgcctgctcagaggctttccctcgctctaccttttaatgtttttttactgaattcaaagctaaattttaagttttcttttcagagacaggatggtgcagggatgcgatcatggctcactgcagccttgaactcctgggctcaagagatcctccctccttagcctacaaagtagctaggaccacaggtgtccaccatcacgcccagctaattttttaatttttttgtagagacgaggtcttgctatgtttcccaggccggtcttgaactcctagcctcaagcgatccccccacctcagcttcccaaaagtactaggattacaggcatgagccaccatgccaggcccacgctgaatttctcacagctgatgctgctggataaagaacttctgacacatgaagtgttacgcttgggtcttttaaacagttttttagagtgttggggagaaaattagctaagtaatgcttctgagaggtagtctaggccatgactagaaaggcatgagaagaggctgcgtgggagaggtactagaatgcactccttcttataactgaaacacagatccttctcttcccctggccatctgagttgtaggagactgttgttgcttgtgtgagattctagagggccccatccctgcctatctctggtgctgcctgtgaattatactctgttttggtgaaaatcacgctctgtccagctgtggggagcactgtctgggacaaattcccttctcagttcagtttgttaatagtttttaagaactacctttgtgcagatttgttccctggactgttgaaagggagggcactagtctttaaagacagtgatagaaaccctagtggaaaatgctcaccaacacagtatgaaatgatagaaagatactattgggaatttgggatctctggcttcaacctttttatttctctgccaaaagaaaatacgaaacctcagaggaacacaaagaaagagaatgatattaagcacagaatgattttaatctttggcagcaacccatatgcttaaaaaaaaaaaagagggaaccgtgtttccattgtcatgcacctgtcattacactgaatgagttctttttctctcttgatggatggtggtcttaaaagcttgctgtttttcattagcaaagtgaaatggggtgccagtgctaatgctttgtcattctgatggagaataatacatgaatcagtgtaattattcagtgtttgcataatcagcaagattttgaaggggaatgttgcacaactcagaagtggcctaatttcacctgacaatattccattcagactccaagcatctccttcaagaagcagtgaagtgttggtggatttccttaaggccccatacaatgatgatgggaaattgagttgtcctaaatcactagttaattatgatatgcccagcggtcacttggaggttcttgctctagatctcagtttatattcatccctattgttttagaaatgtcatttatttatcatgcatgaagcatgacatattgttccacgtgggttcagtaacgaaccaccagccaaatccattaaatttcattgaggagtgaagtaagacccagaaatgtgggcaatttgagaggaatccccccaggatggctcaagttggataaagagataggtcaaagaagagacgcattgggagtgattttggaaagctaggtaattttaatttacactctttttttaaagagagtctcttttacaagaaagtagcctattagttgagatgttttagggacctttgcaatgccagttggaaggagggagactgaattttttattaactcttttaaatcaatttattccagcccagcatgacaccagaaccaaaaaatctgaacaatgccccagggctggatcttacagtgacccagctcatctaatttggactagattgcttttttcattaaagctaaaaataatgtcaggcaggccacctttctagtgatttctgtgggtgaatcatgtcctatggaggaggccttgcctttctcagacgtagccagtgccatttgagtccgggtttgctccccttttctctgtgaagccagcctgcgttgatcttcatgaggggagtgaacaataatcgtagataacgtttactaaatgcttcccatgtgccaggtgctgctctaagcactttctgtgtatgcgccaatgtaatcctcatagccttccaagagggaggccctattattatcctcatgccaccacgaggaacctgaggcacagcatggttaaacagcatgcccaaggtcacacagccagtgagtaatggagatggggttcagatcccagcaatctggtcctcagagcttactgctcaattctgaagaccctcaaataccactgggaagttctttaactcaggaacttctgttttccaaggcaggactcctaagaaccttataggcttgaggcaaatgcattccatgtacaggaagtatgtgcttttgacacatagcatcagcctctttctggggcaactgaaaactttttcaaaagcagcacctccttggctatgggatgcaaggatactgtcattcacgtctgatggaaaaatacattttatccaaatcttcttttttttttttttttttgagacagatcttgttctgtggcccaggctggagtgcagtggcatgatcttggctcactgcaacctctgactcccaggttcaagcaattctcctgcctcagcctcccaagtagctgggactaagggactacaggcctgcgccaccacgactggctaatttttgtatttttagtagagacaaggtttcaccgtgttggctaggctggtctcgaactcctgacctcaagtgatccactcacctcggcctcccaaagtgctgggattacaggcgtgagccactgtttctggcccaaaatcttcttaaaaaacaaaagaaaatggcaaagcctagaaccaagatgtcacctttctcggtaaagctgaatcagaaaggcccatctttgttgctggggcaatatcttgaaggttacctgtgcctcatcacttgctctgtaactatttgtattccaggtaatatgcgtcactggatgaatcctttttagtgattaaaaaaaaaaagaaaggggtctctacccttatggggtagtgagacattaagcagataatcacaaaatgcagagaaagaaaggcaagcccctggcatagatgcttggtccctggaagcccagggcaaggcctgcgaggacacgccccagctgtgcatctgctgggtgatcaattggccagtattcctgtgccctcccagggactacccatcctctcctccagtacagacagaaggtgagtggtgtgctgatggccagctgggagggaggtcttgagagacatgtcaggggaaaaaattggttactatttgatggagtgggcttggtggtttgttgcctgggaaacttgctgactataaaatgaaccagaggaggatccagtttgctgtctgcactgacagatttacagacaggaaaacaaagccttcttaccggatccaagttaacatgaaaattaaaaggagtctatgcaaagcggagttcaggacagtggtttctaaagtttcttttacttacacaggaaagaaaatcacccaaactaggtgaatggtaagtttctctaaatgtcagaacaatcgattataaggcattactcagtttatagccaattatctacattgattaagtataaatttcatgatagttatgagagatattaagattttaaaaatggaaattattttataaaatacttttaaaaacccatcttttgcactgcacttatggaaccaaagaacagcttagtcaagccacttctgaaactgtcttccatgaaaatttcaccctgaggctgcacagggctccttaacatcccctctccttcctgtcttctgagaattaggggaacagtccctcagcccctctgttcatggagaccagctgagacccacagaagggcccatacccagggagatctttgctgagagcatctaggaaatcagccacctgtccttgatgttaccctgccagttttgaatatccttcttttcaaattaattgcagaaagaccaggctagctaaaacattcatcagaaccacttggtagggcaggggttgcacttatgaatgtacagttttcagagggtcttccagggtaggacctgggaatctgcattttgaacaagctcacaagatgattcttctgttcatcagacttggagagccactgccctaggacgtggatccacttgccacgcaccgaggagatgttgaggtgggaaaaggaaacaggaacgggaaggaggtgtgtttgcagtaatgcaggagaagactccttgctctttaatgctcttcgaaatagcccagaccatgtgtttggactgtgtacaaagggagcagccacactgtggtgtgctcagggagaggagttaggagatggcagcctaactctccaacttggagcattcacatggctgatctttctccttgaacttactgaggttcttccctactcatttcacttagctaagaattactactccctcttcaggacccagccttccccttcacctggattaatttaggtcccctgttatgtaccctgcagcttgtgattatctgcttactacctcaccctccatgagagtagagaccatgtcttattcattgctgtatccaccagcacctagcacaatgctggcacatagtggctgcccattaaagattatcttatttttaaaaaaattgaatatagtactctcatgtaaatccctgcacagttttctgctctttctagattttagaaaactactagtttggtgcaaaagtaattgccgtttttgccatttaatgtagtagaccacctctgaggtcttaagcctcattgttccctcaaactaacttggaaagaaatttcctgtttctaactaaatgatttattccctttcgggaaaatgtactaattaagcctgtttaaacttaggaggggcggtaagcaaaatctcgtttttctttttccacaatagacatttgtttcactgtatggtctcatcatctatcagatgaggactgaattttataagacacgtttggtgatttgttggctttattgaaaagatcactagctcattagtaagactctggcccagccttctaaggctggagaagaacttgatttttaaacagtttgttgagcgtctccaggacaccctctggacagagtctgtttgctcagtggggatactgctatcctcttctgtcacccctctgtgcttttattcagaaccatagagatagtgggctgatgggttggaagagaaaatgggacggggatgagggcaggaggtgagggcaaaagggaagaacttctcttcattttctacttccagatacaccctatatccaggagggaggaagtgggacaaatgaaatagaaataagaatttaagtgtattcctcaaagctggcttctctatgcatatttggtttttcttcctgaatattgatgtagccacttgagtgcgccactgggaggaaaatccttagcaggattaagtttattttaggatttggctgtgtgtatgtgtctgagtgggtatatcatgtgggatctcattttccagaataagagctaggcctaggccatttccgcatcttttacatacctaggtttttacccattttttgaaattgggctgatattaagtcccatttagcttttacaaaaataaatatgttgacttggtgtgcaatataaacagaatggcccatttaaaacagcaccatagtttcctaggtcttgatatctgctatttttactttattagatatgaattactgactcagaatccatttaatattttataccgttattactcagaaaacctaatttgcattcttgtctctcatgttttaaatttttctctggtggtaactggcatgtattaatattttaagcatcaccgactggctgcaagccgaaatgaccccaaacattctggaactacctgttctgcctaatttgccagtgagggataacttaagcccagagagggctgcatataggacagattttttccttaagcacccataactttcttttttaacttttattttaagttcagggtacaaatgcaggtttgttacataggtaaatgtgtgtcatgggggtttgttgtacagattatttcatcacccaggtgttaagcctagtacccattagttatttttcctgatcctctgcctcctcccaccctccaccctccgataggccccagtgcgtgttgttcccctcgatgtgtccatgtattttcatcatttagctcccacttgtaagtgagaacatacagtatttggtgttctgttcctgcattagtttgctaaggataatggcctccagctccatccatgtccctgcaaaggacatgatctcactcttttttatgaagcagccataattttcttgcatcctaatagtgcagcagttggtgtctgggtaggtcagctgtggaggtgatgcacagcagagttagcgggcagctgttgagtgccatgtttacaaagctttggataaatgggggtgtcttggtccattttgtgttgctataaaggaatacctgaggctggattgtttatgtaaaaaaagagggggtttggctcatggatctgcaggctgtacaagaagcctggcgttggcatctgcttggcttctggtgggggcttttgtgtttcatcaagacatggaggcaaaggtcaaagtgaaagtgggcatatttgaagagggaccaaacagaaggaagaatcttgctttataacaacccactctcctgggaactaatcccatcttgccagaaccaggacaaactcacttcatgagaacagcaccaagccattcatgagggatctgcccccatgacccagacccctcccactaggcctcacctcagacaccctcacattggggatcaaatttcaacatgagatttggcaagaacaaacaagtcatgtccaaagcattgcagtggggaagtcattgatcatagaacataaagtgaagaaaacaggaccaaaatattgtgtttccactgtgccctcaactatgtaaaaaaatggctatgtggaaaaagtactggaaggaaacatggtcaaagatgaacaaggatgattgtctctgggtaaagtgattagacacctctgcttgctgcttcttcatttgtggcatccatattgtccacaatgggtgtggatttgttttcataattttttagagggttttaaagaaaaactgtctctgtgagactgaaataggtgtggtcccaaactggcagtgctgagctgggctcacccaggggccagcctctctctctgtgttttttacagttccctccctgttctttagatagtaaataatcattgtgtcatcactgggttgtgtttttaatcacttttgacatttcacagtgattcctttttctaaacacatttttatttttagataactttagatttacagaccagttgcagagatagtacagagagttcttgtttccccttcaccctgcttcccctactgttagcaacttacataaccgtgctactttttatcaaaactaagaaattaacatcctgttagttaaactacatggcagattttttcctgatctctccaggttttccactgaatgtccttttaccatgccatgatccaatgcggtatcccacattgtatttagattgtggttctttctaaaggtgcacaccagaacagcattctagcagggtgtgttcctaaattatcctatctatggatatgtttttttttacgtaaaaagtagatgtttttttcctccaggagtggagagagggacacagtgaagcaattggcctctagctctttgaaataaatgggattccttgttctgcaaaacctggggtcggaccccgttcactccccttcctaccctgagcattatgtggactgacaccaggtctgtgaaggaaaaactgaagaataaagaaagcatttggaaaatcccatggttgttttattttattttattttattagacagagtctcactctgtcactcaggctggagtgcagtggcgcaatctcggcccactgcaacctccacctcctgggttcaagcaattctcctgcctcagcctcctgagtagctgggattataggcacccgccaacacgcgcagccagtttctgtatttttagtagagatggggttttactatgttggccaggatagtcttgaactcctgacctcgagtgattcacccagaatgctgggattacaggcatgagccaccgtgcctggccccatggtatttttatagcatttcttataaatcaaccaagtttcttgaaaacaataatttttgttcagaagtactgttgtgagtgaggagaacattgtgcagctcagcctgtggacatacagtggctgcagcgtgggccccaggctgctctcatgctcgctgggcctgctgggtctgctgggcctgctggaacaggaagcagcaacgcaattccaccagaggaaccacagggaaaccaaggctgactgaagtctgagaagaaagcctgtctagagtcacaggagtgaaaataagaaaacaaaatttagtcaggaaattgcaccatggaaatgtctggcgtcaggttctataaattccgacccgactatagtcaagtatttgccgagccacctcgtgtttgcttcagatctgtgtttgctgcttctttttgcacagatttgtcttttgtttccttcccattaaaaacaggaggcagcgggttagctgtgctgggttacacagcagcagatggtgttgcccaccatgggcagagatctcacatgagagagcggggagggagggtggacatgtcacacccatgccattttcctgctggaaactctacctcacacatgcagggaccacaatggatttgacaagaaccactcatataaaggcagaaagtcttttaattacataaaatctgaaactatgtgttagaagcagtggtctcttgccatttctgtggatacccatcttccatatagtcttactcaaagttaattgaagacaagcagaagtgaggcctggagtcagtgtgggggtgatttgtaatgacaagttggaattgaatcctggtgggacatcacagagctgggtgatatgtggcgtgtggtggtggtggtggtggtgaagaagacgggttcttaagaatacaaacccttgaacatgtcagatttagtctactttcccttcttgattctctgggttccccttctgttagtcttcaatcaagtcctttttggaaagattcctttccctttgtttagagaacattggtcaactttgaataacaaatgagaatagaaatgacaaaaacgtctccaggtctcagctgtgggaccttatgagcagtgttgcacaaagacattccccccaaagcctgctactgttacttttaggatgttcatttaaaaaaaaaatctcttttccctaggtcgggaagatgaccttcaccatataatttcggactaaaatctgcagattgtaaccatagttaggaggcagttcttcattaaaataccctgcatttaatctttcacatattgtacaaaagtaaaaccaaaacaaaataatactgaatggtaaagtaatattatttttttattttgctaaaattccatggggtgttcattttctttatgactcgtctcttattcctagctcattctcgtgtgtctatcacagtgaagttgctgtagacaccctcagatttctagaaatagtatctgaagtgttcccagagggaataggatttagggccaaggaattaggatggtcccactctgtgcccatgtataatgccacacagactgagtgactttcctccaaatggatatcgggctggcatattttgggacctattgaatgtttttggtcccattccagtttactgttaacagcctcatctatttgtgaacagacacaggagtagtatctatatgacacaaagggatgtttgacaacttttagctaatttggccactacagatggccatgggcaggtgagagccagaacaaagtgttggagcactgaggtttatcattcagcggtccccggcttcctgcccagctgagctcatgacctttgccaaccagagttttcctgaataaacaaacacaggtcccctaccagatggagaggtgcttaatagaaccaggctgccaggcctagcaattgtgccactagttgtgaccaggcttgggaaatttagaagctgtgtcttgtttgctggggcctctttccccagatctgctagttctggagattccagtaggcactgagcatctcactggttcctctgtgtgcatttttccttgtgctgtgaaccagcatcctggtaattcctgttaatctctgcacttcttcagagtgtcttctaaaccaggaatcctttatctggggaacttttaccctgataaatgctggtgcactgcaaattattgaatgtcattagggtgccccagaagctagattattctagactccagattgaacaatggcttatgtatttttctgaggagggcatatcctgcgaagggaagcccagacgttctggtgagttggaggtgcattgttaccgtgtccttacacactgtgtccattcactggtttagcacttgattgtaacagcatatattattttctaaactttttatctacaaaatctcgcctcatcaacaaaattgttaaactcctcaagagtagtgatcctatgtttggtacattttgctccccccagagtactgtatagcaaagagctaactggtgaaatggcttaaattataggtcaaggagctgggatttaatcctgagggaactgaggagccattggtggttcctgagctatggaccaacttaataaaaacagtaattgagaatgtgattcatcgagactgtgttggcacaaaaatggaggttatagttttatgtattcccgtccctggaagtttctgatagttatactaacaataagaatatgtgacagattaaatgaaaaatatagcaggatgtttaagtctacacaaaggtaaggtccttcattgtgacaatatgcagttttgcacatacaaccatatttggagcctgtctacaccatgttcccagcatcagtggagtcaggagagtggtgatgttctgactggtaggggctgtttttgaaatattttctaaaatctcttcatttgttaacagtttcctctctagtcttgagtagcctttctgtagaaaatctgaaagcgtacaagaggtaattgattgattgattttcttttcttttttttttttttttttgagacggagtctcactctgttgcccaggctggagtacagtggcgcaatctcatcttagtgcaatctctgcctttcaggttcaagcgattctcctgccttagcctcccaagtagctgggattacaggggcctgccaccatgcctggctaatttttgtatttttagtagagacagggttttaccacattggtcaggttggtcttgaactcctgacctcaggtgatccacccgccttggcctcccaaagtgatgggattacaggtgtgagccactgcgcccagcttgattttcattttgaacatgcatatggccccccaagcttgcatccctgccctctcttcctgcttctcacctcctctccttcagaaacactggttttcctttatggcacccaccaccacacttgctactcctggctgccactgcatgaaggcaacaggaaagcccagcctggtaccctacacctgtgtaccaaccacctctgctcctcaacctcacttccttatgtactgaatttcttaagccctctcttgggataaacattaaaggtagcagcaaaaaatagaaacctgtctgactaagtgagcaagaagacgataggcgaaagcaggaaattttttaatctcatcctcttaaaacgtaaacaaaaacaaggcaacttgaaaatgaaatagcatggccacaaaataagagctatggtgtgcaaactgagcagtaaaagcataagatatgatagagatgcttaaggacagtagaaagatgagctatccacttctgacctcagatttcatggacgtttgtgataactcagattcggacagtgctttccaatgcagttcccatatgttaccccatttaaatctcagagcaaccctgagataagaattgtcgttgttcccattttgcaaaccaggacttggtaagatttagggactcaaacatgattcttctggttccagcttctgttgccgtgcacaatatgggaagcagtgtttcctctgacccacacagggacacagagcaagaccaaagtaccccagaggtccaactgagtatcagagcagaaaagagctctcaagagtagccagtccaaactcactccccattccccactgcccttttacagatgaggaaacagactcacaaagaccttgtaagtcacgagtcagaactgagtagtagcatcattacgggctggaagatgttaaaccttcccagttcctaatccttgtaggtttatttgtagaaggcaataaattataagtcagctcctcacagcagcccaagtggccagtgaccagcacttagtcagtgcttagaaaatgtgtgttaaacagatggaggaatgattcactgactttaattgtaaccgtatgcaaatcagtgcatttcttttatatctgtcttgacctacttttcctacccaaagatgttgtttttcactcagtttggaatgagagggtaatgtttgtagaaatcccaagacaatcagctgagaggccctgtaagtgcataaagtaccattagtggtattattgagttgcttttctatggtactgtgggttaatcaaaggcctttgtcattgttgttttaaacacaaatctccaatttattatttagttcgttgcttttattaacttatttgaaatgcaaatagcagcaaacacaggtcaacagctgcagctgtgggatgcagccagtgagagccaagggacaagatggagatgggattcccggggacagggagccatgggcttccccaccctccctggggactgactggggaggacacctttgattacagggatcggggagggtctcaggggcaagtgggcagcagaatctaaaaggaatgattgatctcagtccctggaagtggagaaaaatgactagacagcctgtaccttcctgataagtttcccctaatagattcttgctgtaaaagcaaagcccaaaaccttccagtaattgcttctggactgtgggaaatgacagtgctgaaggaaataatacaggcaaagcagtttcagtaatgccttgcacatagaaagcagttactaaatgctagcctttatcactctttcttgctctgtcacccaggctggaatgcaatggcacgatcttggctcactgcaacctcagcctcccgggtccaagcgattctcctgcctcagcctcccaagtagctgggattacaggcatctgctactacacctggctaatttttttttttttttttttttgagatggagtctcgcgttcgcccaggctggagtgcagtggcacgatctcagctcactgcaggctccgccccccggggttcacgccattctcctgcctcagcctcccgagtagctgggacttcaggtgcctgccacctcgcccggctaattttttgtatttttagtagagatggggtttcactatattgtccagggtggtctcgaaatcctgaccttgtgatccgctcacctcagcctcccaaagtgctgggattataggcataagccaccgtgcctggcctatcccccgattcttatgatagcccttgtaatctgatgtattagtaagagatagtgggaaactctaaacgatgcaaacctaaatgaaccttaaatcttgtctcacttcatacaacgatttaggtgattaaagcagttggagaaaagaaagaggagaggtgtttgggaaaatgtgaatggattcctttaaacacagcacaagggagctgccctatggttgaaggggaaggaagttttcaatggtgtttgaattatgtgatttgagtatgactaatttggagaggaccactgatgtattgattggtaaagtaatgacaacttgaaattttggtgatttcctaatgagacccaaatcctgggctcagtggaaatgaatatggaaggcgacaggtaggattgatgtaataaaaagctggtgcccttattgttctaagactcgtatgtggtgaggcagtttgggtataagtgctcatgggcagaagacatttgaatggagcataactagagacaagaatctgggcccagagaggttttatgtaaatgcatataatttgatgttgaaagggttcacttatgcagaaagttagagatttgggcaacatggcctaatcactagtgattatagcaacacccatttcttgagtatccacatgccaggcttcttacctgtaagacctcacttaatcctcacaacagccatatggggtgtgagtactgttattcccatgtacgattgaggaacctgagggtcagagagattaaataatcagcccaaggtcatagttagcaagttgtagggctgggatttgaacttatgtttgccagtctccaaagcctctttcagagcctctagaagagaaggaaccttgtgcaatcaagactggaagaaaaaaaacagtcctagatgaaagattgtaaaaaggctgcttttggaactcacagaagggtactgaaaaaaaactgtagaaaggtgatctttctttgaagaagagtgtttagattagtacagtatgttactactctgttgtccctacatttggacttatttcttaggagtccttggtgattctttggaatttctctgaagagagcaaaaatgtctggtgtctggaagctactaaaaaggcagatagatagtgtatgttaacataatgaaaaatatcactagatgcctacttcctgtggactagcaagtaaacactgggccatcttcaagcttggctgtgtatgtacaaatatctgtttaagttgaccatctgctgttgtattgttgataaacaccattataccagtgatttaacttatgccctggaggaagaagtgccttctagaatctcttaatggccataaaacattggcgttgatagattttagaggcaggcagccttcaaggcattcaatgatgaaaataaagaaacatttgtgaaaattcagtgaagatttcagaggccctacaggaactaggagcttcataccaagttcacatttgagtctgagttcagttttaaaggaaatgactttccatgacagaatagtgtgagatccaggccttactcatggttgttgagtacatgcagcctccagccacacgaaataatacgttcacctggtaaagagtgggggcttcatcagaatcacacccaactagctccttctctatgccttgtcttcctccagcgtcttgtagagctaaaatgtgatgactcttttagtttgtatggaggagggtaaaaatgtgttttcaaactgagcaagggaagaagtttcagccattcctttatcttcttcccctttttttgtatttccattttcactttgagcataaatgggaatcagaaggtaggagggaggatgttattatggatcagggaccgagaataaagggcagttttcagctgtatgttggaaacttaaaaaaaaaaaaaaatccaaaccaaaaaaactttctgtattcattccgttttggaaaagactctgaaaaaggaatcacatctttgatcaagagcaatggtattaggtcttttactacaaattatacttttctgtgagcctgtatttattttgccaggcttgaaatagctgatgttatttaaacaactgtgtgactattgtctaggaaatgagtgtaggctgggaatagcctggctgattacattgtttagaaatgagccttattttttgcagtccctttaggtgggagggttcatgaatgttcctgtggttggttgttccatggtgtcttctgtttatatcaagtcagtagcctcatgatgtcatcattttattctaccgtatatcattttaagcctactgaagaatgaacagagctagttccattccttgagacagatatataggcaacatcaaagaagactaatctttgattagtctttgaaatctcctaatctacagaaagtagagactagggcaaacagtggggctcccaccctctccacctcagggaccagaatcctcattgtgatttgctacaggcttctttgtctctggagagcttcaagagcaagctagactgaccatggaaataagtgacagttcattggtcaggggcctcaaagtgttacctggatgaatgagagggtctagacttaggcccagagagagctggggatttcataggctagaaagaccccagaacatagtacaattcagttgcctaactccagtgtacaccatttacatcatatgactagtgaatggtacccctgggcctggggagaacatgttgtttctccttaagattctggtacatccaccttcaaagatcccaggccaggggactgagaagagtgcaaccctgagtcagccagggtgtttgactcagtggtactcaggggacagagagagaagatgagcctccatgccagatgcatgtgggtttgagtcacaactttggcactcacaagccacctggctttggatcaatcacttaatctctctataccctggttttccatgtgtacagtgaagtcagtcatacagctgccattgagaaatggaatcaatgtcataataatactcaaacaatacataataagcagtcaatacatggtggctattgtggctcatatgaataatagtactagtgctggtgtgccaatgaaaggacaaacaaatgaaaaatactgctctctgtgagactcttttcaacccaaagggcatcttgccctgcatggccaggattctgcagatagatggacagggaagttgcagttggtgaagagtcacagtggcattcctgacttcctctgcctgtcttttctatcccaagggacttctgctccctcagctcacacttaggttctgctgatggtgtgctgaaaacataggtgttgaaaaaaagcagagctggctcagcgcagtggctcacacctgtaatcccagcactttgggaggctgaggcgggcagatcacttgaggtcaggagttccagaccagcctggccaacatgatgaaaccctgcctctactaaaaatacaaaaattagccaggcatagtagtgggcgtctgtaatcccagctattctggaggctgaggcaggagaattgcttgaacccgggaggcggaggttgcagtgagccgagatcgcgccactacactacagcctgggtgacaaagcgaaattccgtctcaaaaaaaaaaaaaaaaaaaagaaagaaagaaagaaagaaaagaaaaaaacagaattgacagccagttcagaaaccttatgaagagctagtactaagttatcatcaccagagagtgaaaaggaccttcaagtccaagacagcactgcagacacatcacgccatgccaggcaggggactgaactcagtgctgcgtgcaacctaacattctgtgatgaaggattaagtcatgccactagcaaagtgggtgtgattggcgagagatgagtgtctgagctggggagaaaggaaagaaccaaaataatggcagaaatatttttatcctgtaaaagtaaaagtcactgtcagtgtgacaattgaaagaccttttcattccctctgagatattttcaaagtgattaacttgaaaaatcttcgatgtaagggctgtaacatgactgggggggcatcttttttttttctccttcttctcttacttcttggaggaaagatgaaataaaatggttttaagaaaacgaaagacatcctgaaaaagaaagttaacaaaaacacaaaaggaaaaagctccctataaaaagcttactacctgctccctgcagttacaggtatcattttatgttagcgcttatgaaatatttctaaaaaaaaataaagatgttcacatgggttttgcttccttgcttaaattctgtcacctcggtggagtccagggtctttgctgcttacacacattgtgcgggacccaacatagtagggacttggtaaatgttaaaccatcatcattaaaaaaacactttctcttccactttgagtcctttaagttttatgaatgcatgcgggcagaatattaattccagcacagtgagtgttgctcaggagtgattatgccacctggcttgaagccttccagtgcacttgtggggattttcatttcactcatcatttaaagtttgtcatgaggggtctctgtgaaagaaaaatatagaggagcctcggctgggtgtgggggctcacgcctgtaatcccagcactttgggaggctgaggtgggcagatcacgaagtcaggagatcgagaccagcctggccaacatagtgacaccctgtctgtcctaaaaatacaaaaattagctgggcatggtggtgcgtgcctatagtcccagctacttgggagactgaggcaggagaattgcttgaacctgggaggtggaggttgtggtgagccaatatcacgccactgaactccagcctgggtgacagaatgagactccatctcaaaaaaaaaaaaaaaaaaaaagaaagaaaaatatagagaaacctaaggagagaagactcactggacatactgtgtgaagagttctctgactctagatagctttgtaaataaggcagttatgtttcctagtctatttcttttccaaaagaagggaggatgtgtgattgcctctagcccaacatttgtagccaactggatgagattccatgcttttaccatcattgacccaaataggtaacctaagaattgagcttaaactgcttctcttgcagcccatctgtgcttccaataaggaatctgagtcatgtctagattaggaatcagatactttttttgccacttgagatgagctcatttaatagaatgcttccatttggtgtgggataaagtatggatataggaaggaggtgtcgggatcatagagctgtaagggcatgaggtcctgtgggagcaacctcagcctcttgctttggggagggtgaatgtgtggatacctgcacattactcctggctctgccattatcttgctgtgtgacttcggacaagtcacttagcctttctgaaccttaatgtcttcatctgtaaaacagaggtttggaatagatccatataaattcatatttctgtaaccctgtgttacaggctatatgacttttttcttttttcttttctttctttctctctctctctttttttttttttctttttttttttttttttttttgagacagggtcttgctctgtcacccagactggagtacagtggcacaatcagggctaactgcagccttgacctccaggctcaagtgatcctcccacctcaacatcccaagtagctaggacaagtacttgggacatgtaccaccacacctggctaattttttgtagaggcagagtcttgttatgttgcccaggctggtcttgagctcctgggttcaagtgatcctcctgtcttggcctctcaaactgctgggattacaggcatgagctgccacgcccagcctgctataagacttctaattggactgcatcatttcatcccagagacctggttcccagggttttcacaaggtaggaggcattgtttcatagttcaggtgagggtgttgataatctaggccaggactgtgacaagggtgacatcatctgtggtatgaaatttatttttagcatcagaattttgggggcatcttgagttgaagagcagtggttccttcattgaatgacactaatttggctattctctgggtctcttcttacagtttaaaaaggggctgatgatgggctggatgggaactgtttccctggtaatgttgccaactcatctctttgctggtgccagctttcttgtctgagttgtagagctcatgcctgatatgacagtggcaaaggatcatggaaatcatgtgcagggtaaccagggaaccagcgcagttgccttcagtaattaactaagacatccattctgaggtgggtgggacctcagttccagctcctctgcatatcctcagggacagggtaaggcttgtggtcttaaacagaagagctctcagtccgctgggtgaacattgctttccctgcgtgtttttacttgcaagggtattttgttcaaacaattttaatatttatttgttagggggttttatctctattcataggtgatatttacccatgaatgagtatttttcttggaagagtctctttcctttcttccttgtttttttccctcttttcaactgggtttacctgttagcaattggacatatatgtcttgtatgatacagtgccctactgttgctattttaataccatgagaactttgaaaggctaaaaccaaagtacaggacccactgaagcctacactttacaaataaaaggtaattttgtcagctaatttgtagtggattccttgaccttaatctttcttggtcccctggtcaaaatatagtcacccaatttgctttttttcacatgtccatattttaattctttgccaatcattgtctgataattgtcttaattatttgtttatttttgctcctctgcccctactagaatggaagtcttgctgaccactatctccaggacctggcatataggaagttcctaatatatatttgtcaaatcaatgaatgaatgaatagatacttaagtcatagaatatacgtcaagtccacagacccagaatctaaaataaatcggaatttaaaatgttgtacatcagttggttaaaacgctaatagaatagagatgttacttaggggattcaatggtccgaaggagtctgtggccaggaggaagaaccaagaacaaccaacagtcctgttcctggccaaaaaccaggaacaggaccttgggcaagtcacatgacctcttgggctcagttttcccatccactaaataagaggatgggatgtaatgatcattagttcacttagccatttattgaacaggactatatcactaccctagatgaaaaagcagtgccatataaccataaacatattcattacatataaaatatgcattactattaaaatgtgaaaaagctcataagtgtatcaccccaatcttgcatactgccagtagaacatgtactgcatgttgggagacaccgtgatagagcatgctatgtgctgtgacagagcaagctacaaagcctaactgtagaaccagatagactagaagggagaaatcctagtgatagcaaacatttcagtagctctgagatcccatcatgttctaccctcacaacaactcttagggtaggcattattattatccccatttaatagacagggctcagtgttacttgctccaaatgacactagtggcaagaggacttaaacccaggtcttctggctgcaagtcccaggccctgaaattttaccctgtaatatgctagctgtggtttggcaaatgtaggagaaactacatcatgtacaaggtatatcccagcactttaagcctcagagagttttctcaacattttctcctagagtaatagcttctgtggcttgtacagagcctccctaagcagcactgatttcatgatcgtcaacagaatccagggaggtaagggcagtgtgcagacccctttccagcctctggggagagaaagaagtggccactggaaccttggtggagaggagtattccaggatcccggtacacgatgggcatctgtttgtaaaaatgcatgtaaatttggcctccaaaatattccgtgtagtctagttctcactgaactgtggcccactgataacagcagtgttcactccctagagaggtcgagacagcagcttcccagcactcagaggtgtcttcctgattctccccctggctctgtgagataactccctttagccctttttttgtctgcagccagcaagacctggtgataatgtgaggcccgaggccgagctaatcctccctgtagaaatccaacagtgaagcgtcttgtctttatgactattcgccgaggatgtgtaaagggaaatgcaagccccaggcagcagtagctggctgggttccagagtcaaaactgaattaaaaactcattaagtagtactttgagctcgcaagctgactggcgcgcagtgctgggaaagctgatggtggaggaagggaagggctggcttcttcccgttggcaaatggcagactgtgggcaggacggggcagtccaggaaacaagatgaaacacagcccacttgtctgtcatgcagacatgtttgtgagtatagcttttggtacagccacataatgtatgctaattgctatattccttcttttttttttttttttccacgggaaatggctcggtgagaaagctctgaaaccaaagaggcaatgcagaaatgccaaaatgcagacattacaaaagagagaggaggaacaaagggaaacaggggatccaaatttacatcatggtttagcgttctgctaaatcagcacctccctggtccatgcaagtcatatggaaaataattgagcagaatttcctatttgggttgattttcactgcatctatctcataggttgcaatttgttaattggattttttttaaaacaagaagcaaaaattttacccccaaggactagaaagttagcaagttaagttgaaactccaaagtaattatcagagcttccagaaaatattaataagacagtatgagctggttctctctctactactgttctgaacaagacacttctcagttgaccacaagactcagatgcaaactggggaaagcacacaactgagcccacttaaaagaatcatccatctgtaagaaaactcattcagaatattttgtatgtgccaagctgtgtacctctagtgttccgttagatatccttttgcaactgtcattctttaaatcaaataaaaacagaccaagatattaaaggaatgctttgtctaatgaagcaagagtgcacagacattttatattgaaagagaatggaccagaaatgagaaatatattttactttgtcattggagtcaaaagaagtattgataagtagactttctttcccccagtaacccttcattttttttaaataaaaaagtaacattctttagagcagttttgtagttacgaaacaggaacttttataatgaatttgattagatgtgacggaaggaaatgcaagtatttttcagaacgatgtagataacacattaaggcatcatcttctgtcatttaagaattatgagaataaagagaactggagtcgggaatgtggttagactctcctctggagggatagctgacgcacggaaagcactgctcctccacttggctcttgcccctgtccagctcctgtcgcttggccaaggccctgagctgaggagggcctcaggcttgctcacctcctgcctttccaatccttaactttgaagccttgcattttccagatatctgagtttacactgagcagtggtgccctcggcaaccttagggtgctccatctcaccttccagcttctccagcaacagcctctgctccaaaataaatgaggtgttcagtgttgctttctgggcaggaatcagatgttctttctttcagttaaactccagagctctggcagagcttgatttggtccatttttctctagggccggcttacctgttggcatttttacagagacaaaatatgctcccaatttatactattttatttacgaaagagcaaagagtaatacattctaagaactttgattagcatacatatggatcattgcatatattccaagtgtatataaatacataaaaaatacccaatggagaataatgcaagacaggaatgtagaaagtgattttatgcatgctgcctttcttaagagaacttgttacttctcatggaaattaaaatctggggatttgctcaagggcaattttccccaaagtccccagattatttccctccctccttggactcattttaaactaaaatttcagtcttttaaaaagaagatagaagaggacagaatttatttgactaccttgtttgacttgctctttgtcatgggtttcagacctgtttctcaggagagctacgtctgttggttcagagtacatttatcaatgccttgaaaatgcccattggccagatttggttgaattgcctcagaaacaaatctctgtttgttaagtaaaccattaattaaatatatggcccagaacttaattcctttggtttactacatcacattttcctaaataagcagatgtattctttcaattataatatcccagaggtcaacggtactcatcttaaaacaaataaaaaataggttgttaaggtaagaaatcaaccttcagcaaaaaatatggtttgggggcatactgtggcaccccattaatagtgaccttgtgaagaccttgtcgttgaatataaaatcaaaatgaaatctaacgatgcctcattttaattccttaagagatcttaaggggtggcagaatgaccacaggcaaaatccaatgcgcgtgtgagaaaaccaaacacacaaacaactcctgacactttggggcagtttttggccctaatcacttgaaaagagctaggcaatgtcttctttttaattatttatgcatggcagtgggtttcttctaatgatggcccaggtgtatatttttcagatcctgaaggtagatcacctgatttgcttacttctaaagacaaagtaagcaaatcacactttgattgtttactttgcttgttaaatccctctgagtgggatttaacataatagtgtggattgaatcacacacacatttcaacccacactatgatgttaaatcccattcagaagtggagtgagtgtttgtgtgtaactatgggtatctatatttttagttgtccttttttgcaaaagattgtcatcacctaaatccctataggtggaaggctcggatctaggctttgtgagatttacatagaaattgccaccttcacaggaagttcaatgagaggtacatgaaagtatgtaaaagcattttgttaactagagtcttataagttggttggaggcaatagctcatataaatactatgtacatcctctaattgagctatatagtatagagactgttaactgctataccagaatttggggataagagacaactctgggaattgaagtggacagagagatactccctgaggaaataaaaatatgagctgaacatgtaagaaatggattagatttaagtaggtatgatgccttattttatggcacagtaaattctatcaccaaacaacactctttatttaaaacaaccttcaagcaaagtatcccactagggcaaaaaatgaatgcagtgaccaactggcatgaatatctgatttactaaaaatttagattcctgttagtggaaattaaatgaacacatcagcattgtaaattaccagtctatttcatgtaagctttagtagtatggctctttaagttgaatgctattaggtgaaatggaaaactcaatggctaatttaaaagccaagggcctgcatcctatccgtcaaagtatgattctccataggcctgagtcagcagcaagctgggtttcacatctctttatctgctctaaaaacaatggtatgaagggaagcttttacaagaaggtcagctctctgtatgatgtttccaagagagtactcaatagttcgtgcaagcatttaccctttactaaatgttttatttagccttttaataaatcttttactgctgaaatacagggtttggatttggttgaaggagaagtggtgaaaggtttagttggagaaagttcttttattaaatttctcctccttctgcccaccgagaggagctgggactatcccatacacagtggctcagtatcccctgtggcagagcctctgaagaggtgatcagaacagttaacctgccaagaccttgttgcgtggtcctctttgatgtttaatatagccagacgcggttgttcacgcctgtaatcccagcactctgggaggctgaggtgggtggatcacctgaggtcaggagttcgagaccagtgaaaccctgtttctactaaaaatacaaaaaatgatccagatgtggtagcaggtcactgtaatcccagctagtcgggaggctgaggcaggaaagtagcttgaacccaggaggcagaggttgcagtaagccgagatcgtgccactgcactccagcctgggcaacaagagcaaaactccatctcaaaaataaaataaaataacataaaataatgtttaatatatagggctagaatatctatccaaagctttatgttcatgtagcttatcaagccttcaaaagtgacacccttctcttgctgctgcgtgtcaggacaacatagagtaggaaagggtaaagtgaaagggggaaaagactgaagtcttccctgctcagaataaggaaaaagggtaaagaggaaaacatgagcaaatatggtggcttttcgggggacatttttgagataaacatagcaaaggatagtgcctgaagatgcagtcgaggtcttgaaagaccatctgtgggccaagagtttaaagaaaaggcatttaacagtgtaagaaggacagctgcagtggctcacacttgtaatcccagcactttgggaggctgaggtgggaggatcacttgagcccaagagtttgagaccagcctgggcaacatagtgagaccccatctctacaaaaaacagaagaaattagctgggcatggtggcacacacctgtagtgttagctacttggggatgctgagttgggaggatcacttgagcccaggaggtcgaggctgcagggggccatgttcatgccactgcactccagcctgggtgatagagtgagaccctccctcaaaaaaaattttttttttaaagtggaagaaacgtgtttgggattcaatcaaacccaaatgggagaagttgagaactaggctttaaatgagacatcattttggtttcccagacagggcctgtaactaaggataaagaacaggaaagtagaatcaggactgtgcccctggtgtgccgagaatcacccttcaggtctggaagagggaagaaccaaggtcactgggaaccgggtgtgctgttctgggcagctaggcatccagccatgactgaacaacacaggcaccgtgcaaagaggaaatgcgtaggtgctgattctgtcgtcacttacgaatgatccatctccacctcaccctttgaaatgatgcagtggagttttgaaatgatgcagtggaggaataaacacaattcatacaaacaacaaaaatcacaggtcccttgggttgggctaaggctttatgtcaaatcctgtaatgatatgaccagatttattcatcctggctggggtgcaggacctgagtgtccacctgtacattacttattacagatggtggcagctgaggcaccacttcagccaggaccagagctcaggtcttgaacctcatcctttttggtcaggatcttgaccttaagaagtcccttcctggccaatcaccaagctggttgctgtggcccagcctgatgctgccactaccaatgatattgtccccctcgcagttttactggggaaaaatcaactcatactatttctccctggcctagagctaacaactttctgagggatggaaatcagtagattctaggtttaatatgtgttatgtcggccatttgcattttttctttttttttggttttcttttcaatagccaaataccaaaaaagactaattagatttttgtttttaaaaggcagctggttttgagaccgaataatagtttgatgatttggtttgataataacagatgagggtgaaaggtcaaccatttccctggatttgatcaatggcagtagtttgatggcaaattaaatatcagataaacctgtcaagtgactccaagaatcaatatttactgggaaaagttgtttgagcctttaatgattacatttgctcccaagggaaataatgctagaaatatgttcaggtattaggataggaatacataaaaatcatgtgaggatgattttaaaggaggtcacttattatgttgttattgatcaataaggtattcatcatctgtgtttctggccaagcctagcgccaagcatgagagccacatttctgcctcttattggacagagccatctggagatcctacagggacctcaaactcagcatgcctccaagcaaactctctgtcatctgtcttcctgcttccctttagaatagcttattagttgaaagcttggactttggatactgaacacctggtctccatcccagttccgctactaactaatgcagaccgttgggctgttgctccactgccctgtgccgcctttgcctcctgtgtgcaatggggatagtggcttcctcatagcattaatgtgcacattacatcagatcacagacataaagagcttaggtcaggtcttgaatataccttagccatttttcttattcagccctttatgcaatattgattgcgcatctgctgtgtatcagaccctccttatgacttacgattcctgatttagaaactgtaaaaacactgtctcctgtttaaaccgtatttcttcaggataggggtagcatctcattcatgttttaatctcagtgctcagtttatgaacgtagcactaatttgcctgaattaacctccagaaaaccatgtcttctataagtaattcacattgttttaacaaataggaaatacaaaagcaggagaagaccatgaagatttttttaaaaaggtgtctgaaacctactctagtctcaagaaagtcaggtctaattaaccatgtgaaagtggcttttttgtggtaaaaatagctgatatcggtaatcttttggttttacctaatactgcacagggcacctggcacaccacagggtttcatcacaacaaaaataattcccagatccatatctcaaatgctgggattattctataacattctgaggataatgtacctcagatcttattcttaaagattaaggatctggacctcgtaaacacttaaaacaatctgagaagcagtgagggacagtgaaaagagagtggggatcacgagtcctgtggactggatttaaaacctagttcctgctgggcgtggtggctcaagctgtaatcacagtactttgggaggccaaggcaggaggattgcttcagcccagtagttcgagaccagcctgggcaacatggcaaaacctcatctctacaaaaagtacaaaaaaattagccagccatggcggcctgtgcctgtggtcccagctattcaggaggctgaggtgaaagaatcacttcagcccgggaggttaaggctgcagtgagccatgtttgtaccactgcactccagcctgggtgacagagcgagaaacctcgtctcaaaataaataaacaaataaacagataaatcctagttcagtagcttattttgtctctctgatgctggacaagacagctaactcttattgaggaacctgtcccaatagcttctatttgtccatctataaaatagcaagaatgataaacattgacctttgtgatatgcaaatgaggtaatatgaaaataaaaaattgtataaaccataaagtccatcacaaatgaagggtagtgttactattttagtacccactctccaatagaactgaccacaatatgcataggaaatgcctatgacaggccactcctcgtctttgagattcagttttctcttctgtaaaacaagaggaagagagaggggacgaaattgtcgccaggactccttcaggtcctcccattctgtgaggtgaggaaattctgatttcttacactgtatgagtgacaaatcctgctaggcttgcgggggccacatttccttcttggctgctggaccccttacattttacatgcagaggaggagactcctttcttgtgcgttgaggggcatgtgtattttcctttgtctgcagcaggttttgcttagagaacagggcactcacagatcccaccttgtctcagcctggaggaaaccaaatcagagacttggaaccctgtcattagagcttaagtaagtggacacagaagaaagtgctttggaaatggtgaagcaaacaccaacacaaataggcattgaactctgcttcctttcttccttccttccttccttccctccctccctccttccttccctccttccccctttcccccttcccccttcccctctttggcccttccttccttcccgccttccctccttccctccctccttccttccttccctccctcccttccttccctccctccctcccttccctccctccctccttccttctatctttcctccttttccttcttttgacaggatttcactctgttgcccaggctggagtgcagtggtgtgatctcggctcactacagcctcaacctcctgggctcaagtgatcctcccacctcagcctcccgagtagctgagatcacaggcgtgcaccaccatgcctgacgaatttttgtattttttgtagagatggagtttcaccatattgcccaggctggtcactgtatttaaagagacctggagttggctcacctgacaggttaccccatcacccttcactccatgtgccttttttatttttatttttaatctgtagcttctgtactttgttgaagatgtaacccttaggctattttatcaaccacagctggtgccaggattgggctttgctggttctacttaggtgccctccagggagcccaagtttcaacaccatctacgttatttatttctacttctttcagccagaggataaaacagagaaaaagggagcaaacttcttccttccactgtctttcaccttaacccttgatatccttgattctcatccctttgccttgagaatttttaatagggagaagaaaaaaaggaagaggaaaacctaagagaatgggactgggtaggagagaaacaccgaagagaggatttagaaagcaggtcaaatgagaatcctgcacatggaaaaccaaaccaaaaccactgacaacaaaaagaaaactaacaaccacaaggtccaggaagtatagagaaaattaggtatagactcaaattaggtaataactaaattccctgtaacacaaaagatatccaaggtaaaaaaatgttgtctaactcacaagcaatgatcaatttatttaaactaaagaacattatttgcgaagtctcctgaacttgagtttttttattctcttaagaaaacaagtgttcaaaatttggagagccatagattcaggaacattttcagagatgaaacagatacataaacaaaaatttatttcccacagaaaagaaatgtcatttctaggaatattaggggaaggtgggaaagaacttggctgatggttcagcagaaaccaagaaggaattgccctcagggcgtgtgtgggaggccatagtgccctgctgggtccacacacacgtgtgtgcacgcacacactcacacacacttaggcaattcagcaggcgttggctgaccagcagccaaccctggctgcacacttacctcttacaaaggagaatcttggcatcacagcttgaaaatctttattttggatgggagtggatcaggaaaaggagaaaggaatagtgtcacagcactgaccttggccttgagtggcctcatggagcgtgacaagggtccccaggcctgttcttccacactgtcaagtcagtaaacctcagctctttcgtccatgaagagaagataatatttgccccactacttcataaaaatgctgtgagacaaaacaaagaactacctgaaggacaaaatgctttggcaactctaaggcactctacacatgcaagattttattgctgtgttctggtgatggactctctggtgatcaaaggattagattttgtcactacccatttctatgtattagccttgtattcagtcatttttggacccaggagggatggcacctggcacatagaacgtgctccaatgtgtgcatgaccttaaaaccagcacgcacattgaattatgcttttgccacctttttgttcatgttccctgttgcctctgagacacccagcctagaaaaagttcttttccaagcctcaggctgagatgtgcaagagcggatgaatgcgaaaagatgaatgagttgattgggggagttaatttgatgcagaggacccctgagaaatccagctacctccagggctaggagttttacttccctggagacagattctgtgtaatttcctggtaacaggtggccttctgttttctgtgctgatgctattggtctttggggatccgtggaattagaaccaagtctcctaccacctttgttttctaacagcacctctgtggcaggggtgagggttttgtgtctcaccctgctttgggatcatgtcctccctcagggctgaggtaggtttttgctccaggggagccgaggaagtcttctgttaggctgggttgcctcgatccttctcctggaccctctccggagctctaagctggggcacctgggatggagagccgctcattgtagcttctcagagcatggttactgggtaaactatgttcacctctttctcttcctctctgtttttcgtgcttagaaatgatgtggtgggatggaggggcacagggagaaccacctgggggctgcttgtgaggcttccttatttgctggtacctttcctccctctgaaaaggaagttttggggattccttccggccaggcctctgggccccagcgttagttgccagggatagagaagacttctgtgaggggctctggaagaaaaggttcactacaaaactctgctgcttcaggcgtctcccctcctgcctcaccagctcccattctcttcaaatcaaccacacatttgctttacctgccatgtgggtttctgcagaaaggaggcctggagctggaaatgatttcacaccataagctgctattacaagcttctgggagacctgttggttagttattaattcttagttcctgtaccaagcacctttcatttcttgctcttagccatttagctaaattttactctcaagagtgttttttgcacgaggggttagaggttagaggtttccgctcaaaaaaatttactttggtaaagaggttgagttgaataactctgactctatcattttctcttccttcccttcctccctctcttttttccttccttccctccttccttcctcccttccctccttctcttcttccttctaatgaaaagagacttcattttttattttttgaggcggagtctcactctgttgcccaggccggagtgcaatggcatgatctcagctcactgcaacctctgcctcccgggttcaagtgatcctcgtgcctcagcctcccaagtagctgggattacaggcatgcaccaccatgcctggctaatttttgtgtttttagtagagacagcgtttcaccatgttggccaggctggtctcaaactcctgacctcaagtgatccacctgcctcggcctcccaaagtcctgggattacaggcatgagccaccgtgcctggcctgaaaaacagactttaaaatcaagacatttagtgcttgtggtctttcttgatcgaccaaactttacttttagctaaatcaacccagtccttttttatctcacacatttttctctctaactccagaatcttcacattgtaagttactccagtgttgaacctgggcagggggctggaagtagttggtaggtgaagagagggcagcagtgggagctgacagagcagggaggcagagatggggacaggacggcttttctcctggctaaagcccctgcccatgccctgcccctcagtcctggttaccaatagttcaggaccctcctcatcatctccctttcatactgagtagaaatcagaggcttgctttattcttcaactaccatttctatttccttcttccaaaaccagggtgaagcctctgaggggtgtgtgtgtgtgtgtgtgtgtgtgtgtgtgtgtgtgtgtgtgtgtagatgaatgctaaactctgtggagaagagatcccgcaagcatcctagaaatttacatacatagaaaataatattttgctttaggagatttcagaatcagctgaatgtagcaaaacataagctactaaaaaagccaaaccttataagacacataggttcaattaatctgtcacattttcaaaaaggaataaaatcccaacaacagccaaaaaatgcaggcttccttttgagttccaaacccagctttgggagagcacaaacaaaagtctcattgtctgcaaggcccctcctgcttcgagggtccttagactgtcctcttttgattctgaggtggcgcggaccccttttgtcacacacaatcttctccactgcccccgccccgccacccaggtcgaggcttcacaatcatgctgagttttgtggggaagccctcaaagactttttcttatgaagcgataagtgacacaatcattccaggtcgagcccccgcttttgctgccctcagaccgatgccggggaaagttaacaattcatggggctgcctaagggtttccctgtgaggtgtcgaatggagaatgcggactacaatggtggagagagaggctggaacccggctgcctttctttcctgggaacttcttttctgaggcaactgaatgagacctttacaagccagggtggtggcctcccttcagaatgcctggcccgtttcccagtgtgaaacattccccaaatatgcaactttgtgagcatcccagccgcctgcgctgagaacccgcccgcctgccgcaggaaagctggcacccacgggtatgccaggggtgggggcgcgtcagggcccctctgccaggcttggccagatgctggggcggcccagccccaggttacgtcgtccccagaaagaatctggccaacagtctggccgtgacaagagctggaagcttctctctctccctttaaatcccctccttcattcaaatccgatcctataaaaaggcttttgttgaaggagcagccatggcatcttggtgcacgtctgtgccattcctctcaatatttccaaagatggacaaaagagaacatcgttagttgaattcctgggcaaactggtctgaagattgacttggaaggagtggaggtaaatggcaactgtcacgtggcatttgttttgtttgcaactgatgaagccaaagaggaaaggaactgccggtggatggtaagaaggctcctgccaggggccacctcggcagcaggcgagctcactgtgtgtttggggaagagcgtgctgtggaggcaggtggactgtgcaggctgctgtcgcctggacatgggtgttgaagggtgcagctagcgggctcagggcgttgtgtaggatcacttcagaaagaaagaggctgggatttcattaccatcacttgtggagggagccactttatgtaccttgctcaagtctacttgtatggattcctgcagaatacagacgtgatgacagtcatacccggacactgcactggctgatgctctgggtgcccacaacaaaattgtgaccaaagaaatgactattccttctccttggtcttaagcttttgcttaatttcatctcaacctagtgcctttgaagctcttgaaatctttgtttcaagaagaccactgatggaaagacctagaaagaggatagtttcatgtgtcttgccaattttcattttatcattttcttatttaatttgattttcttttgctttaaatgcacatggttgtcaaaaccaaaaacaaccaaaaagccgaaaagcaatgtccaataaattacagtatttagcattcataataaatgaactttctttcctgtggtttattcttcttaagcctccgttctttgtctgctcaaactgtgggactttgttctgttttggagtttatttttaggcttttggagtaagacatcacatattttctcttaattttaacttcttttatgtggggtattctgccaccgttgcctttttttggccaatattctcttaatattttctgccttcctgcttttgtaagctcatctctgattttatttctttggacctttccctaactgtcttttggcatttggtgtctgtgccttgtctgttttaacaaattttagttccagtaaccaaccccatagggcagtgaagcagaaggactctagatccaggtgacccgggtccaaatcctggcttgaccacttactagttgtgtgactttgggcaggttaattctcttctgtagactcattgctttcgacagtaaagggggataatcatagtagctatgtcacagaactcttctgaggattaaacgaagccatgtatgtgaagtcttagaacggtgcctgacatcatcattgttctgtttaggcttctgtctgtgatgtggggtttgttggtaaatgttagctgttactgaaagtaggatggtgggggagaatgggcttggtaacagtgatggtggttggtggtgagtatttcaacatgttgctgtttctgtagtacttctggtccttcctgatataaaggaaaaagaaccagtgtatcctgaactgctttatgttttttattttctaattgctttattgagatctagtttgcataccatacaatttacccatttatagtgtactagtgaatgttttttggtatattattaatttttaagtcgcgataaaatataacatttgccgttttaactatttttaaatgtacaacttggtttcattaattacattcacaaggttgtacaaccatcccctctttttttattttatcaagtttttgagacagagtcttgctctgttacccaggctagggtgcaatgacatgttcttggctcactgcagcctcgaccttctgggctccattgattctcctgcctcagcctcccatgtagctgggaccacagatgtgtgccaccacacccagctattttttttttttttttgagacggagtctcgcactgttgtcggggctggagtgcaatagtgcaatctcggctcactgcaacctctgcctcctgggttcacgcgattctcctcttgtctcagcctcccaagtagctgggattacaggtgcacatcatcacacctggctaattttttgtatttttagtagagacggggtttcattatgttggccagactggtctcgaactcctgacctcgtgatccacctgccttggcctccccaagtgctgggattacaggcatgagccaccgcacctggcctttttttttttttttttttttggagacacggggtctcactttgttgcccaggctggttttgaactcctgggttcaagcaatcctcctgcctcagcctcccaaagtgctgggattataggcataagctactgcatccggccttcatcacctctattttaaaaacattttcatcactccaaacagaaactgtacccactaagcaataactccccattccccttcccttagtccctggaaccttctaatctactctctaactctataaagttgcctattctagagatttcatgtaattggaatcaccatgtttatccttttgtgtctggcttatttcatttagcataatgtttcctaggttcatccatgttttggcattatcagaacttcattcatttttatgtttgaataatcttccattgtattgatataccacattttacccaatcatcaatagatggacatgtgggttgtcttaccatttggccattgtgaataatgctacaattaacattggcatacaagcatctgttcgggttcctgctttcaaatccacctggaagtgggcttgctgggtcatacagtaattctattttagctttttgaagaactggccaactatttttctagaaaacagttgcttttggtcattctctcctcttgtatttctctcctctggtgtctgcctctctcagattcttttccatttcctcctgctgcctgagagtcattgtacttccaagcagcagacatgtttgtgtctaccctcccaaccatgcgtctccctcccacatttcggagagaacacccacttccctgtccttagcagctgcccaagcatgtatcaccaactgggccacacatctgcctgatcatttcatcccattgtccagggagggggagtcttcatagaaggtcatgcacaggtctccatccactttggctggagggctggttcagccaccgaatgaccctaggacctgtgagcagggggagtcagcgttgtggagccacagccccgcagggtttcagccctccttagacaggcggtcatcacaccaacgccttgctttgttgttctctgtccactgtgcatgtttttaggaggcagtttggccaccctgtttcatgggagggttgttctccacttttcatttgcttacggtgtctccagtttcctatgagcaagtgaattaattaatgaatactccaacagactgtaagcctgcctcagacagccattctggttgttgggctaattgttagctggggtttctggatgtcattcatttcacaataaggctcctaattaatctcagtgcagttctcaccagaagaaaggctgatacggagaaacatccccaattaccatgagaaaggaaatgtcaagagccccgttgagttttcctggcacccacccttgtctcagatgaaaaccgccattaccgcaaggaggctgcctagaccgaccctgaaaactggagagtgtgagagcgggaggagcccccgaccacacaaacccagcctggggaggaacctactagtggctgcaccctcttttttaatagcaccaattgtgtttcccaagatgatgtagagaatttcagtgctgtgtaccacgtcggaggcagaaattcctctgctgtcccaggagcaggcagggcagtttttatctggaaaagctaaaggtctcctcttttgtttgtgtttttgtgcctgcaggacaaaagatccttcatcaccgaagtgacgttttagaaacagtggtcctgatcaacccttctgatgaagcagtcagcaccgaggtaagcattcagctctgtagaatctggggccgggccccacacactggatagggacccagtggattagaagggctgggcaaatgggggcaggagagggacacaacagagagaagttctgggttaagaggtctttctcaacccccattaagtggctggttccctgcatcggtaccatccagaccactcctcctgataaggacaaagaagaagatagtagctggaactgtaagattttgtccaggcaagggagtatgaatttggggtatttatgctgggggtggtggggagtgctgctgggatggagtctgatagggatgtattagggaaaagagacgcaagccctcaggccgcgacatacagggcaaacctggagaagaatggcatctcaagaatggcatctcaatgcaagccccattcagagctctcctgcacactcctatcgctgtggaaaggcaggctagcatagtggtcaggagcatgggctggcaccaggtcacctgggttcataatcccacatctgcctcttactaggtgggagcctcaagcaagttatttactgtctttgtctccgtttgcacctctgtaaaatgggggtcataatagtttctacatttaatgttcatatttaatgttgtgcttagaagtgccaagtgcttagaacagagcatggcacataatgactgaaatgtaaatattagctgtgattgttattattaccaccatatgaaactgttgctatggagagtcactgggtattttggagcccagtgtgacataagaacttggttgaagccaagagtccctggtcacccaggccagaggagttgctatcactccactttccacttcctttattatagttgagcgcttttgagatagagttgcttctcggacatgaaagcagccaaagtccctgggaaccttcattgtttgcagcgtcccttctacccacactttgagcatctctgtgactgtatcctgtttttgtaaatggagatataattcaaggaccataaaattcatccctttaaagtgtgtaatttggtggtttttagtgtatttacaaagttttgcaaccatcacccttatctaattctagaatacgtctatcacgccccaaaagccctgagctcatcagcagtcggtctccattcttccccgatgccgacaactgcgaacctgcctgtcctgatttgccaattctggacatttcatataaatataatgatatactatgtggccttgcgtgtctggcttattttagcctaacagtttcaaggttcatccatgtcgtagcatgtgtcagtactgcattcgtttccaggctgaacagtgccagtgtatggatagcccacatctgtgtatccattcctcagttgacggacacttgagttgcttccactttttggctgttgtgatgtcacctgtcatgactgacttctgcctgctttagatcagcaggacctctgacaatccatgaaggtgtgaagctgaggaaagtgatgggatagcaatctctgttactaacagaatcgggaagtaattacagcttgaaaaaagctggagaattacagcctgggcaacatggtaaaaccctgtctctaccaaaaatacaaaaaattagccgggcatggtgttgcatgcctgtggtcccagctactcaggaggctgagatggaggattgtttgaacccaggaggcagaggttgcagtgagccgagatggcgccactgcacactgcactccagcctgagcaacagagtgagaccctgtctcaaaaggagaaaaaaaaaaaaaaaagctggaaaattaatatatgtccaggcaaactgcccggaagagttgtgagaaaggaaaaatatggaattttataaaaggaatccaggcttgcctgtggagcagatggggctgaaacaattacttaggtacatgtgttttttgcatgattacactgtggggttcttgggtaaggggtcatggtctgtttacttttgtatcctcccctcagtgcctaacatgatgcctggcaagtaggatgtgctgaacattcatgaactgggctcagaatggataccttggtgcttagagtggtgtttgctgaaggacagctggcttcctgccactgaaaagtgcacagagagttccttagcgcaaaccatgtgcaattatctcaaagattgctatttaggggcagccttttctttatattcaatgtcaagcaccttactgatgccactggagactgccgtggagctgtgtgtgtgcttgctgcacgccttggaagggcatatgggaggggttggtttgggaccctagtttggaacaccgtgcttactgaggaggccactggggaacctggactgtacatggtgattcagcctgtgagatagttccgtcttccctggtttcgcagaccacgtgctgctagcagacatttctaacagctgtggaacaaatgattaccagctgtgaagactgctttgaaaaagaggaggaaactagggggagaaagtcaactatcgctactgtcgtgattgtagagaaactttgaaaatggcattcttgggcaaactgataactacacttattggctttgtggatgatcctacagccagggatccattcaaccctcccgtgctcttctggcctccaggagaaattagacctttggggaatgaatgctttttgctggtaataaactcccatggctccgaaggctagccctgtcctgaaggtgggatggcagcactgcccatggctcagggcctacgttctgtgctttatttcaggtgcgcttaatgatcactgatgctgcccgacacaagctgctcgtgctgaccgggcagtgctttgaaaataccggagagctcattctccagtccggctctttctccttccagaacttcatagagattttcaccgatcaagaggtaggttcgtgtctgagaatatctgtgcttctagtggcttggttgccttaggttcctctttgagagcactgggggagacaaaagaagaagggagggaacctcacagctctcctgaaataagcaaaactgcatgatccaaaatactttatttctatggctcattgccaaaagaatttagagcactcatttacaattaattggaatcattcttaatgtgcctgagatatagatgggaggggttggaacagtcaacactttacagatggtaaaaatgatggagaaacttgaaatgtcagagcccaaaagaaaacctgcgtttcctgttttctgaaataatactccaaagatatctggggcttttggcacctcgttttccaggcctaattatttcagatttcttttactttaatgcctggccccagtgtttgaacttgggctgtttgaacagcccacaaaagagagagggctttacaaaaggagccacgtaggaaaatggggcacgtctgtgacccaagaaaaagatggctaaagtagctggactgaagctggatcattcatatttctaatgcgtatcttattcaaagatgacacatataaagtgttgaaaactgtgtgaagttagtcgtattttgtaaaatgagatcaaagattttgatatgcttatttctgcttgggaatttatcctggctgggaaactttccaaagtaatgcaccttgtttatctagcttacatgtttatagcaattacagaaacaattcagacccatccccatagcaggttggggcctgcctgtggccgatagcagatttctacatggagggactgagggatgttctgataagaagagtccccacatctgtttaaaactgtctttctgaggtggtggcttgtctgtctcatgtgtactgtgaagggccacgtgtccttctgcacttaattttccttggccctgaggttcagagaaagctctgtttgtacttttcatcactggcaagaactgtaagcacactgcccaacttcatctgagtcacctggaggcttctttaaaaacactgatcagaaggcataataatgttcactctccagccactggggtggggagaatgtaaaactgtgaaaaggaacatttttgaagccacagctgtcagaaggtgtggcgtcatctgcatcttgaaacacataccaggatgggatcccccaggcaggcagctcctttctcagaggcttcagagctcactcacagttggttcatctttaccacttcaaaatgcaagctttggctgtgtcttcttccaaggccgctagagttcacgcatcttgcctcattcatctcggtatccattgcacctgcacatagtaaaggcctagtaagccgctgttcaattgcattgaaattccaaagctagggctacaattctcactctgcctactgtcctgaagttgttgtttgatcactataatgtcagaatgttttgcaagattatgtccccatgtgcatgttgtacccggaggcaggtgggcatttgtctagtagctctggggtcacacacattattagcatcttgcctcagggaagagagaaagctgcagaaggctggaagtggcccaatgacatggtgagcagttaagtggcctgcttatagctcatttgcatgcacatgggcactttccacattcctgtgcagttctgtagttattttctagtggttggtttctacccaagtcattggtttgtcttttttgccgaaaaaccagacaaaggaaatatgtaaagaaaagtgtcattgccaagattttcaataaggaagtaacacgatttggcatatttgcatctcaaataatatccctccttccccttctttaaataaggttgttatgaatattgctgcttaatcatttttactagattatggaagcaaaattttagcaccatggactgtgcacgtgtcagattttgccactaattacagaaaaaaaaatttgccctaactgaagaactcgagttccgtggaagggcagattccccagggtttatacttattggggtaggttctggaggacacatattttgattatactcaggcaggtatcattatggtcagagaccatgtcatattctcttctgccacccacaaagaaaggatgccacagctaaagtgaattgaaaaccactggactggaccagtggttatcagccttttggagctaggattgcccattgttgccttggaaaaatggttgagtaactgaataacaaacggaccttgaagaccacttgttgtccagctcttttccttttatccagtccttgaaacatactagttaactccagggaaaccaaaaccacaatttgggacaaacaaaaatgatactttttaaaaaatataagaacagctaaaaataaatggactgaaaaaatagaactatcagtacactttgagcttcaggttttggagtcttaatcactggagatcaattaacaaaaccagaactaacagacggtacaattgtctggctaaccccactcctccctgaaatccagggatggtgaaatcatcatctcctggggacatttttcagtctctgtgttggaaagtttttccttatttgtctcattgtatcttcaaggaagtgatgtgatccctttcccacctacagtgtcttagttacccttcaccaacactgccgattttttccctttcagattaatcatcttcagttttacccacagttcttcataaccctgctcactgtccttcaaacttgttcctctgtcaagaaagggaggtgaaggccaggtgctatggcccatgcctgtaatcccagtactttgggaggccagagtgggaggatcacgtgcggctaggagttctaggttgcactcagttataatctgcactgcactccaacctgggcaacagagcaagattctgtctcttaaaaaaaaaaaaactatacttaaaacattaaaaaaataaaataaaaagaagaggagatgggatgggtatggggggaattcaggagtttagtcctggtcatgttttagtgccttgaaatcagacagttggatttatgagaacagagctcagggaactcagagtcgggctggagatactaatttgaaatccattagcatattagaggtatttgaagcccagaagacacatgatgtgacctagagtgagaaacattttaagaagagaaagggcccaggtccagtgttgacaggtcataaggccaagaggaaggagccagtaagggagacttgtttcaggtttttgcttgttggtctaatttctctaaaatgtcatgactcaaactggacaccctattcaggagtcatttgaccaggttaggattgtgagagttgataatgtctatagttttcaataccatcttctattaaagaagtctaaaagtgacttttgaccatcaccatacaccattaatggtcaatggggaagtcaatggggaagagatgcaggctttgaggggctcgacaatttatataatttaagggctcttttttaagaaaaatgaaacaattattaatatacagttaagtacagggccatgccaatgaggtaccttgaagtttaagcttctttggcttcatgataaatccatttgactgtcaactaaaatccctgagtcttttccatggatattattgttaagccacatctcccaatcctgtagtttaccctgctggtttattgaaccttacatttatccctttagaatgccatcctgttagaattgacttagccaccatcatcccaatgtcaagagcttttataaataccttaattctgccattccacattttgctgtgtctcccattttcataccatgcacaaatatgatatgcatgccttcgccatttttatccaagtgaatacaggccagaaaatgagacttgaggcagcccatcatagacctccctccaggttgacattaagcagcactatttatatggctggctggaaatccacctaattctactatcacactgttcaggggtcctattaaatgtctggctaaaacccagagatacactgtctactgtatttcctcatcagccaagcaagtaacctaatcaaaaaggaaatgtagttcgtaggccatggtttagaaattcaaatcttgtttcattaatctcatctgcagtaaaaccatttatttcttacatcttccttcctcttccagtatgcctgcatttaatcagaaaaagtaattaacaaaaaagattatctttgtcccaaagcatattcctccttgttgcatctgtcatccaactttgtaagaaccagggtagcactcagtgtggttacatctgaagtacccactccaggaagataacatgtgttgaactggccaagtttggcacacagatcaacaaacatctactgagcctgattatgtattgaggaaacaaagataactaagatacaaagatacagaagatatatttcctgctatcagaaatgtttagagtagtgggttataatagttaccatttatcatggtgatgatttcccaatttgttcagaagaagcctcagtttccaagtctaagaactagtcacaagcttccttgccactgctaacattgttggatcctccttatggttctcatctattcattgaataagcttggtcaggtgctgccgtgggctggccactcttaagaccctgtctttgcccttgaggcactctctactgtgcttgttggcccacaggtctggaaagaggctgtgggggaaaacacgggcttcattctgttgtgtagttccaaggatgtaggagttgttcttcctcctcctccctctgcccaattccatctgtctgttttatgactgagggctctgtccagccctgtctctgcattcttgtctcatcattcagaatgtgctgctgtttcttcagagggaccagattttccttctctggaaagaaacctgtcaaagcaatgctggctttcttttctgctttgccttgtacatcacggttgttcattcaccagtgtctcttggctatctttcatgacctctgacttctcagaattctgtgcaatcttgttttgttttggggtcatttcctgcatttcatagaaattctctggatagaggtgaaaagacggaaagtaggaagatattccttaagtctttctaccttctgcttcaacctggtaattacatactttacataaaaagagccagtgattgaatgccccctactcacagctggattatacccttggctgccacacctctcagctagggtggaatttcaaaaattaaaatgaactaaacttaatttttaagtttcactattaaagatacagcagttattctagatttgccccctaaaacatattataaaacatgaatagtttgcatgtgctttgtgtgaaaattgggatctagagacttttaattgtgctatagtgattgtgatgagagtctctgctaactattgtacaaaaaaccatatttgatgccctatgtttgctttggccagcaaatcatttgagcaaagatgcctgtcccctctacccaaagatggtattaccatttgctttttcacttttcttagctcccaaaaacaggagttgattcttatcctttttacagaaaattgtgaagtcacagaaaaacagcaaagttttattattttgttattttgcggccctttacataaaatgttatgcttaggactaatatgctaacaaaacaaaaatgactattttactgcaatattgcagtcgaatataggaaaactcagattctataaattattcttacacacattcataatagtagcctcagaatgctgatagtcaggagatagaggaaactaatctaatactagaaggtaagagttcagacctgctggctcagggatgcctggaccaaatgaaaccttggctttaccccttgatcatttgtcatccagaatacagagcccttttcagtcgaaactctgagctgatttgtgagctttactgagacggaaagaatattggagttgatggcatgattctccatcactaatttgctaggctaagaccatgaaatatatggccataatatggagtgagagagacaagtagtgtttttattaaaccacaatttctgttttggtcctgatttgcttttctatgtttacatccttgggaagtactaaacaatgtgttgaaaaatgtttcagccacatttgatcttagctgctcacacccaacttgccctgaaaagaatgggagcagtaagagaacagagtggctcactgtggagttaaacatgagcaaatggggaacgaacttggccaaaccactttaatgtcatggctttaataaaaaagtatttgtatctgcagagaatatgctgggtgacccactcatgtttcaatcagcgtgcactgatgccagaaaccagtaattttttgtagtaataggcaatccgtaacttcttgtctcctatggggaaaaacccaccaaggttttttcttttttacatgccagatcctgaaaggaggccacaacaagtgccctgttaatctgaatttctttaaggtatccatcaggccttttttttttttttttttgccaagtctagtggaataaaagaaaatattttttattagtggtgaaatgacccagacagctttctcttgtgatagtttaacgtttttttttaaagggcatctttgcctttattctaggggtaatattcaaagtgtttcataaccactgcagcacaatcctcagttgcccaggtggtcactggtgttagaactggagcagagtactggcattcccctgctgggcaggaatagatggtggaggggttgttggggaggtgccagggcgagtgggtactggttgaggtagaagccagtagcagcggggctcaggacaaaggctgttcaccttccagtagggaagtatttcagcatttaagcaaccaacatcactatgagagtgcatgtctgaaactggtcctatgtgcatcctgtgatcctgtaacacatagttatagctggagatgatggatcagtgatgataatcacttacaccttttctttctttctttctttctttaaaacccagatcggggagttactaagcaccacccatcctgccaacaaagccagcttaaccctgttctgtcctgaagaaggggactggaagaactccaatcttgacagacacaatctccaagacttcatcaatattaaactcaattcagcttctatcttgccagaaatggaaggactttctgagtttaccgagtatctctcagaatcagtggaagtcccatctccctttgacatcttggaacctcccacatcgggtggatttctgaagctctccaagccctgctgttatatttttccaggagggaggggcgattctgccttgtttgcagtgaatggtttcaatatgctcatcaatggcggatcagagagaaaatcctgcttctggaagctcatccgacacttagaccgagtggactccatcctgctcacccacattggggatgacaatttgcctggaataaacagcatgttacagcggaaaattgcagagctcgaggaagaacagtcccagggctccaccacaaatagtgactggatgaaaaacctcatctcccctgacttaggagttgtatttctcaatgtacctgaaaatctcaaaaatccagagccaaacatcaagatgaagagaagcatagaagaagcctgcttcactctccagtacctaaacaaattgtccatgaaaccagaacctctgtttagaagtgtaggcaatactattgatcctgtcattcttttccaaaaaatgggagtaggtaaacttgagatgtatgtgcttaatccagtcaagagcagcaaggaaatgcagtattttatgcagcagtggactggtaccaacaaagacaaggctgaattcattctgcctaatggtcaagaagtagatctcccgatttcctacttaacttcagtctcatctttgattgtgtggcatccagcaaaccctgcggagaaaatcatccgagtcctgtttcctgggaacagcacccagtacaacatcctggaagggttggaaaagctcaaacatctagactttctgaagcagccactggccacccaaaaggatctcactggccaggtgcccactcctgtggtgaaacaaacaaaactgaaacagagggctgatagccgagaaagtctgaagccagccgcaaaaccacttcctagcaaatccgtgcgcaaggagtcaaaagaagaaacccctgaggtcacaaaagtgaatcacgtggaaaagccacccaaagttgaaagcaaagaaaaggtaatggtgaaaaaagacaagccaataaaaacagagaccaaaccttcagtgactgaaaaggaggttcccagcaaagaagagccatctccagtgaaagccgaggtggctgagaagcaagccacagatgtcaaacccaaagctgccaaggagaagacggtgaaaaaggaaacaaaggtaaagcctgaagacaagaaagaggagaaagaaaagccaaagaaagaagtggctaaaaaggaggacaaaacacctatcaagaaggaggaaaaaccaaaaaaggaagaggtgaaaaaagaagtcaaaaaagagatcaagaaagaagagaaaaaagaacccaagaaagaggttaagaaagaaacaccgccaaaggaagtcaagaaggaagttaagaaggaagagaagaaggaagtgaaaaaggaagaaaaggaacccaaaaaagaaattaagaagctccctaaagacgcaaagaaatcatctactcctctgtctgaagcaaaaaaaccagctgctttaaaaccaaaagtacccaagaaggaagagtctgtcaagaaagattctgttgctgccggaaagccaaaggagaaggggaaaataaaagtcattaagaaggaaggcaaggccgcagaggctgtcgctgcagctgtcggcactggagccaccacagcagctgtcatggcggcagctggaatagcagccattggccctgccaaagaactcgaagctgagaggtcccttatgtcatctcctgaggatctaaccaaggactttgaagagttaaaggctgaagaggtcgatgtaacaaaggacatcaagcctcagctggagctaatcgaagacgaagagaaactgaaggaaactgagccagtcgaagcctacgtcatccagaaggagagagaagtcaccaaaggtcctgccgagtcccctgatgagggaatcactaccactgaaggggagggcgaatgtgaacagacacctgaggagctggagcccgtcgagaagcagggagtagacgacattgaaaaatttgaagatgaaggagccggttttgaagaatcttcagagactggagactatgaagagaaggcagaaactgaggaggctgaggagccagaagaggatggggaggaacacgtatgtgtgagcgcctccaagcacagccccactgaggatgaggaaagtgccaaggcggaggctgatgcatacatcagggagaagagggagtctgtggccagtggggatgaccgagccgaagaagacatggatgaggccattgagaaaggagaggctgaacaatctgaagaggaggctgatgaggaggacaaagctgaagatgccagagaggaggaatatgagccggaaaaaatggaagctgaagactatgtgatggctgtggtcgacaaggctgcagaggctggtggtgccgaggagcagtatggattcctcaccacaccaaccaagcaactaggagcccagtctcctggccgagaacctgcatcttcaattcatgatgagactttacctggaggctcagagagcgaggccaccgcttctgatgaggagaatcgagaagaccagcctgaggaattcactgccacctctggctacactcagtctactattgagatatccagtgagcccacccccatggatgagatgtctacccctcgagacgtgatgagtgatgagaccaacaatgaagagacggagtccccttctcaggaattcgtaaatatcaccaaatatgaatcttcattgtattctcaggaatactctaaacctgctgatgttacaccgctcaacggattttctgaaggatcaaaaacagatgccactgatggcaaggattacaatgcttcagcctctaccatatcaccaccctcttccatggaggaagacaaattcagcagatctgctttacgtgatgcttactgctctgaagtgaaagccagcaccactttggacatcaaagatagcatctcagctgtttcaagtgaaaaggtcagcccatcgaagagcccgtccctgagtccatctccaccatcacccttagaaaagacccccctgggtgaacgtagtgtgaacttctctctgacgcccaatgagattaaagtctctgcagaggcagaagtagccccggtgtctcctgaggtgacccaagaagtagttgaagaacattgtgctagtcctgaggacaagactctggaagtggtgtcaccatctcagtccgtgactggcagtgctggtcacacaccttactatcaatctcctactgacgagaaatccagtcatctccctacagaagtcattgaaaaaccaccagcagttccagtgagttttgaattcagtgatgccaaagatgagaatgaaagggcttcagtaagccccatggatgagcccgtgcctgactcagagtctcctattgaaaaagttttgtctcctttacgcagcccgcccctcattggatccgagtctgcttatgaaagttttctaagtgctgatgacaaggcttctggcagaggtgccgaaagtccttttgaagaaaagagtggaaaacaaggctctccagaccaagtaagtccagtttctgaaatgacttctactagtctttaccaagacaaacaggaagggaaaagcacagactttgcaccaataaaagaagactttggccaagaaaagaaaactgatgatgttgaagccatgagttctcaaccagcactggctctggatgaaaggaaattaggagatgtttctcccacacaaatagatgtcagtcagtttggatcttttaaagaagacactaagatgtccatttctgaaggtactgtctcagacaagtcagctactcctgttgatgagggcgtagcagaagacacgtactctcatatggagggtgtggcctcagtgtccacagcctcagtggctacgagctcatttccagagccaacaacagatgatgtgtctccatctctgcatgctgaggttggctccccacattccacagaagtagatgactccctttcagtgtctgttgtgcaaacacctaccacattccaggaaacagaaatgtctccatctaaagaagaatgcccaagaccgatgtcaatttctccaccagatttctcccctaaaactgcaaagtccaggacacccgttcaagatcacagatctgaacagtcctcaatgtctattgaatttggccaagaatctcctgagcaatcccttgctatggacttcagtcgacagtctccagatcaccctacagtgggtgcaggcgtgcttcacatcactgaaaatgggccaactgaagtggactacagtccttctgacatgcaggactccagtttatcacataagataccacctatggaggagccgtcctacacccaagataatgatctttctgagctcatctcagtatctcaggtagaggcctccccgtccacctcttctgctcataccccttctcagatcgcttctcctctccaagaagatactctatccgatgttgctcctcccagagatatgtccttatatgcctcactcacctctgaaaaagtgcaaagtctggaaggagagaagctctctccaaaatctgatatctctccactcaccccacgagagtcctctcctttatattcacctactttttcagattctacctctgcagtcaaagagaaaacagcaacttgccacagttcctcttctccaccaatagatgcagcatccgcagagccctatggcttccgtgcctcagtgttattcgatacaatgcaacaccatctagccttgaatagagatttgtccacacctggcctggagaaggacagtggagggaagacacctggtgactttagctatgcctatcaaaagcctgaggaaacaaccaggtccccagatgaagaagattatgactatgagtcttatgagaagaccacccggacctcagatgtgggtggctattactatgagaagatagagagaaccacaaaatctccaagtgacagtggctactcctatgagaccattgggaaaactaccaagacccctgaagatggtgactattcctatgaaattattgagaagaccacacggacccctgaagagggtgggtactcatatgacataagtgaaaagaccaccagcccccccgaagtgagtggttacagctatgaaaagactgagaggtctagaaggcttctggatgacatcagcaatggctatgatgactctgaggatggtggccacacacttggggaccccagctactcttatgaaaccactgagaaaattaccagtttccctgagtctgaaggttattcctatgagacatctacaaagacaacacgaacccctgatacttccacatactgttacgagactgcagagaaaatcactagaacccctcaggcatccacatattcctacgagacttcagacctatgctacactgcagaaaagaagtccccctcagaagcccgtcaggatgtcgatttatgcctcgtgtcctcttgtgaatacaagcaccccaagacagagctttcaccctctttcattaatcccaatcctcttgagtggtttgccagtgaagaacccactgaagaatctgaaaagcccctcactcaatcagggggagccccaccgcctccaggaggaaagcaacagggccgacagtgtgatgaaacccctcccacctcagtcagcgagtcagccccatcccagaccgactctgatgttcccccggagactgaagagtgcccctccatcacggccgatgccaatatcgactctgaagacgagtcggaaaccatccccacagacaaaactgtcacgtacaaacacatggacccacctccagctcccgtgcaagaccgcagcccttcgccacgccaccctgatgtgtccatggtggacccagaggccttggccattgagcagaacctgggcaaagctctaaagaaagatctgaaagagaagaccaaaaccaaaaagccaggtacaaagaccaagtcatcttcacctgtcaaaaagagtgatgggaagtctaagcccttggcagcttcaccaaaaccagcgggcttgaaagaatcctcggataaagtgtccagggtggcttctcctaagaagaaagaatctgtggaaaaggcagcaaaacccaccaccactcctgaggtcaaagctgcacgtggggaagagaaagacaaggagaccaagaatgctgccaatgcctctgcatccaagtcggccaagaccgccactgcaggtaggttgagaaggctgggcattggatatatgtcacaaccattctacttgcgtttacagcctttatatttccctgtttggctttgtactgggaagatgagggagcacaattgatgctttaccttccctgtactcttctcctctgcccaaaggtatatatctcagtccagtgtggccttaaggcttggaaatagctcagtgtatggttcaaagcagctgtgattcatcactgggattcctgattttgtgccgttttcgaacacagcaactacagccctgttctaaatcttcagaaccaaggatgtgtctttcaggtgcttctggaagactggtttcagccatactggcctcagaatccagcagggtaacacaggccaggagctcccaaaggcctaaggagaaccagaggtttcacatcaagactggatcaaccagtctagacccaagatttagagtccttttttaaaaaaaattttttttaaattaaaaatgtttacatttttatttaaaacatcaccaggttggagataaatcctcattaaaggcagtgttccattttcttatcagccaaaaaatactataatttcagttgaccagtgagtgtccggtgaaaattgagagaaaaacattgatggctctgctcttacccttctcttaccccatggcctcattagtagagactcaatgctatttcagattaaaattccactgggaagctagatgcatggcctcatgcctgtaatttcagcactttgggaggctgagatggaaggttagcttcagcccaggaagttgagaccagcctgtgcaacatagcaagaccctgtctccacaaaaaaaaaaaaatgttttttaattagctgggtgtggtggcacgtgcttatagtcttagctacttgggaggctgaggcaggaggatcacttcagcccaagagatcaaggctgcagtgagccagaattgtatgtatcactgcatgccaagcctgggtgacagagcaagaccctgtctctcaaaaataaataaataagcaaatgaaatgccacttggcaagagcaggtatccctgatttttgatcattcatgtttttggtcatgattctcagatttatcaggttctcagcaatgacctgggcttttgatggaactggtctatggcagtactgcttcattttgttgcttcacatcaatcacaaggattggcattcatacattttatttgctttaggtaattattcagagatttttagatcacaattcacaaagtaatgtaaatggacccaaacatgtaaggcacaacataatttaaataacattgccctgatttattagggaaaatctgatagagtaatctttggagctctccaattaagtacactttaggatacatttgttaaaactgcaaatttttactttaaacaatatggagtatcaattttaaggctcagttctcagcacatttggcctttctacatgcacatagaaaataatcggaattttttcatgtttaaaatgaatgaaaaaccaccagataattaaccctttcatctgaaagagttgacaactgacctgcacttaggagaaaacatgaaatccatttaaacagataaaaccaactgcaaatttgccagaacatatacatcctagcccacacaatttttaaaaaaactttttttggacatttaaagaggtaatttaaaggcaaagtaataagtgaaaatgagttaattttcatttattttggagatgcttttagatgtctaaaaaggcaaagttgcagtactaattgacttttaaagcaaacctgggcagttctgtcagtttgtgcttctgtgagcaatattcatttgatgttgatggtagtgatttagagtagagggcgaaattggcagacatgtttaattactggaagaactgtaactcacaaacttctagtacaagtcagaattctttaggaattctttggatattttgagggctttcggctcagattcattaaaataaactattgatctattcatagaatgaattagcttatccaattattactttggctgattctcaccactccctaacctctctaaaaataaaactgtacagttgatagaattagctggtggttttcaatctgggatgatagtctttaaatatcctatggagaaagaggattaagcatgtaaaatctagctggtgttttaattggctttacagcaatgaaaccagctgcatattagaatcgcctggggtgcttttaaaagacagtagttccaggccccaacccaagcccacttaagtcagactctagagaatgaggcctgggtgtcagtattaagcatccgaggtgattctgattatatagtcaggctgaagaaccactgcctcaaaatgctagttctattaacatttcaaaagctttaaacttcctaactggaacaagttagttttcccagacctttgtgatttgactgggggttttggttgcagtctgatatgtcctgattagctagagaaagcctagtctttctgaaccttcctttgcccaagtttggcatccagccttgtctagggaaagaagtatcacttttcagaatactgtgctaaggagagaatatggtgtttcatcagtttatgaatgagatggaggtgctgagggccttggaaatcatatggggttaagatcaaaactatttgctaggtagaatgttagggtataatatccagctgtggacaaaattgctatcaatgagaccctaaaatagagcactaagatcacttagctatgttttgccaaatacagacgttttcttttgacttttaaaatctacttcttagatcacttatcaaataaagaaacacattaacaacttctttaggaggagtattatatctagtgccatcttgggaaaggccttcaaactcttcttgcttcctaatattggttgtccacaaagggaaactatcccattcttcatttctcctattgaggtggtaaacaaccatgttatgttttgtcacattgctagcgtaaatgcccttgacagattaccagggagatggaaatgctgtcaccactttgcatgtctcagaggacctacttgtgattgaatagggaaggtgtgattgagtggggaacatgtgctggatgtatggtctcttcaccttgctatgaccttgctttgtctttgtttatttacccaaggaccaggaactaccaagacgaccaagtcatctgctgtgcccccaggcctccctgtgtatttggacctgtgctacattcctaaccacagcaatagtaagaatgttgatgtggaatttttcaagagagtgcggtcttcctactacgtggtgagtgggaatgaccctgctgctgaggagcccagccgggctgtcctggacgctttgttggaaggaaaggctcagtggggcagcaacatgcaggtgagaactcctcgacagtgtctgcactgccgattgagctgtgtccagaggcaatgggaaggaaccatgtttaaagaggcacctcatgtggctgatcgtggatccacatgaggtgcctcctgtgtctgtcacacacgaaatatcctgagaacaaagtcagtttaacacacagtaggtagtctgaaataatattcttggcaccaccaccaaccacggccttggaggaaagacaccttaactaaagcagaaaccatttatctgcaaaatgggcctaagattaattgcccttcctccagtatgccaagagtcttgtgtgtgtgaatcaaagcggtcatatttccatatgagagctcctgaggaattgcctttcttcctttgtgttttatgagtagactgcggctaggaatatggccatttagaaaaacagctctccatgtgaaattccacagcaggagcattgctgaatatagtccctcacaggacactcccaactcccaaacatcatgcctgaccacaaaccatcccttatttatttaatgacagggtctccctatgttgcccaggctggtctcgaactcctggccttaaatgattcttagaaccagctattattaattcagctgtgatctttgcttatcaagttttatttgtggttctgtacaaaattacctagtaaattgtgcttgtatcatattatatagaattacttgttatttaatcatatgaaatctaatgagaggcacccagtggctccctactgaatgctagatggaatttatactattcaggacattacttacccaccccatacctccatccccaaccacacacataaagtaaaggtgcagatctttgttctcaggacaaaatgttagttactcacaatgagtgggcttttgagggctttgaagtgcgcgataaaatccttggattaaatatgcaatatcttttatgcaaaacttaccagttgtgttaaaggaaatacaaaaaattgtaccctaacggaagcacttctcttaacagtaaagaactgagaaactgattaattgctttttggttccagccttcagtttcccttagaaacaatagcttttctttgcagctttattctggttcctggaaaatatacattgaaaaatcctttgcatttcttgaggaaaatagaaaagttttctctcatttcccttcttcttccagtggtctaataccttgctattcaatttttttcatatggtttctgtttctgcccttaaatagctattttttttttctctccctgcaggtgacactgatcccaactcatgactcagaagtgatgagggaatggtaccaggagacccatgagaaacagcaagatctcaacatcatggttttagcaagcagcagcacagtggttatgcaagatgaatccttccctgcatgcaagattgaactgtaaaaaccaaggccagccacaccacaggatctgaactttgtttccagaaattcttcaatttgaaatcaccttttctaaaaagtcaattcatctagttaagtcgctgaacaattacctgccaaatgctatactgtgtcatggtgatgcaagtcactaaatttctcagtttttgctgattgctaagggaaataacagtatttccacaatagggttcaaattcctgcaaaattacctaccccagttcatctctgctgaacatttggaaaccatgcactagccaacccaactgacttctgctaggtagaggcatttgtcttagagagagagagagcgcgggagagagtgagagagagtgagagcacaaagataacgcaggagagagagagagaaagaatgagaaagaaaaggaatgcaagagaaggagatgtaatgacagagagttctggtgagatacccagagagaaaaagagagagcagggtggggtaaggaggagaaaataaaccaacaattaggtctgcattttctcaggcagtaggcattctttagtctacataggcaaagttttccatttttgtcagtctgagtcatcaaaaagagtcttaattttctaaaacaagttggctagaagaaagtaaaaagaacaacacttgttatgagggcatgtgatattttcacatcttaattaagctccttcagtttgaaggctgcacactgacataatgtagtgagtgtagactggccatgcaagtggtttgggccccattcagaactctcagactctaaacacacaagtagattgatctaaggcatgctcccagcatttgtccacccacttagtccactctgagtcgattaacctgcatgcagcaacacccaagtccaccccaattaactgaagcaaataccaaagcagttgggagtacatatggtagacaatttgccttaggaagtgacttgaatgtacaaagatacttgatgcacttattttttaatgtgagacagcaagtttataaaacatccatataggattatagatacttaaaggaacacgtgggtgagcgtgtgtgggggtactagaagctgatctgattggtccaacagtttgatgctgagtcatgcgtgttgaatcccacttcagtgcacctgtggcctctcagtcaaacaagttgtgcctttcacagcttctttactactgcaagttcaagactgaaatggcttctatgatcagaactgggaaaacagtgaatcttatggtggaagaggttctcagcaagtgtacagtatttaccttcctttgtcttacattggctttttaaattttccattaatttcaacataattatgggaacaagtgtacagaagaattttttttttaagatatgtgagaacttttcatagatgaactttttaacaaatgttttcatttacaggaaattgcaaagaaaattctcaagtgatagtctttttttttaagtgtttcgtaagacaaaaattgaataatgttttttgaagttctggcaagattgaagtctgatattgcagtaatgatatttattaaaaacccataactaccaggaataatgatacctcccaccccttgattcccataacataaaagtgctacttgagagtgggggagaatggcatggtaggctacttttcagggccttgacaagtacatcacccagtggtatcctacatacttctttcaagatcttcaaccatgaggtaaaagagccaagttcaaagaaccctagcacaaatttgctttgggattttcttttctggaaaaaaaaaataaaagaaatagtacattgaaaacaaatgaattctcaactcctacggttcatgtagagtttagagaaaatttccatcattgtcatcattgaactgtgaacctgggaagccagatcatgattaacactgacatcaagtttcaagttgcagatcaatgcacccagtgttcagatgaggcaaacttctccgtgacaactgtgctgtgctctgtcacattacatttcctgcagactctaagatctacggagtagagaacaatgacctcattttattttctatgttagttatttatttcaaaattaacattttagttgatttttgtctgataagtctatgttttgcactgctaactatgatgagggtttaaaaaaatgcttcttcagggtcctttcactgaggacctatgcagtctacttaatgctgtgaattacatttttcaaatgtttaattttttaaagaaaattaatattctatttttgttaggcttctctagaaatgcagcttttatttattaccccatttctttcaagtccttggaaaataacatattaagggtacaagaaattaacacatgatggaaaagtcattgtgacgccaatgaatttcattgagtataaactcatctacttcaaatttattttataacacaacctaagatactcaagataattatttaatggttagctcttaagttgaattggtctacataatgcgtgggaagaaaaccagatttttagccttcttgccaaatccagacctctggttgatttttctttgacagaagatgcaagttattttccaatttcacaattaaatgtatttaacctgaacattattttgctttaaaaactataaacattgtaggagaattatagccagtcttcagttataaccactccaccctcctcactttctctctctctctctctttttttttttttttttttttgctatgggatttaatgggaaaaatatgtaaaaactgtcactagtcagctggctctttttcctatgaaatctatcagtacctttctccatccgttgttctcaatatgaccacagagcctgagtataccaagaaaaccaatattcgcattacaggttgctcctgtccttccagacacctttcctgcctgtgtgactaacctaattttgctagttccataaatacacgattagtttagtaacagccatcacaatgtaccatgtacattcatggtgagagctaaagatcgacacagacttctaggagctttgttcatactgattacttaatccaattgtatagattgaatatttgagtggaaggaatttacactctgtttaaatgatgggattctatcgagatagcactcatgatcatgacctttttggtagtattcttaaacaaaattctacagagactaaatgttagcgatgatcctccattttcaattttaaccaattctgtcccctttctcaaaaccctgagccctgtgcatgctttctcagtcttgtggtgggactggatacaatgactaacttcccctcctcccctctttaaacaccattttccatggagttcaaaaaaattttttttcttaacgttacatatcatagtgaatggtttccccagtgtatatgaatgttttaagtgtctccaatagcttatgcagtctaggagctttccaatactcatttaattaagatttaatcatttgctaatggaaatcttaccacctttcattttccctctgttaccaaatttcagctcttaggagctgctctacaattctgaatttgcttttcttgcctctctttagtcacctgtcacaggaggttcctgctcagtaatgatattgtgagttaggataataactttttttttttgtgcttcagatttagaagaaaagatcctgtttccatttgaaaggaactgtaagcttttatcttttaaccaactgaacaatacaccaaaagcagcctagggatgagcatttctttgaaagcaattaggttattcacctggtattaaaactatttactgttaaaaaatctgtgacttcatgaagttgatttttaaaggcagcatcaaaaactgaaaaggaagggaaaaaataggcagcttctctgcacttgtttggagctccccaaaacaggagccatggagaagtggcatcaagaccgggctgccctttcgagaacaccctgtggcagttcagagacacgcttttcctacactgcatgcagcccctctttccagcactggaaagaagtggtcttgagcccagctgagaagcacttcacactcctctctcttgttctgaatggtgtttgtgtcagtctgcagctgtgtatggtattatgtcttataatcctgcatcacttctatcctatccagtcatatctaatgtagaaaattagtttccagtgaaagtaatatgtagtgcttttatgatatttgtgtgcaatatcccctcttccattgaggatatttgatgtaaaggaaaaaaaaaaactcagttccacaataaaatacaaaagtggcaaaagtt

SEQ ID NO: 66 - DNA, 226477 bp, Homo sapiens
atattcaagcctgctctcaggcctgaaatcttttgacttcattctcaggaggcaagactgggtctacctctagatgtctctgatgggatttagtgtgcagcttgaaatgcaggttggttatttaatgaagaaaatcagaagtcttgcctctttaaagttggttttaaacatttattttatttttttctatcaggaagtcgtgtgtgtgtgtgtgtgtgtgtgtgtgtgtgtgtgtacatgtgcagaaagaatgagagagagcaagattaatttaataattttatgtatgaaatgttggacatattgaaagcagaggaggtaacatcacatatgtagatgttacctgaattcctccagaaaccaagaaaaattaaagtaagctaattaaagtaagtttactagagcaatattcttcaccaaacattggcagagtcggcttggttaccatgataaatacctgcaagtcgttccctagaggagcctcatcctttccttagctacaccctttgtttctgctcttccttgaagagccttggaaggcttttctctctttgctcttgaaagggcagctgaaatgcctcttctccaggaagcctctcctggagaaaagaagcagcccacctttctctggactctcatagaactttacttccatgtctttcaggcatgtgtttaattgtgccacgtatcatagtaatttatgttcaaatttctctaatcacatttatctaatctcttctactgatttataagctccacgaaggcaagatttaggatagatttcactttgtacctccacatggattttagcactgtaccttgcaccttataggcacacaataagtgtgtgtttaattaataaaataaatgcatccaaacccacttctgctgtacagcagtaacctataacctaggtgttcttaccagagaagataaaattaaaactccatttaaaaagttaatcaaataaatacctcccttattttctccatcccaattcagtatcaggcatcttaaatttggtcagaattagttgactagtttagagtttaatggtttaagcaaatattttttctttttcttccttttcttcctttggaacagaggaaactttgctggacaaaaaggaaaaatatctgggtgggagaaattgggtggggccagttaagtctgcattccgctactggatttagttgaaaatatcaagctgttttcaagaattctggattaaactccctcccttgcattgtattcaggggtgccttccttgaagaattgaaagcagaaagatttgggagctgagagttaagctgaacaaaaggtaactattttaaatcaaaacatctgctagagaggtgaatttaacttaaattccaaggggcaattgccgttcagctctcacctcatggacctatcctctctgataaattttccctggctacattaataaaagttctggaggaactgtcgttttgctatactttagaaatagcaacttaaaatatacttcatcttcttttaatgtcccagaagttgtgcctttcatctcccaattgttctttataatacaaggtatgatgtggccttaatagataagcaattcttgttctttttgctgagcatcccagagttttggaagattttggaaacccttttgttgtggtgatagtggtatttatttctcaacttgtgatgtatggtgttatctaccatggttgtgtgggtcgataaagccactgctattagttcatgttgactgaagagaacctatgggaaaggtagtaggaagagcttaactggaatttccagaaatggtgccttcaggagtcaaagcttggaatctgtcatttgaatgctctcccatgctctggtctgaatgtttgtgtctcttcaaaattcatatgttgaaatcctaactccaagatgataatattagaagatgatgcctttgggaggtgactaaatcataagggccaattccctcatgaatgggaatgggctgaagagagacaccccttgtccccttcactctgtgaggacacagcaagaaggcactgtctgtaatccagaaagcagacctgcaccagacaccaaatctgccttgatcttggcttgctagcctccagagctgtgagaaatacatttttgttgtttataagccacctggtttatggtactttgttctggcagtccaaacggtttaagacaaaaaattagtactgagaagtgggggtgctgctgtattaaatacttaaaatgtggaagcagctttggaactggataatgagtagaggctggaagagttttgaggtgcatgctagaaaaagcctatattgtggtgaactaactattaagggcaatactgctggagggcccagaaagaaaaaaggagagctgtagagaaaacctcagtctttttagagaacacctaagtggtcatgaacagaaaatgttagtagaaatatgaacggtaaaggctattctgatgaggccattcagatggaaatgaggaatatgttattgaaaacgagagaaaaggcaattctatttttaaagtggcaaagaatttggcttctctgtgttcttgtcctagtgttttgtggaaggtagaacttgtgagtgatgaaattaaatatttagctgaaactatttctaagcaaagtgttgaagatgtagcctggtttctcttgactgctcatggtaaaatgcaagaagagagaaatgatttaaagatggaattgttaattaaaaggaacgtagagcttaaaattttagaagacttagtctattcatattgaaaaaatatgagaaaacttgtgtggaagagaacaagggtgtggccaaatgattatttgataagaaggttagtatagattgtcatctcaatggaagccaggtgctattaatcaagataattgggacatttatcatctcagccctggaaccaaagatagaagaagtgactcaaggatgcagagcaaggaataggtctttgagaaagcaagccagaagagtgagataaagtgcagatgtggaatgatccagcctcagaggatgtttcatactaaggtcaagatgcacatggagccaggaacccaggtgctcattctgacagtgtgaaagaattctgtttcgccaaccctagagggagttgttcaaagttccagaaaacagcagtaagattcgtgatgccaaggaagggtggactatgtatttctgtaatttaatttaaatgaaatccaggacctattgttcgagacaatggattaagaatgactcagaaagcattgtggagatcactggggctgcccttcccatcataggtcctggagtgcagaacaatatcaaaggaaggccatcgctgcccagagcagccttatatcaggggctctactccctgcactccatgcctgtgccccgtggctgccccagggccagcttaggtggctccagtgcagcatgcttggcacccagcaaagccatgggggcatggctgcctctacctggattacaaagaatgccctggaaagccataggcccaggcagacaaataccacaaaggtggggccaccatagagagtccccactaaggcaatacccagtggaaccatgcgagtggggacaccacagagaccacagaccagtagagcccctagcatgtgattcccatctgggagaactgcaggcactcaactccaaacagagagagctgtgccataggctacacctggaaaatctatggtggcagggctgtccaaggccatgaaggcaggcaaagctgcagaggtaggactgccatcccagtgggtctgcaaggcaggacctctgccccagcacctagacagtggaacactgagccaaaaagattatgcttgagcattaagattttggacttgcgcagaacttgccacttctttctttactatttctccatcttggaatgggaatatctagcctatgcctgtcccatcgttttattttggaagcacttaacatgtttaattttaaaggttcacagctcaggatggatagtacctgcggtctcacccacatctaatttggatgacatttagatgagaccctggacttcagacttttaaattgatgctggactgagttaaaacttcagggctcatgggatgaaatgaatatattttgcatgcaagaaggatatgaggctgggcgcactggctcacgcctataatcccagcactttgggaggctgaggtgggtggatcacctgaggtcaggagttcgagaccagcctggccaacatggtgaagccctatctctactaaaaatacaaaaaattggctgggtgtggtggcaggcacctgtaatcccagctactgaggaggctgaggcaggagaatggcttgaacctggaaggcagaggttgcagtgagccaagattgtgccattgcattccagcctgtgcaacaagagtgaaactccatccccccgccccccaaaaaaaaccaaaaaaacaaacaaacatgaatttgggtagaggcaagggtgaaattctatggtctgaatgtttgtttctcctccaaaattcatgttgaaatcctagccctcaaggtgacggtattatgaggtactgcctctgggaggtgattaggtcatcagagcagtcctcatgtatgggattaatgccctcatcaaaaaggctagagggagacccccacccctttcaccatgtgaggacacagcaagaaggcactgtctataggcagaaagcagatcctcaccagaccctgaatctgccctgagtttggacttcccgacttcgggagctgtgagaaatacattttcattatttataagccacccagtttatagtattgtgttgtggcagctcaaatggaataagacaacccagtttggactttctggaaagaggaatctagtgagaaataatatttcaagaagtggagattagtctaatgaggcccaatgaatgaaaagagaaaagggacttatttgtttgtcttcaaaggaacacctctcagccctggaaccaaagatagaagtgactcaaggatgcagagcaaggactgggtctttaagaagcaaggccaggggccgggcatggtggctcacgcctgtaattccagcattttgggaggccgaggtgggcggatcacttgaggtcaggagttcaagaccagcctggccaacatggtgaaaccccatctctactaaaaatacaaaattagctgggcatgatggcacatgcctgtaatcccagctacttgggaggctgaggcaggagaatcgcttgaacccaggaagttgcagtgagctaagatcgcgccattacactccagcctgagcaaaaagagcgaaaaaaagcaaggccagaagagtgaggtaaggcatggatgtggaatgatcccgcctcaggggatgcctgttgtgtaaggtcaagatgcacctggagccagggacccaggtgctcattctaacaccatgaaggaattctgtttcgccaaaactacagagtttttcaaagttccagaaaacagcagtaaggttcagtgatgccaaggaagggtggactatatttctgtaatttaatttaaagaactgacataggtttctcagggatacacaaaacaggttcttactctcatagaaagagctggctcttgactcgctttagggaatgcagttcccagtaaacaggcgccttctataagggaaccatagaaacttcagggagggctcccagaaagctgctgggctggtgttggtgtctctgaacttgaaagagtggcctcattacacccagatttccaagacacagaccaactatcttgggggacaagttggaaggttgatatggcaagtgttaaaacaaacaaacaaacaaacaaacaaaccctgcaaactagatttagttgctgcttcaggaaggcactgccattgctggggtgacctgaagacctgttcaccaacaggagcaaggaacccctgtcccttcctccatccaggcttgtggtctctctctctggtgccccctactggcagagcctaacagggtgtctgctggccaagcagaaaggtgctgtgcagagtcctagcctcagtggaatacaggagcgtgggtctggagttgcgaggtcacaactttataagtggcacgttctgcttatagcgtcccaagacacaagtttctttcctagtagaaccatatattaccgattaccgctagaattgtatttgagccatttctaggtaccttcttttgggagaaccatacctagcttctgcagacttaaaaatcctgccatctcaaaagctgaggtacatgtttgactatgtttatcctttccattcctagctattaacagaaaaaaaaatctactttcactttcttctgaaaagtcaagagcatatccaccaaattctctagcacatacccaatatttgaattttttcatcaccactgtataaaatatatattcaattaccaattctatacattacttctatattgtttttttttcatctgttcaaaatgcatgattaattttctccttctggtcaggtggcctataccaaagttccagagcaggtcacttacatttttctctgactcacttctccacagtgtttctgtttttgggttactcaaatgaatatcttattgacatatcataccattcagtctccccttattacagcctatcatttgggaatatggcatgcttctccatcactgtattttaatctgaagccccttcccaccatgtctcaaaaaatcacattatggtgtaacctcaagcttggttcacttacaatgcacactgagacagtatgatatagtgacctctggactagattgcccatgtccaaatccctgcttttctacctaccacctgtacatgtccttgtgcaagtcatttaacttccataagcctcatttttctccatctgtgaaatgaaagtaacaacaatacctaccttgtaaggttgttcccaagatgaaaagagatatacagtcactaagtgctcaatcaatgacacctattattagtataatggttttaaggctattagcattatttccatctcctctctgtcttccaatattttgggggtgcgattcccaggcatctcccatacccttattcatattctcatcttacacttgttgtcttccataggaaccatgttcataggtttatcaaggtgattgtccttctttcttcctttacttaaagtttttcagttggatcacccagactctggtcaaatatccttccctcgccaagaatacatcatttatcccagtacctagaaccatggctttgtctcataaatatcacttctctttatcatctttgtaattgtacattcaacccacagatttttctttctcttcaaagtctttattgttggtagaaaaaatgatcatataagcttatcatctagggctgggcgtggtggctcacaactgtagtcccagcacttcaggaggccgaggcagtgaatcgcttgagctcaggagtttgagacaagcctgggcaacatggcgaaaccctatctctaccaaaaatacacaaaattaggcgggtgtggtggtgtgctcctgtggtcccagctacttgggaggctgaggtgggatgattgcttgagccaggggacggaggttgcagtgagccgagatcgtgccactgcactccagcctgggtgacagagtgatacctgtttcaaaaaaaaaagtttgtcatctatactcttgagtcctttgattcctcacccaaggtatagtttcttttcagaaatgtcattcatgcaatattttagctcaagacatactgggaggagatttccaggagaaagttaatatggatcttcaagtggcagaagaatcaggaagatgagacctcagagcttaatggaatagctttcaagagcatgatgaatcatcttgggggtgtgacttggacagaatgcttatttcatataggctaagtagagagtattcagcctgtcagaaaaggaagctttcggcctgatgccaaagaaatttgctagtcaaaataaccagtcaaataatttccaaattaattatttttcattttgtgtttgcatttgtacatccagtctcagattctcaaaggaataagttatgattttagcacacaaaagtttagcttcttctcatcactaccctaaaccatctaaattataaaagtgaaactatatattatacagtggtaccttcataaatctatttccaagtgccagaaaataggcattatgagtggggaatttcatatgtgtccatgcatgtacagagttcaggctcggggagataaatgtgtcaagaatgcataaccacagccgagtaattatgcaacttctatttctgccaataaatttcgagcctgatttatgtcagatcagaatataaatccagtcttagcaccgattatcaaaaatacacttttcaggctgggcgcagtggctcacacctgtaatcccagcactttaggaggccgaggcgggcagatcaccggaggtaaggagttcgagaccagcctggccaacatggtgaaacaccatctctactaaaaaatacaaaaattagccaggcgtggtggcatggtggcgggcacctataatcccagctactcaggaggctgaaggaggagaagcacttgaacctgggaggtggaagtttcagtgagccgagacagcaccactgcactccagcctgggcaacagaacgagactctgtatcgaaaaaaaaaaaacaaaaaaaaacaaaaaaaaaaaacacttttcacacttttcagtgttgaatgtattattttcagacagaatataattaatggaatgctatattgggtccatgctgcaaaatctgctgggccttggggtggagtgggagcctgtctagagaaaaaagacaagactcagctctgaaaagagaactgaaatgaaggatccagaaattgtgatgacttgataaaccctgggcctaaactctcatatgagcaaataatgagagcagccaccttaatttctatagaaaaaaaataggtgtatcatctcatctgctaaaaaaaatcagatgaaattgttctgagggagtgaattcccaggattctctacgctttgtatgcctcacctctgccaggtgccaccaatcaccaactctaaatttgtaaggccagggcaatgcatctgagtcctggagaatcacttggggagttttgaaaaatactgacatccggctccacctaggaaatgttagtttaattagactgggatgcagcctaggcattactagttttcttaaagcacaccaggtaagaagcactggtctaggccaactgccctgagggtggctcctgccttgcaaagactatgactttgcaaggcagagatgcagagatgcagaaatgcacacaggacaacggtggggcctcttcccattcttgctgccctttctccttcatgttctttattctcctgccttgtagtgctggtccttgactacaaattgtcttgtagctattgtctataatttaacgcttctgatacccagatgccggctgatccctccctggcctgctctgactccagaaatttgtatttccttctgagtatttgcccactctgttgcaaactctggctttgcaagctcccctagctgcattgacttgaagcaggcatctgattcaaccatctcagttagattctgacttccagtcccttctctctggcaggaggctggggacatctccacaggcagccctgaccatatttgtttaacacgtaacttctgtgggatgagatgaagtcccagcccatccatctagatagccatcttcttgtcataggatgaaaccagcctgggtttgaatcctgggtgaggaagtcacaacagagtgagagagagaaagcctaggtgactagggggtaggttcctgtgctggggcctgagatgtggaaaggagagactttataaagagaagggagaagagaaaatgatgagtaagaccatcttctttaggtaaacctaagtgtgtattataaatgttagcattggccactgtcgcttataaattgctgctgtcatttaaaaaattctgtatcatgtcttcttcatgactttttaataccacccttgtctcaaggtacaagcacagaagtgtgagttgaaaagaaaatgtctataaaataatacatatgctctaattttcaaccaaatatgaaaggtaaacctaaaacccactgctgatatccatgtataatcccttttggctcccagaggtacctctgttaacagatgtgtagtcccggaaggactgcttgacatacaagaaaatacatgtatgatattgcttcatgtgtgttttatataactggaataataccacatatatcattaggaaaattactttttttcactcaacagtctataatggagatctttcatttcaccacatatagagttcattctactcaactactaaacgctaactatggacaaataagctgtttccaatgtatacaattacaaacaattgtataaatacaatgtatagcttatatgtgtgtgtgaaggtttctttagagacgatcaggaaaagtaaaattgttagacaatagggtagatgaatttttattttaaataggtattgtcaaatttatacctcacctagtaaggcaagagaataccattttacattactctactcaacactactatatattttactttttttttattattattatttttagatggagtctcactctgtcacccaggctggagtgcagtggcccaatctgggctcactgtaatgtctacttcccaggttcaagctattctcctgcctcagacttctgagtagctgggattacaggcgcccactaccactcttggttaatttttgtatttttagtagagacagggtttcaccatgttggccaggctggtcttgaactcctgacctcaagtgatctgcctgcctcagcctcccaaagtgctgggattacgggcgtgagccaccatgcccggccacatatttcaaatgttgcttctctggaatggtatttctttgtttgcatttaagtattttttttcattactggcgtggtgaaaatatgcttcattattgtttcaatttgcttttcattgattacaagtaagattgaacatttttgtgtatgcctactattatttggttttactcctctatgaatccacttcccatattctttgcccatttttctattgggtggcttatctttcttcttattgatataggagtgatttatagattatggatttccttcagggcacaattcacattgtagtctacttgaatggctccccccggtggtgtacagtacacagcctgcacagccataactggcagtcagcttttgtttgtgataaatatgtaaatattttatccttactctgtctcttgtctttacattttacttgtgttatttttcacagtgtagaagttgtttttctagtcatatttatcattcttttcctttgtgttgtttgccttctgagtcttgtttaagataatctttcctacccaaagtaaaacattttcctgtatttcctctgattcttttatagttttactttttatgctcatatatttaatctatctggaaatgactggtggatgatgtgagatagggatctaaacattatctttgtccaaatggataaccaataataccaacaaattattgaatagacatccaaaagacatcccttaactaaaatactacctctaccaccatgccctgctaatttgtgtatttttagtaaagacagggtttcactatgttggccagactcgtcttgaactcctgacctcaggtgatccacccgccacggcctcccaaagtgctgggattacaggtgagaggcagaagaattgcttgaacctgggaggcggaggtttcagtgagcctaaatcgcaccattgcattccagcctggggaacgagagtgagactttgtctcaaaaaaaaaaaaaaaaaaactaaaaattaaaaaaaacctaaaactaaaaaattcaaaaattaaatactatctctatcatatggcatttttttcctatatttgtaggtccattttgaggctctgaattctgttcttatgattaaaattatatttggagaaattattcatttagctacagtagtcatgggttatcatgatctattagtgagagtttgggtttaaataaaaatctactctatattaagtttaattcatagtatataacttgatgttataataaactatgtattataaattatatggagttctcacttctgacaggaggctcagtctaaataacccttttgttatcttttaaagctcccacattgaggacctgcatgattcttagatcagatcttggtgtccagtgaagcagccaacttgattttatttcttcctgaatattattatgacttgaaactcataacttgattcatagtgtattaataaaattaattcatatatcttttaagtaaactgataatttagaacaagagttcaaaaatataaatatgagcttttccatgggcccgtaggaaccttaaatgccatccaatagcacagtttgacaaatagtagtcagtgaataaatatatgcagaatgactgaaagtagcgctatgcgtaacttgaaaaccgccacttacgctcatttttctaggcactttactgatttgcttcattcagagtagctgttttgctcttgctgttttaaggcatatggtattagaacttggcatgaattgctttctttgccagaaaattttgagtcaatttagtttttttcttgggctttttttttaagcctgagacacttagttgtttagttattggctatcaaataaacccctgaagcataaacattattctccatattggctttccatatggtgcaactgaatgaaaactgcacttactttactcttccttctctctggagagcacagcctacgtagactagaatgtgaatgacgacccctggagttgtgcagtgcacagtactgttctccttccacctcccacttccattctctacgtttctctatccaaaaagatcctcctggctctgcctatagatagatcctactatctatcctgtatgttcgcttgttgatgcttacaatttgcaggtctgtgttccttgaagacctcattccacagactgcaaacgttactcatgtaattagcctggagacttctagcagtttccaggcctgagttcttatcagggtttgtcttacaagagttcaaatggtctcctgtatgactattttaaaaatatggaggccaggtgcagtggctcatgcctgtaatcccagcactttgggaggccgaggtgagtggttcacgagatcaggaattcaagaccagcctggccaacatggtgaaaccctgtctctactaaaaatacaaaaattagccgggcatggtggtgcgcgcctgtgatcccagctactcgggaggctgaggcaggagaattgcttgaacccgggaggcagaggttgcagtgagcagagatcacaccactgcactccagcctgggcgacaaagctagactccgtctaaaaaaataaaaataaaaaaaaaaaggagtccagcaaaactttcagaatggctctacaggaggatggcttgcttatccacacaggtattattgattctgcacaggcatctatttgatgacaatgcaaggctcgtaccttgagtcaaacttgtaaccagctgagcacagggactctgttcagtatagcaaacacagtttacgtgggcccacccagaaactttctacaagtacattccacatgctgagtgtgcgggtgatgctagctgattcagactgttgtgtgcaactctatgcttctttcctaaagcctgtgtgagatgatgcaaagctaaagtcaaaactccaagacttatggattgttagaactgaaaacactttagggactttcttgttgaaccatctcattttagaactgggatgactgcctgttgactctagtatatttcatttataaatatataggcacacacatttataacatatataatcaaccatattaatcatattactagcaaatgaatgaaaaattcatgtacatttaaactttaagtgaactggtcatttgggatataagcatgtgaagttagctctcctttcttttaaatatctgcagctcccattggggtgtgtgtgtgtgtgtgtgtgtgtgtgtgtgtgtgtgtttccaagaacacagcagtggagaagttactaattgccacccattagacagatgggaatggttaaaatgtggaacagtttccagctccctgtggaattctggctggctgtttctttactccaaagtctgttttactttgtgaaacagttttattttttaagtaacatttacttattattcctcaaagggatgctgggaaggagactccccttattgctattctcatagtaacatgtgagacaactgcatgtacacagggcttgacagtctcttcctgggaacatacactgagaatagctcagaggatctaggcagacacctgtcactcagctcagcacccacatctgtacccttccttcccagccctaggcccctttatgctgatggaaatcctggcacatggcaattctccaaatcaaggttgtttaaaaattcctacaggccaattattaggcatttattcccctgtggctatttctaaaggtaaaaataacaccttggagagtctgtggatctttctagttagtgtactgtgaccccatatagacttcagccccaaaatgcatgaccatcacgtttataaagagctactcagaacaagttaaacctacaggcaatgccctctagcaaactagagtctagaatatactagtaagagaccaatcattccacaaatatttactgatgctctcttctgggcactgcagagttcatgagaaaaaaatagatctgtctctgtcttcaaaagtctaagtgcaaggtagagactgaaaagtcacaaggtgattgcaataggggagaatgagcacaattacattggaagttcactgtgtgggggctaggagggctcttaactcagacttgggcagtcataaaggttacctagaaggccagaggggagctagctggacacagatacggaggaacagtgctcaaggcagagagaacagcatgtgtgaaaacctgaggacaagaggcagcaaggcacattcaggacaatgaaaaacagtttaatctggctagagtggagagtgaatgtgcgcatgtgtgtgcaggggtgaaggcagattcgcgagggatgtccaagatgcccctggacagagggctaggagctaaattattaagggctggccttttaagttatttgtagatgactaacctttatccatgaaccattcatcctaccatgtgccaagaactagtgctggggataaagcaacaaataaaacagacaaagaatgagccctcaaggagcttccattctcatgaagggtggaggaaagtcaatgaacaagtaatcaaattgaatatacagtatgtcaagcggcaataaatgccaagaagaaaaataactcaaggtgggcgataagcaatgtggcaggatggttctcattctcattctcttttcacatagggtcaatgaggtctccttgatgtggtggcattcagcagagatctaaggaagtgcaggaagaaattatgaagatatgtgcaggggaaagtttgggcagaggaaagaagatggagggctggatcgccaggtgctcagtgtgttgcaggaacaaccagaggctactctggctagagcaaagggagagagcacaggagcagtaggagatgaagtctgagagatagaagggcaagattacagagggacttataggattgtaccctgagtgtggtaggaaatcaaatgtgagttttcaatagggaggtagcataaccccgcttgcacagttctagctgcagaagaatggattgagggtggggtttggggatggagaggcagagcaggcagggagacctgcttattgcataaaatcacataagcaatgatgacaacctaagcaaagtaatagtattggaatatgtgacaaattagaggcagaagagagacagaaaattgaaggatgctaagaggaccctgtcccttgattccaaaatattttatatcataacttgcacactgactgaagtttttcctattacagtatctctcttgagtttaaagaattgaaagattttatttgggcaaatggtgtttttgtttttggtctgaaaaacatagaatttagagagaaaaataaaaggatgatatataaaacagtgcatttacataaattaaagatgtatgcatatgaagtaatacttacaactttggaagaagacatgcaatatagaaaatacacaggaaatagaataggatggtcgcctacagtggggagaagataagaggatgttataaaaataataaaacaaaacgaaacaaaagaacaaagttccagaatgcaaattttttttcttctttcttccttttttaacttttgttttaggtttagaggtatatgtgcggaattattatgtaggtaccctgtcttttcagacagatcaaaacagtaaacgttgttgagcactagcaactcagtactgcttcgttagttgttctagtttagaggaggcctcttagagaacaggtctggggatagtcaggcttaacagcgaacggtgaaaaggagaaatgctagacaaatgatgccaagaaaggtgggtatcatgtgaccagtcagagataaatcattaggacataagaagtgagaaaaacagaattctgaaaacaaattttaccttctccacagtttcatctaaaattggctctgcgtgaagttttatttttacttctccctaaccccaaccccctgctccaacccagttttccaaatgatatcctgttctgacatttaagaaaaaaactttagtgttttcctctctgcgcgcagtggaatttcaccaatttctttggaatgacaagtatcagaaaaagttctgcggctgctgctgaaaccactgctccataatctactgagattcaaggtctcgtagaaggaaaatttgcagtcgattaatttaaagttaaaaaaaataaaactggcagtcaggaggttacttgagttttatctcagttttgtgctgataacatagctaactacttcttagtttacaaagcatgttcacatttcttaatctctttgatcttcatatcaactcttgtgaggcagctactttacaagtgagaaaactaaaactcagagagattaagtgactttctcaagttgcttaacttgtaatctgcactctttctgtgttagaactcttcctgtgtcctgaggtcaggttctaaacttgtctttgcttcttgtaagtgaacattataacatttgccaattaacttcatggggatatagaaaagaaaagtgatgatagtatgggtggcacaacccgttggatgaaaaatgccaatagacatttaccattatttgtattattattattatttttgaaatatttgcaatcaggtctttgcagcttataaaccatcttaaaagggtagtatttagcaggaacggacctgggaacccccagtttggctccctaccatcaggcaaccttctctgtgagtttcccaagggaagaaatatgtacagaggccagtactggacgaaagagcacttttcctattggctggagccttggcctccaaatgcagggtatcttccaactgatcttagttggactacagttgaatcttcggttgaatcttggaccttattactgcattgaggaagaaggctggtccaaagcccaccagccagcaaaatgaagaggaagcagaaaatagaaatggccaggttctcttctaagtgagtgtagtcccagctctccttgccactccagcctggtaaagggagcatctggccctaaatagatatattctatggctctaggctctagtgcctagataatgtagaatggtctctttgaacttgggcagtctcgagcatgggttttctccatgggaggggaggagtgttagagttctggattgggagagttgctaaaagccctcctagctaagggttctgtattagtccattctcacattactataaagaaataccagagactaggtaatttataaagaaaagaggtttaattggctcacggtttcactggctgtacaggaagcatgatgctgacatctgcatggcttctggggaggtttcaggaaacttacaatcctggtggaaggcaaaggggaagcaaccccatcttacatggctggaggaggagggagacagacagcagggagatgccacacacttttaaacaaacagatctcgagagcactcactcactatcacgagaacagcaccaagggggacatccacacccatgatccaatcacctcccaccaggccccacctccaacattggggattacaactggacatgagatttgagccaggacacagatccaaattatatagggttctgaaagtaagaagaatcccacaatttggaaatgagatcaggaagttaaaatgctctaaaattcattcatcccataacattttgtgtgatattataccagatgctgggatacagaaatgagtacttgctcaattagatctagatctagatctaggaccatatctctatctatctatacctctatctacctattatctatttatctatctaatctaactatttatctgtctgtctatctaatcgatctctcagtctatctatctagagtcacatattgtaaatagtctacttaaataaaaacttcccagaaattaactattcaacaaagtgattttgagatttagagatagtctttctaaggagatagattcctataaaacatcaggaaatattcaactaagcataatacataaacatgagttccattacttgaaagaaggcagtgtaaatggcaggcaaagagaaggcaagtgttttggagtttgagcaaaaagaacatatgagtaatcctctggtattattttagggagaagaagttcttcaagcaatggggcttagtttttcagacagaaatatccctaaagaggggcaatttatcagccaccacagattgctggagccatctctccagactggccagcctcttgggttctcggtcagaactttccctaacacctctttctctgtgtcctgagaggggctgtccactggagagaagacttgttataaatggccacctgagttttccctctcagaatatatttcccactagctgggcgcaatggctcacgtctgtaatcccagcactttgggaggctaaggcgggtggatcacgaggtcaggagtttgagaccagcctggctaacatggtgaaaccccgtctctactaaaaatacaaaaattagctggatgtggtggcaggcacctgtaatcccagctactcaggaggctgaggcatgagaattgttggaacccaggaggcagagtttgcagtgagccgagatcgtgccattgcactccagcctgggtgacagggcgagactccatctcaaaaaaaaaaaaaaaaaaaagtatttcccactttaacttagctaattggcattctagtttctaaatcagcccttagccatacttaggtgtttgttattattatggctactacttctctgccttccagaagatacatgtaacaaagtgtccccaaagtccatacaagggtagttctgtgtgtggtatgcctggcattcctgggcatgtgggaggactgtatcattagctcccctttccagacacctgcacctcttaattagggtagcaacaaacaaccagactccagggctcctggcctggacccaaatccacactcaccgttccccaggcaccaacttgcattctcagatttggttctgggtttgtgtacaagttgaatataaataattttgtcaaggtaccttcatattttgtttgcatttttaaattctggctcagaaagggagtagagaaaaagagaaaaaaagagaaatataggtagggatgatatatgactgatgattttatgatatagacttgattttttaaaattgtgtttgccttgttcaccacaatggcattagggcttaatagagtaacacataacaggcactcaagaaatatttgtcaattattcattgattaattagttattcattagctatcactcaactattaattaattagttgttaatctagttagggaaacaggatggatatacttaaatacaatcaaatcaaagaattcaagtcagtaaatgataaagagaaaatgagagtctgacctcacttcttggattgtaagttgtccgagaaagggtgtgagctgggtgctgggattttagaggcagctttcatgtgggtctggagccagagtgggcaaatgtgaagcgggagaagcaccaagactgaagtcactgaggcaggaggtgcactacgtgatgtggggctggtgccaaggaggtaagagagggagaaagtagaagtttgtgcagggaattgtaggaaaagcaagcagagggatgattattgattcccctaaaatgctcagccaagccttaactttatcttattggtagtaagatgatattgaaggtgtctgagtaagtgcattaatttgcaatgaaaacaaagttcaggctgggcgcggtggctcacgcctctgatcccagtattttggaaggctgaggtgggtggatcatgaggtcaggagtttgagagcagcctggccaacatggtgaaaccctgtctctactaaaaatacaaaaattagccgagtgtggtggtgcacgcctgtaatcccagttactctggaggctgaagcaggataattgcttaagcccgggggcagaggttgcagtgagctgagattgtgccactgtactccagcctggatgacagagcaagactccgtctcggaaaaaaaaaaaaaagaaagaaaagttcagggtataaatatgcatattatttgttatcacaagagctaattgttaacaacatgagaacaaatgagttttttttaaaaccctagtaagataggaatgacctcttcctccttgattgcctgacataatccccactgcacagaatttttgtgggacacctgccccactactgcacttatgcgattccatgtacatctgccagcaaaaggcaaaccccttttatgagaagggcaggtacagtgtctcatacagttatcaatgtattcccaggtgatatcgtttgaatatttgtccccacccaaatctcatgttgaattgtaatctgcagtattggaggtggggcctggtaggaggtgatcggatcatggggatggatttctcatgaatggtttagcaccatcttcttggtgctgccctcaaaggtgattggatcgtggtgatggatttctcatgaatggtttagcaccatcttcttggtgctgccctgaaaagtgattggatcatggggatggatttctcatgaatgatttagcaccatcttcttagtgctgtcctcaggatagtgagtgagttctcacaatatctggctgtttaaaagtgtatggcacctctctctctctctctttctctctctctctctagctagctcctgttttcaccatgtgaagcacctgctcctgctttgccttccatcgtgattgaaagattcctgaggcttcaccagaaggtgggcaggtgctggtaccatgcttcctataaagcctgcagaaccatgagccccttaaacctcttttcttttcttttttttttttttttttttttttttttgagagggagtctcactctgtcacccaggctggagtgtagtggcacgatcttggctcactgcaacctctgcctcctgggttcaaccgattctcctgcctcagcctcccatgtagctgggactacaggccaccacacccggctaattcttgtacttttagtagagatgcagtttcaccatgttggccaggctagtctcgaactcctgacctcgggtgatccacctgcctcagcctcccaaagtgctgggattacaggcatgagccaccgcacccggcctcctcttttctttataaattgcccagtctcaggtgtttttagcaatgctagaatggcctaatacatcaggactgagaaaagttttagtacagagaagctacttcataaatgtttattgtgtgtaagtagatgagcagttagttcgcaaagcagcttcatatgcattttatttcatttaattcttacttctgtcctgtgaagtaggtattattggtttctaggggagagatcaagcctggacctgggaggatgcccatgtttagggaaaagaaagcacaagaagaaaatgtcaagaggccagagagataggacgataggctagacactggcgtcaggagccaccaaagacgaagagagaagcaagaggagttagggatcgtggcgggcagacagggagggaggaagggaggctgaagacaaaatggccatggatcaagagctgaggtcatggacaaagaatggggaggggctgcttcataaactaatcatttggagaaatttgacactaagaggaaagagaagactggagctaaaagaaacaagagtcagtcaaaggtattttcaccccaacccttggacatgtttacagacagagaggagggaccaacagagagacgaaagagcaggaagcagcgtgaggtgaaatgaagctgaaaggcccagtgagggttcagaaagggaccagaccgcgaagctgcaaagatatttcagttctccctcgtgtacacacactctctctctctctgtctctgtgtgtgtgtgtgtgtgtgtgtgtgtgtgcgtgtgtgacataaatccatcaaacctcagcagagcttgatcagtggttagacgcatctatatcacacagtttgcttagtccaaacagccatttctccccagttatcgccagacgcagcaatctctttaaaaatatttttccgatcttaaaaatagtctatcccccaagagaaatctctagcttcttgcctctcagatgacagtcggctaggccaaagctacagaacctcacccaaaatagatcaaatattttaaatgttttcttatttgcgcccctcacaagtatgcctgcaatgcaaagccaattataagattggcttttttatttttatttttctgaaatgagtgaagtgtgtgttttctggttaggaggggaggccaggcctcaccaaacagtcttggttggatttcagacaggcttccttgagcatgaacgggaagaggaaacgtgcatggctgggtaagcacgtgcagacgtgcagagccaaatggtctctctcaggacttgccatcctggagtccatctctggtgcctgtcagagcttccccattagaacagcagttctctagaggcacacaccgtgtttctgattatatgaaagtgacagtgacaagattagaacaaggacagaacctaacactaagccttgcaggtaacagatgctcagatgttgagtgaataaatgaatgaataaacaaatgaatagctgagaaaactctagccacagctttgcatgactcagatacccattggagactgggagaaatttctggaaactttttgctttctctaagcttagagcaaatccaacagcaatgaatatgggtggactgggaagggtggaacatggagacatccagtcatcctctatagctcaggaaataaggagacagagacttcctataggaaggctgaggggatggccagtcctgttccatggaagtgagaaacagtaccatttatctcaggagctccttcatctacactgggtcttctctgatcatgtcctctttcattttgtcaggtcctcagccttattccggaccatcagtgcccttcttcttccacctgccgctccaggagactggccccatcaaagtgggtcagtgcaggctctcatttcatctgcaccctactgataaaacaggtggcaccaagtgctgagcaggtgctaagcaggctgtggcttaagttattactccttaaagagtgactattgatgttatggtgtcaaagcctttgtacaaatgtgtgactaagctgaggacctcacagtcagggcaggtccattctcctgctagttgggctggccccaagtgagctactctgttggcctgaggacaaagaagcacagtggcttttcccgatgtcataggaacatcggagaagtaatctagaggaccagattgctagttctctggggggagaatgtctcatttatattgcaattttttaaaaaaaacaaaacaacaaaaagcttaagaataacacaacaaacagctgtgtacatactctgcagtgttaacagatgtaattttttttcataattgcttaagatcctcttttatgcattgctgatatattttaaatttcttaatttcaagagcagtaccattcccctctctccctcatggccaacaactatcttaaatttgatgtggttctagtccattctcatatgcattcttaaatgattcatacaaatggaataattccaattgcaacctgcttcttttttcccactcaatatgcttctgagtttcaggtacatctaggtcattcattttagctattatgtataataccccatcctattccatatataatatggtattagctattatatatttttataattatacatatatttatataattagatatttagctattatgttatatatcatggtttctgtagcctctcccctgtcaattgctattgcagcatttttaacaatgtttttactactgcaaacaatgctcgaatgagcttcctttgacatgtctcttggcttaagagtgtgagggcgtcccaagaggatatacctagaaatgggattacagaatatagatgtgcatactgaaagtcactagatattgtcaaatcactcaacaaagtgaatgcaccaatctactttcctatccaaaatgtataagaatttgtacatcatcaacaacgtttagttttgcgtgattaaactttttttttctttaccaatctggttgtcattgttttaacttgcatttttctgatgactaatgaaattgaacatcatttcaaggcttttgacctttgcagtgttctctaagtggactgtttatcctatgcctattttttattgggttttctcttatacacacactctctctctctgtgtcagttgatttgtaggcattccttgatagtctagattttttttttaagatggagtcttgctgtgttgcccagactagagtgcagagtgcagtggtgtgatcttggctccctgcaacctccgcctcccgggttcaagcaattctcctgcctcaacctcttgagtagctgggattacaggcatgcgccaacatgcctagctaatttttgtatttttagtagagacagcgtttcaccattttggccaggctggtcttgaactcctgacctcaggtgatcctcctgcctcggcctcccaaagtactgggattgcaggtgggagccaccatgttctgccaatagtctagattctaattctgtgttttaaacattgaaaatgttctcttggcttctcttttccctttgtagatggtggctttttttgaacagaaatttttatttcttgatgtaaccaaatttttttctttagtttaactctcacttaatatttataaatattaattacctttctctttgtaaaaagaaaaaatgctctcaaaccttagtggcttacaacagcaaacatttgtttcttgctcccgtcacatgaggcctgggaaatagtagctctgctggtgttgactggactcaccggcccagccccgctccatgtgtcttcttattctggaaaccaaactgcagagcagccactatctggggaggattcgtttcctgtgctgctattacaaattaccacaaactgggtgacttagagcaatgcacatttcttctctcacagttctggaggccaggagtacaaaatcaaggtgtcaacagggtcgttggctttttctggggccctgagggagactgcaccccacgcctcccttccagcttctaggggtcactggcaagcctcagcattccttggcttgtaggtgtgtcgcttccatccctgcctctgtattcaccccctcttctcctccgtgtcttgtgtatctcaaatctccctgtctttttcttataaggccacttatggttggatttcaggcccacctggacaatccagtatgacttcatattgagatccttaactatatatacaaagaccctatttccaaataaggtcctatatgtttggatgaacatattgtcagggggcactgctcaacccactgcatgggggaatgctgttatcatagcaaagggcaggtgttcaaggcaaaagcaaacatgtgacgcctctttaagcctcccccatggacaggcacgccgtcacctctggccacgttgcactgctcaaggcaaaccacatggtcaagtccgcctacttagagtgctgcaaggaattccattaaaagaggaagtgaatcgggtaacaataacccaatctatcacaagctgtattgtttgaaaagttaaataatactatatgacttttaacaaaagcaggagtcctccacaccaccccttccttcaactgcctcttcccctgagcaatggctctcagctccttctcagcctccttttctgggctgtaaatattggggtgttagctcccacatctccgctcttttctgtctgcactccctcaggtaactcattcctggttttaaatcctatctaaaaactgaggatttgcaaatgtgcatctcaagcctggatcccttttctgaacaccagatttgcatatgacactccctcccctcttaacatcttaacatgcctgaaatatgtctaatatgatttccacccctccctgcaaatgtccgtccccctcaggggtgcccgttctattcaatagcactcccattcactccattattcagaccataacaggagacactcttgattcctctctttttctcacagtcctcatctaagccatcagtgaatctccatgtcctagaattaaatgctctctcagctcccaagcaccgctgccctagcccacaacagcacctgtcacctgggagggggcaatcacctcctgtttctgcctctggcaatctcgcccctattctagacaaggtagacacagtgcttttttttttcctgcctcaaactcttccaatgaccttccatcttagaacaagccccgcagtacttaccacggctagaagcctctggatggcggatctggccactggctctcactcctccccaagtccccctgggctcgttgctatttatttaatatgcacttgctgtcttgccttctggaaggcttttccttcatgtagtctcactgcttgttccttgactttattcatgtctctgttgaaaaccttcttcagaaaagactaccctgtttctccctattcctttactctttttttaaatttttttatagcgcttaccactgcctgacattatatattcatgtgttaactaatgtgtatatctgcctccctccatcaaaatgtatcttgttcacaacatctagaacaggccctggcatgtggtagaaactcagtaaatatttgttcagtgagtgaatcaaagaataaatgaactttttttttttttttttgagacagggtctcactcagtcactcaggctgcagtgcagtggtgcaaacatgactcactgtagcttcgacctcccaggctcaggtgaccctcccacctcacctactgagtagctgggactacaggtgtgcaccaccacacctggttaattttttagactttttgtagagatgaggtttcagcatgttttccaggctggcctcaaactcctgggctcaagcggtctgcctgcctcagcctcccaaaatactgggattataggagcaagccaccgtgcccagccttactgttcttttaggcatttatttccacgagcctaaacaacatactaattctgctatttattacattttcaatagtagacattatctatgatttcttgctgaagaaaacgaaggtttggctctcctccccagcatcatcctactaacatggtcttgcctgctatcctctgaatctaattacatcatctttgttttggtaaaaatcaatgtgcaatatttacattcttacgattgtggtaaatttttcttacagttgaactatatggtatccaatgattacttttcctttcttgtacaaatttttttaaattataatgacctcaatcttacatttgcttattttctgtgtacttattgcaagtgcttttgccaagaatacattgaataatctgtctacctcacttttccttaaaacattcctcctggcatccactgctgccgtctctaatggttgtttcttaatgagccatacagctattgtcctgggattttcttttaccattatgggactctttcacctctatcctgggtttgcattctctgtttcctgatttttgtcctccttcttggtttctaattttcactccaaagtattattcccccttcaggtgaagcatataaccttggaacttgataatttcagaatgaaatatgttttcattcactgtattggcccattgggccctttggatctggaaacttgtatcctttagttttcaaaagtcttcttttattatttcctttgataattttcttcttactattttttttctgtcctcttttttatgtacactcaggtgtaattatgcagtgtttttatcttttatcttttctattccagcttgccttcttcttcatttttctgtaagatttttctgaactttttttttttttttcaggacaagatctacctctgtttcccaagctggggtgcagtggcacaatcatggctcactgcggcctccacctcctgggcttaagctatcctcccacctcagcctccctagggctgggactacaggcgtgtgccaccatgctcagctaatttttgtatttttcatagagacagggtttcgccctgttgcccaggctggtcttgaactcctaggctccttcttctcagcctcccaaagggctgggattacaggcatgaaccaccgtgcccagttgatttttctaaaccttatcttgcatttcttgagttgaatttttgtaaatttctgccatcatacttttcatacacaagcgttcttttctgttctctgaaagtgcctttttaaagcctgattttcttgttccatggatacaatatcttctcttatctcactgagaactgtaattgtagttttctccaagttttcttccatttcctacccaacctctcttctgtgtgtgtgtgtgtgtgtgtgtgtgtgtgtgtgtgtgtgtgtgtttctgttgtttgttataatctctctttccttaatgtgatgctcatatttaagagtgaggtaggccgggtgaggtggctcacgcctgtaatcccagcactttgggataccgaggcaggcggatcacgaggtcaggacactgaaaccagcctggccaacatggggaaaccccgtctctactaaaaaatacaaaaattagccgggtgtggtggtgggcacctgtaatcccagctacttgggagggtgaggcaggagaattgattgaacccaggagacagaggttgcagtgagctgacatggtgccactgcactccagcctgggtgacagagtgagattccatctcaaaaaaaaaaaaagagtgaggtactaagtagccaattggaagttgctgcaaatgggttactaaagtgcactggacaatgtctctcaaatgtctgtgagtttaggtctttttttccatgagcatgccagtttctctggaatggaatccttcaatttcctgtctgtgggatacaaacctgattgtcggtgtcctgggagccctgcagggtgaggcgattggagatgttcagtgttcaacgagttggctttcatttaaacatttattttcagcactcagcctcttccctgttcactgcttcacctggttcctctgagcccagcacttcaaagaagaatcagaataaacttcagttttccgtctggttgagagagagatgctcacctggttgtgtggggtagaggacgctatctggacttctaactattccttacccagacttacaacaaatctgttttctgctccaccgcctgtcctcagaggttcccagggcttccatattccgaggttttcccgattctgaggcttgaatcagcgtccttcttgctggcatcctaattcacaggaccagatttcagtttctcagctctgttgagtccatttccagccatctgtccattttccatagtccaaaatttgcctaacatctggacttatgctaattcctttcaggtactctttgctctttgtcttgtaggatttatttatgatttttttattgctttactatcagtctggagaggtttggggaagcagaaattaaatgagtgttcttatgtgatctgccgtgtttaaccatatcctcaaatttattagtcttttcatttgttaattctgttttttatgttatataccctatgataaaaaaaattcaccttcaatttttttctaatcatttctgtttgttttttatataacctagtttattatagtgtgtagtagaaactttgaatctaaattttctgcttccacaaaattgattgtaaccctgccattaatagagtgatccacccttttcttctttatttgtaatacttcctctaaaataattcatatatgctggggtctatttctaggctttctgctttattctattgatctatttgtttagtcttgtgtgaatagcacttatcttaattagaattgttctataaaaaaacctctttgcctatttttaggtctttacttttaaaatatttactattgttttgtcaagttctacaaaatacgtcatttggagattttaattagaataatgaatgcggccgggcactgtggctctcgcctggaatcccagcactttgggaggccgaggcgggtggatcaagaggtcaggagatcgagaccatcctggctaacatggtgaaaccctgtctctactaaaaatacaaaaaattagccgggcgtggtggcgagcacctgtagtcccagctactcgggaggctgaggcagtagaatagcttgaacccgggaagcggagcttgcagtgagctgagatcgtgccactgcactccagtctgggcaacagagcgagactccgtctcaaaaaaaaaaaaaagaaaagaataatgaatgcatggattactttgaggagaatatatatctttacaactttcaggtttttcattcatgaagatgacatatttcaccatttagtcaggtttttcatgcccttaactcaagttttataactttcttgcacatattttgttacatttattcccaggtaatgaacactttttgttattatgaatagcatctttttccactacatttaaaaattagagatggctgattacagaaactctaggtttttgcatcttgaacttaattccaacaatcttgctaagctcttctattagttccaatatatttatagatcctctcaaattctctacacagataattgtatagcaaataaagacctttatttctctttctaatcccagtggctattttttctatttatttgtcttggttaggtatctagcacatttttttagttgtagaagagatagtagtggctttgtcttttcattgattataatgggaatgctcttaacattttatcattaagcatgacgtttgctatatatttctggtaaatgcctctcattatgtttaaaaagattctatttctagttttccaagagttttttttccaaagtgattactaagtttaccaagtatcattcacctattgagacgatctttctcttttcttttttctacttctcttatttattttatttttaaactgctaatgttgtacattatatcagtggatcttcagatcttaaaccatctctggattggtcttatctcttttttccacactgttggattcaattactaattttttcatctgcattcataagtgcacttaatccaaattctctattgtgtttggtacttttgtgtccaattttgatatcaagattctaccagcctgcttttattgtttgataaacctgggtgttggcaaaggttttatctgactaaaagaatctggcaaagggtgttctgctgccttttaaaactttcaaatcttcttttctattgaataaagtaggcattttaaggtggaaggaggtatgtttttcatgactaaatgaagtaactaattttgaattaaaaaaatggcctatttttacttttcccaagttgacatgcaagcaaaatataatttcttgctactgatctacatgatcgcaaacactcagttgtaactaaaaaaatataaagaatcgtccagatatttccaaatgtctttttagatttattatggttcgattaagttgatctagcctatgatagacaaggagtcctttatctaggatgatccaattgggaaatatatttcacagaaatttcctatataaatctcgtgtatttttagggctgtttacaaatggcctctggaaaaagtaaatactatgaaagtaaaatttcccatggcagagattcagcaacatgtatctttttttttcccccttcctttcttttttaaattcttgattgtttaaaaaaagtaaaaggacaaagaaagaagaatttttcaatatcatggtacacactacatgaaatttgttaaattattcttcaactatatagttcctccatgataagtgtatttcaaatacataaaataggttgtgtggtcactcatctactataccctatatatgagatatccagaatttatctatggaaacatactattttttttatcaaaagacataacccaaaaatatttagccatttatcttctaaaaaccaggcaaaatgcaggtccctgccgtgtttcctgttgataatattttccccatttgtagcacaacttttctttcctctggaaagctggtatttattttattcatagattgcaaaattataccctgatgctgttccaccaaagggcattatttatacaagcagggagagtgtggtttaggatataagcagcagcggtaatggaaaatagcactttcaaacaggcctcactgagttatggagaataccacctggagatcatgcacccggaacgtctctggacacaggtcatatctttgcacagacatcaccaattgcagctgttttctgaactcctgatgtctgccctacaatatgttcaagcccagcagtttaccagactatgtagtattattctatctttccttcctgtcagatatgggatgtccccatcagcaaaactggccgtgttccgaaaatttatttctaaatcatttatctgggatcagaagacattttcccacaggaacaattttataaacagtggtgttccacaaatgcctgcttgtgccacagtgtacctgaaatgcaacattgactgtatgattcccaccaaccattatttattcttttctctgggaaagtgcattcctcttgggatgcctgaggctcatctctccctctgcctgggagcctcagctatagttttttgggctgtgcagcagtagcagtcaggaagaggggagggaagcaaccttcccaaaaaagagatgagtgtagagagttgatatggatgcctctgggtaacttgttaatgctggaaggctgaagaaggaaaccaacagtgcgaactggctacttcccaactgttctaaaagaggcacaaagggcagggacattttcgtaaacagagatcatttctaagtcacatcttcataaacagggaaaggcatatagtaaaacctcccatttttaaagaccagtatctggacttgtaattagccaggaaaaatattgtgaaacttcttggtcagtgatgaaacagtctcaaacatataacaatgagacatagatcttgcacctatccccaggcctgacaaatagtaagtgctccaaaaaaaggggatttcaattttaattaagtactaattgagtgaattctgtattgaaaaggacaagactatgtgtgggccagttaccttaattctcattagcatctactaattctgaccctcttatagcacacatcctaaccatgaagagttggtcggagcactttcaagacgtcacctgaacattatgtcacctctgcgggatatatgcatctgtctaccccagcccaaagcaggtggtgggtctcttcataccctctctgatgtgcatcaatttctaggaatttctagtactatctccacatcaccaaatctgaggaaacaaaagagataaggagaggaaagtgaagccagtgaggatatccaagcctgtaggaccttaggtttattctggccagtattacctgctaaaaaagacctacgcttttggtttccctttggtcacttatttttataacacatgcagacgtattttggggaggtgtgcctctttcaggctagaatttagtctgctcagcagacccgggtcctgtctccttcaggttttagaattgcataacaatttaaactcattttgtatgtgcaagtactttgaaaagaaatatactattaagactccctctggtaagaagccttccccacccccacgcccaataaactgatctgttaactttttgtttcagagactgtgctttctttttattgctgcatttgtgttctacaagacagcctctttctccaagattaacatttcttatgattgttcctgacaatggattcacttccagaggccctgctaaggataaccaaaaaagggcatggagcaggctggttttggcagcgtgcacgcagtttcagagctttttaggtcttgggttttctgatgagtgatttcctgagcatgcctagggaatgacaggcatctccacaggcaggctgcatccaccttggctggggtgtcgtcattggctgcctattagaaaaacgacaggacaatgcataccaccgcctcccgactgtaaacataggggatatgtgttcacttagcatggacttctgggaggggccaaggaagggcggtctggagttttattgaatagagcagtgtgtattcggctgcctgcctgcccgcctgcttgctctctggctgtgctcctgcttaaagaaatcagtccttcctttccgacttagtcctcgggaagaagtttcagactacaaggtaaggcacagaaggctttcttttttatcttctagagagaatctggggactttctccggctttcagtcaacattcctggctaaggtagctggagatgcaagaatgttcaaggcaataaaccatgcaaactcccgagcctgactgggcttcactgccatacggatattcccggaaggcaaacaggatgagatttccagttttgtttttagaattgggacaagaagagtgaccatatagagacttacatttagggaacactggcaactttgattaggatagccttttgtttaggacagccatatgagattatacctgatatccaaaggccagtgttagcaagcctactgcaccagactgctcacacagtctcttctgcatcttttattgccaaagatttgaagaggttttgctttaaaaacaaaatcaacaatcctttaggttgatgagaagccaaaagggaatgatttttttaaccaaaggcttttgcgttatagtctgctgccagtatttaaaactagacttccagagttgcaaggaaatacggtcagagatggagagatcactagcacctagcactggttgggttaatgtcactgatgggatatttgctaagacagaagatgcctaggctggtctgtttcctataaaacctaataacaagagaatgcatgcgctagtgggtgtgtttttttagaaagcacatttaacgtcctaccaaactattttttaagaaatctttttttctgtttgaaagtgtgcctgagtgtgtctagagaatctaaagagatgtcgattggcaatgtgtttcagaaaggaaggaggcaggcttttatatctagatagacatatttgggtgtctgaaacagtagtacaaggcagctagttggtagtagcctggaattccttttagaaagagctgatggcaaggggtgggggaattttagtgctgtggcaatacatggtcaaaaaaagtggatgagaacaaagtgcttgatatttatagatgccttctattaacaggactatgcagatggacttgtaaactgaaaatccttctaatgtgtttgtcaaaaccagacatatacagctagaacctgagtgaagactagatgctatatggcaagcagggtaaatctgatgattttttagtagtgctggctattaaagactaccagctgcaaatgactgattcaactggattttattccatgcaatgcggtagtttggggttgagattcattaaataaagttttctctttgtatttagaagtttggggataattttcttgggaatgcctatttctccttctagaagtgatatatgagaacagaattccttgtgaatttccttccctggaacagttctgagtaagtgtgagagaaaagctgcaggcaaaagctatagtttaattactgtccttccctcgaagagatcaagttccaaactattttcacagtgtttttaatgtcaatcaaaatatggagagcaatttttcttttaactgttctctaaaccatgaagggaatgcagtttggaaggagatctataatcttgggatttgaggataaattccattttgaaaccaacatctccgaatccctgaaagttcaaactgtgctatgaccactctctccagatcccccatcccccttctcttgggctccccacccccaacaaccataaaaacactcatttttttccaagtaacactttaggtgttctgctgttataggtagagatagagtgagaggatttgagtttatgctgaattttaggcagttctttgtgctacttccttcctgttgaatgttacctagaacacatttccccacatagtgaggccaaaggagcacaatgaaaacagtaactttcatttcagaaatataatcacaaaattccagaacaaaaagtcactaagagttgatcctaggacacacaaggaatgtatgtacaatggattgatccataagtaaagtgcagggttgtttcaagtattcgaagcaaatagaaggtgtaatttaaatcattccagtcaaaagattgccttaagtaaatacacaattcttatattaaagttaggagaaggagaaccaggctcaaactgcagtttaaaggattttaaatgagatacatgaaagcatttcctgacagtaaggcaactgccttattatgagaatcattaacaattctaattggctcctgtgactggcctgagaatctccttgtcttaggtagatagaataagttgatcttatggccagccatgtaaaggtccagaatctagcccaggtattctctgttctgataaataaaatgcacctcagcaggcatttttgtagaaacacatgtaattgtctccatttgccattttcttgatagcatgattaccagttagtcattccttagcaagacgcaaaagtgattcagagatgggcatgaaaagagatttgctagttccccatttgcctgtagtctatcacatgtctcagaaatgtggtcgggggacaggaaaaatgctgatagagtggtatgcaaatagcatggtaggactaaggaggaggttagaaagatgctgccaaagaattttcagacttcaaaagggcgttttctgcgttaagttctcttagggcctgagaagataccattagctccttactgaaagtccttcatctgtcaggctaatccaagtttgctattggagagatgcccataagtcctgagtagatgggtagtttaaagagaaacttttggcacaggcttaacttatgagaaccactacaacatctcagttctagtattggttcctctgcttaagtaaccctgacctttttgaggaaatcatcagcttttgacttcatctgttgagtgaagaacggacattggtaatgcttctccgatgtcccacagtggttaagacgtccaaatgagatgaagctgtttgctccctcttccctgcagattctataccctgaactgcctatcatttgagtcctctggacattatgctcatcttggctggtatcctccacttcttacctagtatccctaatgatctcttcctttctcgtatttaaggacccttgagtgatatcttctcgctcctggttatttctagagccctgagccgtgtccagtgaatactggtctatcccaatgttgtctgaatttttactttgatgatcacagactaagaggacacaaatataaggaagtggaataagatgggccatcagtggtacaaggcaccaggaaatccaaagatccacttgagcataagaccagtgagaaagtgctgacaacagaaagcccttaagtaattgaggcagcttctctgcctccagccaaaagcatggaatgaaccccggaacgtcatgcctgggccttgtaggaagggcaaggaaggcaggaacacctggctgtggttcctgttggtattgaaaccagactgctccacggagctcgcctctcacctctttgcttctgtctttagtgctcccagctgtaaccgaccctagttgcatccctaacttccttacccccaggcctccacctgtaacctcttccccagctcccccatccctgtaccggatagggagctttcttgatccaacattgacaatttgcaggggccagctctaagatgaggcccagagtacagcagaacactctagcacagataggttctagctagggaaagccacttgcacagacagaggagatgtcagagcatgttttgtggtaaggacccactctgcttctcaccccaaactcataattggcaggctgtgggtaaggctatgggagcggggtcggggggaaactatgacctgggctgtgagggaggggtgatgaggttgttccctgtgttgttcttccctgtgttgttgctatggaaacctttgagaatctgataaaaactgtgaacccttaaggtccctttgtaaacccacgcttcatgattgacaggtaagagacctttgagctggggcatgtaagatggggagtggggtcagatctggattcccatagaagacaagggtggatgggatcagaacatgagtggaggtgtccatgatctggaaggaagaaaagagggggtaaatacacagatatataggtggagattgcgtcatatgacctccatttcaaagaaaaagaggtcatttccagaaaagaagcaattttctatggggagctcgtgggggctagagaaatccaggaatggctgctattaagtgtacgtaaaaagaacacccagaagttaataaaaggcttgctaagcagcagtaagggaatagttgaaggaaaatacatttttaaaagattttagtatatcgggcactcattttagtacatggcttttctttgaaaatatatgtatatgtataaatgatgtataacttgaagataaattgctttttgatggtatcctgaggcttctggcattgttttgtgaatactccatgaaagcacttgactaaaagggaataatctcacttggagagaaacatattaagcaggaatatataattagttcctctgacacccacatataacattccccctcgcttgtctcaagatacattgctggggaaccaggctgacttcaccttgtgctgaagaccagaaggaccaaggcaaagtgcccaagagggccaaggaccagttggcatcaaagatattagttccactggggtcaggaggaccagtctaagccagaatggatatcagttacaaaaatgggctaagttgtgcatgacagccaggtgagtaaagaagaaacagcaaaaatcagaagtcaggcagagcttagtgaagtagtgtatggatgaataaggtgaagtctgggagagcacatggcccagtgttaggaagaaatagacctctatgtgagcaaactttggtagctcaagtaaagggccaggattgtaagacacagattaacgaacggatgaaatcacagggatatccaagagcagaagcccaaataggaccagggcccaaagagagtagagttagagtcaaggtgggtgagaggatcccagccgcggtccatggatatttactccatccctttccactagtgtgactcagctcagcgcacgtgtctgcctctttctgttgttctatcaactggaaaatttcttctgtgtttccaggtccagtcctgagagaggagatctgattggttcagtcaaagactattgtctttggcaaatcctttagtaggaggaggacatcaaaggcacaggcgcgcctaaggatgaattactctaatccaggcagtggtcacccctgggcaaagaagagctcaatgggtaattttagttagaagagaaattgagcatggaaggcaaattagctgaaatgtccaacagctctcaatgggaatcatttgaattttgaggtgaataaactcctagagaggcaaacacccaatgaatgatcacacagttcttgatgatcactgtgacccactgagccagtgttaagggagattaatctagaagtttgcaccactggtaactgaaaggataagaatcatccatctcagaaagattttgggaaaaaacattctggatattattgttggcaagaaacttcatatgaatcttccatgtgatatggctcccttcaaatgaaagcagtcttgaagatttaatatgtaatcatttaacaattttaataaataaaaacaagcacaactcaatgtaaaccacagtacataataaggtgaatgcataaaagctggtgtactcttaatcactggaagtttcagatctaagcaatatttgctatgtaatttttaatccattgagcacccatcatggtgtttgtcaagtggactaaaatatcccctgagttctgcatagttcggatcccatttgggaacttgtgctctgttctgggctcatttttctgaaaggcatggatacatatgcattctagggttagcatcaaaggctggagggagtcaggaggcaaaacatatgctgaaccgataagggatctagagctgtttatcccaaagaaaagaaaatgaggccacataaatatcttctaatatttggggtacttttatatgaacatgggagaaggcatttgtgtttctcaaggcagcagaacagaactgaatatataaattcatagaatttttaagctgggcaagaccttaggagctcattcagcccaaggagtacatataacttttcatctgtatgccagctccaaccaattggcatgttaagaaggattctgaggatgaatctaagctcagaggggaggggaaaatgtggtcactgatagtgatatctgttgtggaagagaagggccatatctactcaagtaccatgttttagtcttcattaatgtggtctgtaggtttttaacctctgggtggtggatccctgggaggccacaaagtcattgcaagaggtaaacaaatctgtatatgcagcaagtgcttttggcaagctactctgagtaaataatatatcttacatcatatgtgctactatttttctaattctatacatacattataatgataaaatgctaatttatttaaaagagttattgaattcatagtagcttttaagtttgtgtttttgtgttttattaatgagtggacttaaaacatataattatattatgtgtgggaaggttgggacaggaaatttgggatcttaagtagaaattctttttaaaatatgaaccagtgatctattttttattctccaaagcctagccacaccaagtaaaattatgtatgtatttgtaggtttcttcgattaatgtctgccctgtcttattggtctgtcagatatataaggacaggaacctctatttttttttcattcgtatatacccagtgcgtggcacacggcagaatctcaataaatatttgttgaatgaaataacaaaccaagtgacttgaccaaagtcatccagttaattagtggtaagatagttccaaaacacacagctcctaagttccaagcagttaaccttttcaatataccacattacttcccctgatagtaagagagcatgttttaacagttagcaaatttaggttatacaatgctgcccaatctgcctatatacccatgcatcttaaccagtatcttaatcagaatcaactgtagagctttttgaaaatacacatccctgagacctatcctctagagattctgattcggtaggtctagaagggggtccaggcatctgtagtttgtaaaagttccctggtgactctgataaaacatcctggctcagaaacagttctgtgcacctatcgttaaaataattgatagtagatgtatgtagttacttattcctcagaagcctatttctttagttttgaataatttctttctaaaaattatagttgcatatgccaaataatccgtttggccagaagagcaaaacctttagttttgcttttttttcagtttaagcacaaagttatcaaccctgtaaggtcaaatttttctgatgagatttccagtgtttgcttttgtaaaggactggaaatgtggcaagaataaaatttctcatggtatttcccacttccttttccagccatcattactaagggaaatttaggcttagggggaggggtgaatctaggagaaaaaaaattttaagtatttctgttcttaggaggttttgagcagatatttcgcttcctaggaaaagctgaagatgtttttctctgtttccactttgtggtgaggatgcacaaatcctgaagaggggagaagcttcctccacctccaccctcacccctacatcttctctagggcaggagtcatcacagcccctggtttagatgcttccctgggtggcccttttgaaagtatgtggaccctaagagacaggagactttgagtgcatggatgggggataatttgcttttgcagaaggacagaaaatttatctctaggttcttcctttattcggcagttaggaattacatcctctgtattgcacagaagaatctaccatattcagagcactgagtacatggattatattcactaaagattggagagccaaaagtttctctgcaagagtgacctgatctagtaagaatgtcaaaattgttactatatttgtacccatgctcttcggtttagagggcaggtgcttccgtgtgtacatagaagcagagcttgttggagaagaggagctaaaaaggaattagattagaatccacctctgtacaatggcaccatctggactcagtctccttcatctctaacactgtccccactttctctgcaccccaaactcatactggctcccaaaagctcattgttaaactttcgagaattttgagagccagttgtaaaacacagccattataaaaactaaatcatataaacttacaattaaacacattatatgaagagccaagataataaatactcaaaactcttcctaattattttgctatgtttcactattatctattctcttgaggttagttacatctattgtggctatatggtggaaatactgtataaaatgctgtgcaactgagcttctcctcccaattcttcattcagtgatgtcatattcagaacttgaaattgaccatgatggaagtaattacaccacagaaatcagcccatgctacaaagcagactcccctcccctcacccaagaacttgttgctaaacattgactagcacatcactgaccctaagggatgcggtggtaaaattagcctctgcattggagagccaagcggaatacctctgtggttcagttacatgcatattcataatgtatgcttatgattgcatatttgtttgtttgcttgcttatttatttctcatgctcctagaacataagctctatgaaagtagagactttgtttggctttttcagtgctgtgatttgaacctaaaaatgtgctgtgtcctgcacatagtattaataaatgagttaaatgagtgaaagaaataaatgtcaggctggtagtggtagctcgtgcctgtagtcccagcactttgggtggccaaggcaggcagattgcttaagggcaggagtttgagactagcctgagcaaaatggtgaaacactgcctctacaaaaaatacaaaaattagccggccatggtggtgtgcatctgtagtcccagctacttgggaggctgaggtgggaggatcacatgagcttgggaggtcgaagctgcagtgagctgagattgtaccactgcactccaccctgggtgacacagtgagaccctgtctcagaaaaaaacaaaaagtaaaaaaaaaaaaaaaaaaaagtctacaatttctactttaaaaatacctgaagccagtgttcatgttggagctcattgattcctcatgaattgtatcattgttcagtgtttagaacagtgcctggcacatgctaagtagcatgtagatttttattaggtaaaaataaaataagttatcttcataacagctaattttacagatgaagaaactgagttacgattagattaagtaatatagctaaggtcccacagctagtaagtagctgggtcaggatctaaacccgggataatctggaggcactgcccaccttctttaccactgtgctatgctgcctcttgctagttactccacgtcactgagactcctcttttgtatgtggctctagaaagaattgagatctatttgagaacaaactttggagtcaggagaacttgagtttgaatctcaaatttaccacttttttcacttacaaaatggggatgatttctcctccactttgtagttgtcacaactactagaagtaatatcttgaaactgctttgcacgtacatgatagacactcaattacaaatggtcagctattggctgtgatttcctgtggaggctacctgttagcgtggggcttagccacacactgtcccctgttgcctcctctaggccatcctgtagacagattaaaaagggctcactgcttctacatttggggtctccaggaggtaagactaggaccaatagatacaagttctaggaagtcctatttcagatcagcttacagactttctaaatagatatttctgtctctgaagcacgaacctcgctgctctacagaagcagacaacttccactgtcctttccaaccagaaggtttacctgcttgcccttatcaacaaatctatgctgcctttaacattttaaatcattttatctagtatagctaaagagttgtattattcctgagattgggttgttttgcaggttttcagtgttttagacctggaatgagagggagtaagaaaagagggagggagaggaaaagagaaaaagaaataaggagagagagagagagagagagagaaaggagaggacagagagggaggaagggaaaagggggaagaggagggaggggagaaggaaattggaatttatctggagaaaaagtactgaacttgggagagagactgaagagcaatggattgatagttatctgaagtcctcacaggttaaggatggttgagaagataagctagctcattcagctaccttgctggcatactagctatgtgacaggcactgttctggttgaggactgctctctcagagcagtaaagtaaatcaaataacttgcccaaagtcacactgctggaaaatgccagagctgttcaaagctcctccctaactccaaccctctccaattctctacagctatctgctctgtgtcttcccccaagaaagcgatggaaaccagagcaggaggtttccgtaaccagtcattataatttgtcagggagccatactgcagttcaactagacaagcacattgtcattccctgccatataaggaaacagagctaaacaccattgctttcactattgactggagaggttgctcaagttagagttagacaagatgaggatctagacctagagcagttaaattaaattaaaaaaagaaagaaagaaagccagagaagtagttttgtgttttcttttcctggtaccagagatagtttaacaagcagtttccatccttctccctgactcaacgggagattttccctgacattaggcactaaaggattcaactactcgtacaaatacttcaagctgttttggtgtttgattatgtcaaattttaagaaaaggcagaggatcagttcaggtattcaaaaggccaacatatccaaaaggtattcaaaaggccaagacagagctgcttctgtgtgggtcaggtagaaagtcaaggactgtatttctctgtccattgatttacaaaagaaattagtgtccactcaccttcccaggtgagatactacttattaagaaataaaatcagaaatactacttattaagaagactttacatttaagtttgaccttcttgtccaaagctaagaatattcacggggtcactctttgccttaagactcagacacaatgggcactttatttgtttgtttgttttttgagatgaagttttgttctgtcacccaggctggagtgcagtggcacgatctcggctcactgcaacctctgcctcctgggttcaagcgattctttcacctcagcctcctgagtagctgggattataggcacacgccaccatgcccagttaattttttgtatttttagtagagacggggtttcactatgttggccaggctggtctcgaactcctgacctcaagtgatctgcccactttggcctctcaaagtgctgggattacagggaccatgcccggccacaacaggcactttagaatgcaggctcagtaaccaactttatgaagggagaaacagaggcatgaacagttgaaactatttccttaaagacagccagttccatcttgccatacagagtgcccacattttcagataatccgaagaggcatcacttagtgtccccagggaaatgaaaaacaaaaaacaaaaaacaaaaaaacctgtaaatagtctggtcatcttctcctaactatcatcttggaccagattgcatctggagtactagtttattaggcatacccgagactgggtaatttataaagaaagaggtttaatggactcacagttccacatgattggggaggcctcacaatcatggcggaaggcgaatgaggagcaaagtcacaaattacatggtgacaggcaagagagcttgtgcaggggaactcccatttataaagccatcagatttcctgagacttattcactaccacgagaatagtatgggggcaactgccgccgtgattcagttatctccacctggccctgcccttgacacatgggattattacaattcaaggtgagatttgggtggggacacagccaaaccatatctgatgccacaacaaaatgcacaaacaaatttatttctggatggaggttagaagtccaagatcaaggtgtcagcagggttggttccttcaagggctgtgagggaagtctctgttccagccctctctgtttcacttgtagatggttatctttgtgttcacaaggcattctttctgaacgtgtatctgcatccaaatttcctcttcttttttttttttttttttttgagatggagtttcgctcttattgcccaggctggagagcagtagtgccatctcgactcactgcaacctccatctcccaggttcaagcaattctcctgccttggcctcccgagtagctgggattacaggtgctcgccaccatgccaggctaatttttttgtatttttagtagagacaaggttttgccatgttgggcaggctggtctcgaactcctgctgtcaggtgatctgcctgccttggcctcccaaagtgctgggattacaggagtgagccactgagcctagcctcctcttcttataaagacaccagttgtattggattaggggccaacttaatgacctcattttaacttgattacctctgtaaagaccctatctccaaataaggtcacattctgaggtcttaggggttaggactgcttcaacatatgaatactcgggggagatacaattcaacccatagtatgtcccaactcacaatggtggtagaaatccatatggcacattttctgaagctcaagtgccaaagaccctactgctgctggtattctatctttccactgggtctaagggaatgctttgctagaaatcccttggccttttgaatttgcctttgacatttactttctgcctttctcaatatgaaattctgatcccattaaaagtcaaaagaggttttcgaaatgacgcactgaagtacagcttcacatactgtggcctatctgtggacagctatgaaaccacggcggcagaccatctggtatgaggcctttaggagccaaggacggggctcagtgggaaggcttggccagggcagcctgcaagccagggaggcaggcgctgagaggggagcagcttcagggcagctggccgggccagggaggcagccacagagggaccttgtgcatgcctgcacagggcccaaagagggtggcccttttccgtcatttttatatatgctgatcacaaccacaaatccccagacacaaggaaaaatatttgaagcctacacatatttgcgctctgaatcatttgtctcttgtctttattttcctctctctcctctctatctatccttaaatttttatactttttctctcaacagtcctcctcactttatctgtctttgctctagttggtttcaagcgcccatacattgtgtcttgtctgcattttccatgttctatttttaaggtattttattttagcctttttgtcccttttttgtccctttcctaaagctcttcttggtgcccatttcccagctttggtcctgctcatggcttctctgtcttaggccaggggtagtctatagacaggatgactataccatttatcgtcaaactgggacacgttgaagagggaaagaaggggcagttaataatttccctaaaatgcagtcccgaagtgggactgtcccagtgtggagtggatgcttattctatccatggtgtggttttctgctttccacaaatctctcttcacctatcaaccactccctccatttatgtaccattttttttttttaaaccttttatgttctggtccttcttttttatttcaaccccaagaagctttatgtgttcttgtatttctgtcttcttttatctcctcctcattccttcactttactctactctgctctctatcttgtctcaccacttcaattcttcttctcccttgatttccttcttttgggtacagactggactgcagctcacagaggccatgcctgtctgccatgatacatgcaggacatagtccctgcatttctgaaacaaatcaaggcacagctgagcacatacacacacacttcaaaataagccaccaaatgttacaagctgctttgggtctcagatgagccctgagtggactgttcaccccttcagcacctctacccagagactagaacaatccctacaccacgcaagcagccatgcctgttactgttacggaggcatgttctgtgtatgtgtctaggctcgcacgggatgcatttcctataggtgtacctatgtacactagagttgaaaaatgatgaaagcatatgacccgaaagacaaaaagaaagtgacaggtgagctaactgtgcattgcctttgttatgacttcagtaatctggatcatcttatcctctaaagaaatgtataccaaaggcctagcaatggctgccataggttttttgttgttgttgtcaattgaaacagagtctcactctgtcgcccgggctggagtgcagtggagcaatctcagctcactacaacctccacttctcgggttcaagtgattctcctgcctcagcctcccaagtagctgggattacaggtgtgtgccaccacgcccagctaatttttgtatttttagtagaagtggggtttcaccatgttggccaggctggtcttgaactcctgacctcaagtgatctgcccgcctctgcctcccaaagtactaggattataccatgcccagcctgctataagtctaacataagtaacaataaacttttaggcaacaagatagaataaatatttttttcagttctttttaaatgttctcatgacacagtcatctgcaacttatggtttattctgaaaaatcacttcaattttccagatattccttagacttaaggttgtgcaaggaaggcctgaaactccttcccaacttgaaaatgagaaaggaagagtattttcctcttgtaagtcgctggaagccagtccactgatacctgaaatacttgacagaatggcactgtgtcagctgtcaggagctgctctcgtcttttttatttatttatttacttatttgggaattttgaccacaattttctttctctttttttttcaaatactctaaaaattaaagaatgaggaaagaagactgtgtccccacccaaatcttatcttgaattggagcccccataattcccacgtgtggtaggagggatccagtgggaggtaattgaatcatggggatgggtctctcccatgctgtcctcatggtagtgaataactctcacgagatctgatggttttatacaggggagttcccctgcacatgttctcttgcctgccgccatgtaagacatgattttgttcctaatttgccttccaccatgattgtgacacttccccaggaactgtgagtcaattaaacctctttcctttataaattacccagtcttggatacgtcattattaccagagtgagaacagactaatacaacagtgaaatagatattttatgaacggaaatacaggttttgttcaagttctctccttccttcctctctctttcccttccttccccctcctccttttctttctttctcttcctcctcattcttcacattcttccagtttttgtttcttctcccactgagattgatatggctggaaatgtgctattatgattgggcagccttgtgctttatccatggtggcctatagctctcttgcttatatatatctttttatgaagatcgatggtaacaaaaaatacttcacccacactctgctgggaagatgcgacggtggaatggaaatatctatccagagagctccctacgaccctaagacttgacagagtcatccccagccagcctggagccactgacccacctgtgtctgagtaactgggaaacaaggagtgtaggagtttgagagttatttttgttttttacttttttaaactttcatgcctttccatatttctgctcttagatattctgttaaaataaaacaacggctctttccatgggagtagtttctagcttgctaattcttttttgagagagtgtttgcatgaggttttaagtttttaaagtcttggctcttatattttgtaggagccctagactccagatagtggtctaatagaaaattagccctggctcctgcctcatgtccacagctgataatctgtgtgactttgaatggcctccttgtgcctcgggcttcttaattataaactgccaacagccttttcccttctctatgatgccaaggtggggagcaatgtgatctttaatacaaaaggatgttaggcagtaaagtgtcttaaaacacagacatggatttcctttcttcttcctttgaaatatgaagacttttcctggttggttttgggggaagatagaaatcatatattcataaaggacacaccccatattcagagttcagaatttggagtttccaataatcatctcatgcacgagagctgactccctctgctggggctgccccacccccagttccagcctttccttctttcatttttatttatttattttcttagagatagatagagtctcactctgttgcccaggctggagtgcagtggtgcaatcatagctcactgcaaccttgaactcctgggctcaagcaatcatcctgccctagcctcctgaatagctaaaaccacagacacagcaccatcacgccaggctaattttgtatttttttgtagagaaggggtctccctgtgttgcccaggttggtcttgaactcctggccccaagtgatcctctgcctcagtttcccacagtgctgggattgcaggcatgagccaccacactggccccatcctcatctttaaaagcaatattgagaatcatcttgtttggagaaactctgaaaccctacagtgctgaaaagggaggattgagacagactgccattcaattgaagcttttcctctaatgtagtaagaattttttttttctttttttcttttttttgagaaaaagccttgctctgtcgcccaggcttgaatgcagtggcgcgatcacagctcacggtagcctcagcctcccaagtagctggggctaccacacttggctagtttaaaaactttattttttgtagagacgaggtttcattatattactcaaactggtttcgaactctagggctcaagtaatcctcccaccttggcctcccagtgtgctgagattacaggcctgagccactgcacccgacccagaaaacttttttaaaagctttatctgaaaccaaagcacatagtgcacaatggcagactcttagactcttgttgccctcagattttctaaaattgtcttttatcagcatttaagtttctaacacatgagatcacatatgtgaaagtgcttgtgctttgtaatatctgtgattttactatctatagcagaatatattaaagtgtaaaagtgctccaggaacctaagaagagtagaagaaaagcatgtttgaccccagcaactgtgcttgcagccaggcttgaacgagcaatcatgtgggtgggttaaattgtttattttttatttttgagacggagtcttgctctgtggccaggctggagtgcagtggcgcaatctgggctcactgcaacctccgcctcctgggttcaagcaattttcctgcctcagcctcccgagtaactgggactataggcacgcaccaccacaccggctaatttttgtatttttagtagagacggggtttcaccatattgtccaggatggtctcgatctcctgacctcaggtgatccacctgactcggcttcccaaagtgtttggattacaggcgtgagccaccatggctggccaaattgtttatttgtattgttctttaaataaaagtttattttagaatacttttaaatttacagaaaagtagcaagaatattacagagttctcatatgccccacacccagtttcccctattgttaacattaaggcacatttgtcacaaataataaaacaatattgatgcattattattaatgaaagtccaacctttatttggattgttttaggtttctttaagccccttaaaatagaaaaatgtttcatatggggaaaatgtaatgttcacattgtagctatatagttggaactctaatacatgagtgaaaatggtttaagctaactcttttcttgaacatatgcttactggactgacaatctcttgaggactttccacctgtaataccttaggcctcttctgttctctggtttgtttcccttgagaccgttagcagattgctcagcctgacccaccctggtgccagatgttggaaccctcttgctgctgccaatctgactagtcattccaaacagatggtaatatccagcatcacaccccctcccacaatttcacagttttaggcagaagccttagagtgaacacatttacctggctgttgaattgctgaaactctgttcttaaagttgcttcataccacagtgacttgtgagagctttgacattaatagaaggtccaaaagaagacctgagtgacgttcccccaaatcttgagatctaaagactttggccagtttaaaaacactacaatttatggaaaatacctgttagtaacaaatagagaaattataaaggagattgctttttagaaatcaccccaatgaccgtattccacatcccgagcttccaagctttctttgaaatacgagttaccagcagacactagtggaaagaatctttttaattcaatctctgcctttgagcaacttgctgactgacatctagaggcatctcagtcttctggggtggcaccttatggtggaaaggctggactagatgtggtctctcttagttttaaatctgcttggattggggctttataacgttccctcagaagtcttgttggtgtcctttctaccagatttctttttctactgtttcactttcattaacaaattgcttcacaggggacaaaattctagatgtagttcaaatactagttacaaatttgctgccttcaagatacctagttatttgattgatcacagttgtttttaaagttcattttaagtagagttatgatcaaacatgtgcaactgaatcaataaagttgaaaatatatcacgatgaggaaatgtaggtatcttctttggtatcttcatatcaaaaaattaattgagaggaacccttactaatgagtgaaactaatattcttgactcagagaacttcctcaaagcctcaaaataacaacaatttgaattggtcatctaagtataaataaagttgggaagagacacctttcatgaaaggaatggttgaactaactctcaaataggaagacatcaaagtcaaggaagaaagtaagagctcacggcttggggtggaaatggttactaagtttagccatctgctttggtctttcctgttccacatgtagctatatagtttacataaaagtatctctccagaggatcagaaagaacagatttatggaaccagatgtgagttagcatttctacaggtgtggctctgcagctgaaagaacatgttgtaccagggatgaagtttcttattatgtaatcaatataaattaccactagacttttacagaggttgataaagcaaacacgtgtcattcggattggccttctggtatataaagagaccctgcttcacaacgtgaaaaaatgtaccgtttgacattcataaaagacttggtagaaaataccatgacaataatcaggcaaggttgttcccccttgcacacagaggggatagctggtggctagatggaaattgtgttcatatgtttttcttcatcaagaaaaacaaggaaattttcataaatatttttaaagtctctcagaatctgataagaaagggccaagaggatgaaaatgagaggactggggaaaaataacagaatgcaagagaaaagatgaaaaaaggcagaattagttaacctatagaggaatatatccttaggtggtatagaaaatcagggttataaaaaaagattggtaaattgcagatcatttaaacatttgcacacaaaaagagaattttaaaattctagacaataaaagtaaaaatgttgctgataaattaatttgtgtcaaagtatttaatacaaatgttttgattttttaaagctgagtgttttatgctagattttacaatgaaacaaaaagaaaaacttctatttttgggcttctaatttgcttaaactttttcaatttagtttaaatgtattgctcaaatctctgatattcttactaattaaaatttttttcttaatcaattcatttctcagacaactgtgccaatctcccataatgattgtggatctatgacagtcttcttataaaatttctccttataaaatttgccataattactgttcatgtttctaactatgttgcttaatacacataagtttatgatttttacatcttaaagcatattttgtctgctattaatattgctacatgtttcttttgttatttacttattacataaatttaaaaccttttatttttaatatttctgtctaattatcttaaagtgggtctcattaatagcatatagataaatttcaaaatctagtcacagagatttctatcatttaatgtatgagataaatccattatatttgttattatggattatgtacaggatgtctgaaaatctgaaaacagggcaaacttaatttaaacaatatattagtcacattttaaaaatacttgcttaatatgttttcttcaagtttcagacaacatttcaagtaaagtatctttaaatttaaagcaatgtccaattttttaaccctaaaaagtataatgaatacactattttctgaatttccagaatttttagaccctatgtaatgtatttattgtacaaaacataggagcatattatttgaaatgtatctaacctacagtataagtgcctaccctatattttctgatttttttggactcaaggtaatttagtcttatttttaacatcatattttgtatttcttctttcccatgtgtattcttcacgtctttattttctcccttcctagtgttttattatgtttattgattcccttttagtctttactgttttggttatatacatccctattctagagaatatttctattaacatttaatatgcatatattacaaagtataaactttattttccctcaaaactatccgtgttcatcctataagctattattgtttaataatctgtttcgtttttaaaccttgacaaattcatttttttttaaaacagccaattgttacaataatctaccaatatattttgttgatttctttgctcacccttgcttctagcatctcactccctatttctgggttcaaattcctatttgctgaacttattctttagtagttcctttagagagtgactttgggttgtaagctcttagactttgtaaaaatacactttttgcttttacttttaatttagacctcactcttggatattcgtttagctgagtatagaatatttttgcttggtacattgaagaaatcacattttcttctctctctctctctctcttttttgaaacagggtctcactctgtcacccaggctccagtgccgtagcacagccacggctcactgcagccttgacctctggggtcaggggattctcccaccttagcctcccgtgtagctgggactacaggcactcaccactacgcctgctaaattcgtgtatttttttaaaagatgctattttgccatgatggccaggctggtctcaaactcctgggtttaagccatcctcccatctcagcctcccaaagtgctgggattacaggtatgagccaccacacccagtcaagatattattacattttcttctcacatctatttaggagaggttggctgtcagtcttgctgtcctgtcttctgccaatataattcatgttttctctctggtcacttttgtaactgaagtaaaaaagcaaaatttccacacagagaaatattcagattttaagtgtaatatatatgtgtatgtatgtgtgtagtatatatatatatatgtatgtctatatataaggtataagtttgccatatatatgtcaacatatatgtgtgtgtgtgtatgtcatatatatatacatctgtctatatatgtcaatttccattaccacattgcctaccttacacatctactgttctgatttctatcaccatagatcacatgtgtctattcttggaattcatataaatggaatcaaatagtatatattttttatctggtctgttttgtgcaacataatgtttttatgattcatccatgttgttgcatgtataagtagttcattttttaaacttaataatatttcatagaattaatatacataacttgttttccattgtcctattaatggtcatttgaatcgttcccagtttgggatattatgaataaagatacaagagatgcttctcaacttatgatggggttatatcctgataaagctattgtaagttgaaaatattttaagttgaaaatgcatttaatacacctaacctactgaaacatcacagcttatcctagcttaccttaaatgtgctcagagcacagttgggctaaattatctaacacaaagcctattttataataaaatgttgaatcttatgtactgcatatcactagccagagaaaagatcaaaatctgaaatttgaagtacactgaaattgcaacagttccatactgttgtaaagtcaaatcttcgtaagtcaaggaccatctgtgtaagattcaagtacctttttccgtgtttgtgtgtgtaaacacaagtttttatttcttttggctaaaactgagaagtggaattgctgagtctaatgtacatgtttgtctttacaagaaattgccaaactgttcactgcggtgatgctgtttttaacacttacaagcaataaattagcattccagtggctccctatctttaacaacatttggagtagtcagtctttctaatttaaacaattctagtagttgtttagtggtatctcattgtggtcttattttgcatttgtctaatgacaaatgatattcggcatattttttgttcttattgaacatatgtatatcttctatgaaggatttattcacgtttcttgcccaatctttaaattaaactgtttattattattttgtaggagctcattatactttctggatacaagtcagatatatgtattatattaatacatattttctcccagtcagtggctcaccttttcatttccttgatgctgtattttgataaacaaaagttttatattttaatgaaatcccatttatcattctttaaaattttatggctagttctttttcttttctctttaagaaatatttgcatactctatctaggttgcaaggatcttctatttaaaaaaaacttttagtttttgtttttatgtttagatctgtggtccatgtagaatgagtatttgtgtatggtgtcagatagcagttgagtttcatttttcccattcatttatccaattgttccagaacaatctgtcaaaaaaccttgtctttatgaattgtattgactccttgttgaaaatcattcatctcctgcataggtgtgggtctaatttttttttttttttttttgagacagtctcactgtgtcacccaggctggagtgcagtggcacaatctcggctcgctgcaaccttcgcctcctgggtttaagcgattctcctgcctcagcctcctgaatagctgggattacaggtgcaggccaccacacctggctaatttttgtatttttagtagagacagggttttgccatgttgaccaggctggtctcaaactcctgacctcaggtgatccacccgcctcggcctcccaaagtgttgggattacaggcgtgagccaccacacccagccaggcatggttctatttctatagcttcttttctgttctatagattcatttgtcttttcttgcaaataccaaactgtcttgattactgtggcttcattaatgttagacattgcttgttacctttctactgttggagataaggatttagtacattcatacaatctccccgttcaatacggcatcttccccatactttcaatattataataattgtatgaatacttcatagcttaccacatagtatactatgattacattttctttctatattaccactttccttgctactatcccccatgatttaataatgacttcgtttcttttacctgtttgttttctatcattaatgcctgccccagggtatctgacaggaatgtcaaaccctttttaatacagtcaaacacatcaggtaatttgtcaattatttttctttaaagagacttttctggaaacttcttggcattttctaggtttggtgcacagcttgctgttctaaatcttcacttcacagtcatctgaggcatttccttcctaggactgaaaggaatttcctttgtatgtgggctgaaatttgaatcctccatttcctggttcccattattcctccttctttatactcttgttttgatgaagaagattatctaagagcatcttgaacaagcgtccagggacgacaacatttcttagaacttaattgtttttagtatctttgatttaagacatacttgattaatttattggctgggcatagaattctaggctggaaatcatttttcctaaaacttccccaaacatacctgcactgtaacctcccaacagggtctccttgcccgcttcctagacagagctgatttgtcaagatggggaattgcaatagagaaagagtaattcattcaaaaccggctgtaggggagatcaaagttttattactgctaaaatcagtctttctgataactcaggatgggaatttttaagggtaatttggtgggtagggggccagtgagttgggagtgctgattggtcgggtcggagatgaaatcatagaagtagaagctgtcctcttgagcttagtcagctcctgggtgggggccacaagcccagatgagacagtttgtggatttttattcattctgaatactatgggcctgttcaatccagaaaaacacatcttatagttagaaattttcttatataattttggtgataatttccttctcctcatttcccatgttctgatacacacagtctcctctgtcactgaattattgagagcttgaacctcctaaaccaactctctgattttgtattttcttaactatattctacttttctgtatcttattctaatttttgagagtttccttaactttggctatatattgtttttagccatagtatttttaatttctaagggttctttgttgttgttgttgttgaacatttctttttataacatcctgatcctctttcatagatacagtagttctctatgcccctggaaatatcatttatattttcagtgcctttctgcccctgccttatctgagttttctctgtgttcctgttttctattatttgtgctagtctctgtctttcattcttccctcagaatcctggtgatccttggctgtctgtccatatataggagcaaggcagtaaaaagctgattaaaagctatgggttcaggagtgctggctggcagaaaatgggccagttatctttcttcccatggcaatctccaaatacccatatctctagatcctttttcttgaacaagtttatccaaagattttctttttgctctgttacccaggctggagtgtggtggtgtgatctcggctcactgcaacctctgcctcttgggttcaagtgattctcctgcctcagcctcccgagtagctgggactatagacacgtgccaccacacccggccaatttttgtatttttagtagagatagggtttccccatgttggccaggctggccttgaactcatgacctcaagtaatccaccctccttggcctcccaaagtgctgggattacaggtgtaagccaccacacccggccccaaagaagattttccaaaactcttcctctgagttgtaagcaaagggtcaacattctgagaagtcttagggcattacctgcattgcagagccatccccatggcatagtttccccatttgcctttggtaggccctgtcagtttcactggttctaggccatgtttcacatcagtgtcttggctggaattcctaagcagatagttcatatttgcttcccattccctcccacaaaaaggggtttttctccccccagcccacggtttagcttcctcattagtaggctgtcatgggtagagggtttccatttgtgttcgtagatgaaatgccacctttctagcttgtggctttacacaggcgctcagttccagttttctgccgtgttaccaatgaatgctatcatacccttaactcaggccaacttctctgtctttgagtttcctctgtattctggaacctggagatgttcttctcttgcttacaagctcatttaagtgttgtttgtaaatgttttgcttattttttctgcaacatttatgcatttgaagcagagtagaaatgcttcttggatctgcttagtccatattgaccaaaagtctaaagttattgattcagaattctggactctgagagcaatcagtaaattatagtgcctcggtttgcttgtgtgtatattatcaatccttcgccaacaatttttttctgttaaaaaaattcctgttagaatttttataatacttatttttctatatctgtccattagtgtaacatggtggtcaaaggagaatttttttctggtagtttttcctgtcacaacatggctcccaaagagtagatctagtaaatgaaacagattgccttggactatcttaataaccattgccatcatttttcccccaaatttcacctatttattcattcagattgcattattaattgaggaaaattaaattatctagtggagatttagctttgaaggtaatttcagacatgacagctgtggtcggaggaagattctcagtttgtatgcaagtggagaagcatcatcatgggcagaggacttagcccctggtcctaatttctatttttccatgctcaaccttttaaatagaaatgagtcttgtaatgggaaaaatggaaatattgctccttgaggatttgaagaatatgagacctgaagacctcagattttatatctattaaaacattggcacaaccatgcaacattctttccatgataccatgactggtttattgaggagtctcaactcactgggggtataaagaagaaatgatttctatttttccctatcagtactgttctgtgtcaaacttccttttattactagctacagggggcctttaattacatctccgaccagtttctaaactcaagaaggataaattgctcctaccctcaccccactcccccaggctagagtctagtggcttagaattgtagggttctggctcttaaacagcttattttccttcattccagtgaataaccctggaatatgggggagcatgaagagggtggaggaagaagaggtctgtactagacttctcataataactggtgttatgaaatgacctaagccaatctgcctcttcacagttgtctggagtggagcgatctcagctcactgcaacctccgcctccctagttcaagcaattctcctgcctcagcctcctgagtagctgggattacaggtgcccgccaccatgcccagctaatttttgtacttttattagagacggggtttcaccatgttggccaggctggtcttgaactcctgacctcaggtgatccacctgcctcggcctcccaaagtgctgggattacaagcgtaagccaccgtgcccggccgattatctccaatttttagatgtaggcaccatttcctcccagataacctcaataccaggtgatatgttacaatggaaacaagtctcagagactaaattctgccacacatgaaacaaataggcataaaaacaattacaaagcctgttccatacatttggtaaagtccccattccatctttttttttttttttgagacagggtcttactttgtcgcccaggcttgagtacagtggtgcaatcatgtttcactgcagctcccaactcctgggctcaagcaatcctcccacctcagcttcccgagtagctggggccttgggcatgtgctatcatgctgggctaattttttttttaattactttttgtagagacaacgtctcactatgttgcccaggctggtcttgaactcctgggctcaagtgatcctcccaactcggcctgccaaagtgctgagattacaggcatgagccaccacctggcccccattctattttttaaagtgctctgacaagtgcttttgcactttaagcaaaagatccactccctggcaaaagttacaatattctaatggcagagccagctcatgttctagtcaggccagaaagtttcattaaatgggcacaggcctgaatagaatcctagatctatggcacgcctctgaatgctgggtttgtcagatttcttaatccctgtacacacaaggatggagatgcctgaataagtctttctatccaatccaatcacatatattgaacacccactcatttgcctggtgaagcattatttctctgtcctttatgccaatttgcagaccttcaggatttagagaatgatattgaaaacatcaatcttaggctttctggagtgtgtactcctgactagagtccttcatatgctaacagttcctagggtgcagattagaattaatttacatatattgtctgcactgaagtattttaaaacaaattttcaacagtataacattggtgacaatgctgagccaactcttaggtgatgaggggctcattgccaagggataaaaaagtagttgaatattttaggatgaaaataaactaatgttaagaaaatagtacaaccaggggagagactatctcatagaatatctatatttactaaggaaagaatatgaaggctagaatccatgaggattttatattcctcccagcaccctacttttaagctgaaattaccagtaaaagttcatgagagacactgtagtacaataccggggacacaggtagtatacgtactacaatcctgcttatgggctcttgctaatgaatcatggttttaaattcttttaaatttttatggttttaaaattctttttaatgtagtattttgggcagctgaagctgacgggtcagaactgatgcataagagagaacttcattgtaatacaaaagtcactgggtctgtcctagctgtgagaacttagataaaatattgaatcctttgcgcttccatttcctcatccattaaaagataggggtgaggggtgggagttataagaactaaatgaaataatataaataatttagccactgcctgttgaggctggataaatatcagttccctcctcttgtagccacaaagttttaactaagctgatatgtttgttacattctgctcatgtcttttccaggagaactccatctagaacaaaatgtgcattcagcaaggtataattgtgtatgtttttattgtcagttttagtcatatctgtcattttttattttccaacatgaaaagagaggtttagggtagtcacattggaaaacaaagaaaataagattaaaattccctcaaatcaactttggagccctaaaatattaatgccttgacggcttactcacaatcacaaaaggctgtgagccaacattcagctttgtattgcagaggtgatgagaacatattttcattgctagaaaaaaaattaagctatacagacagaaatgggacatgggagccaaattccacaagaacacccttgagtttaagggtttttcccccatcttttgacaatatttagaaaaccaaagactataaacttttaaaaggaatcttggatgacttacagaaatagtaaggtcaccaaaacactttgtagatattgaatttttataaaagtatttaagttgattaatattattctcagaggtagcataaacttaaggatcataaatgcttactaaaagtgaacatattgggactagttgccaactgctgcctaatcaacccaactggtccaatcctgcattttcagtgaattgacttaaatcctactcatatgaaataaatcagtggtcggagatagcaaatctgccaataggttactctcagctgtcttaattagtgtttcctacatttttccagtttctggtacacctttgaactgccagattacacctggcagattacagctgatggaggatctatttgccctttatttagttatatcataattcatgtataagaatatgtattatgagctcactattagtagggtacatgcatgctgtttttcaaagagtcaatatcctcctgcctagcaccctgggacaagagtgtcccctgtgtgatggctccctggggagagagctacaacaaccattgaactggccatcagaggatcaaaccattgactttatctttagggtttctcccatgatagctgaagatcttctctttctctgcacccacatgagtgtgggccaatttttgaaacggcagcagtttcataaaacccaaagtttacctgtgaggcctgctcaagccttcattctgtgctcagcctttgcattctcagtctgagaatgcctcccatcctcttttagctgacgatgcagcagctaggtgtgtgggagttagcctcttggcaactcctgggccatggaggaatggccaaccacccaagttgcctacagattttcccaagcacatgtctatcaacatgtgctgtcagccaggcaaattgtttcattggtcttggatgcttttccattcactctgtactgattgaaaattaatccataattcaaggttcagctcatatacctccaccacttccttattgccccagtgagaataaatggttctccttttgggttgccacagcacaaacctccgtgtattatatctgaccaatagggtttactactctcatctccctacttcattaaaaggcaagaacaatttttattgatccttgtatatcctgccctcaattctagtgccgaacacagcatcaaacacaaagcagaggctcaacaaatgctgaatcgaactgaattcaattaattgaagaaagggttgtttactgacactgtactaacacttctaatattatcctgcctcactagggagtcttcactgggggcaggggtctggagtacaatcagaatcaactggacagttttccaaactatacaggctaatggtagtggactgtgttaaaaagctattcaggatactccgaaattatccctgctcacatctcaccaatccttatgctagttgaggaccttcaaagaaccctccctgtccaaaatacatcattcagaatcttctgtttagctctcttcattttagtgaaagtctcctaaaactagtcctggatgtgttttcatcacacttgaagtttaattaactgataactcaggcacaatggaaatacttagatagatgctcttaaattacatttaaacaaaactatttacaagcgatctagtaaaaatctgtgtctttaatgggctatttttaatgtttcctaaacaaattattgtaggtgggccaattttccctctttacttgttacttagaagcccatttggacatgttctaccccgatctggttctctcaccccactggctacagaatagtgtgtttttgtttgaaagggtcaaaacattaagaatgtgacatccaaaatatgtgctatttttttttcctggagtcaaaacccctaaagtataaatcgtttttaaatgaagaaagcagtgccaaaaggaatgaaacatatttggtccttctccaaaacagagagatagcactgaaacaggaagtggatgatttaaatatccactcggcatcttggcaacatatttatgtttaagggacttaaggttaaaaggtttttgtctggcctgggaacactctatcttccctagggtttggaggtttggggaaaacttttaacaacttatcaaatatttgcaattagccattttttggagaacaaattgttactgagaatgtcataggaaatgttccctataagctgcatgctaccattactctcctgcttcttatgataatctctttagccacctagcttcatgtggtagaaagttattattttctataaagaaagaagaatgtggttcgagttcttgtaactacttctcccaaagttggaactacacagaatgactgaataagcagaatgcaaaattggggtttaattgattttgtgtgtgctgtttccaaggaccacttagtgggcccattcttatagctagaaatcgacaatatcgggagtgtttacacaaggaagtaggccttctcctacttcccacccttcagagatgagagactgctattatccatttaccagcgcaccactggaaagaatagttaaaaaaaaaaaaaaaatgagctcaaggtttttggtctaaaagactggaataatggtgttttcatttaccaaacttaggaagaacatacaaggaggaactatgggagtgcaagtcagtagttcagctttgaacattttatatttgtcacaacaattaggcatttgattggaattgttaaataagcagttggatatacaagtctggggttcagggaagaggtcctgaatatatttttttgggagtcaggcatttgcatggtatttaatgccaagagacaagacgagaccaagccagtgagttattagatagaggagctcagtcccaggataatttttagggtcttccaacatttaaaggtcagagtaaagaccagcaaaggagactgagaagagtggccaatggggcagaaagagaaccaggagggtgagatgtgctagaagccaaatgaagaaaggacttccaaaagaaggaagtgatcaactgtgtcaaacgctcatgtattaattaagatgagaattgagaattgatcattggctttggcaatgtagaaatattgatgatcttgaaaagcatcaaggatggtagagaaaaagcctgattggcatgggttcaacagaagatgggaggaaaagaactcggagcagtgaatagagacaacattttcagaattttttttgaaagaggggcagaggattggaataggagctggagagttgtatgggtttaatgaagatttctttttttcttttagcttaagactagatatattttgacatgcttgtatgatgatgagaataatctagtagaaagagatcattgatgatgcataagagaggtgacaattgctagagcaatgtccttgggtagataagagagcatgaaacctagagctaagtagggttgaccttcaataggagcatggacaaatcaggcatcgttgcaggagtaaagacaaactatccagattcagctgtaagtatattggaaaatatgatggtagaagcctgtgatgctcttatctgattgcctctattttctcagttcaataaggaagcaaattcttcaactaagactaggttagggaagcaggaggtttggagacttcaaggcaacagaggatgtttggacttgggaaacagcagacttgccaggtagcactaaggacccagttgacattactggtaacaaattttaagtaaaagcacttagcttagctgcgtgttttcctccagctggatttagcttcctgtctgcttgctacatggagagcagtgtttagagtgatgaatcaggggatgtcagctggtaaaggacggtgggtggctgaggcatgtgggaacacaagatcattggaggacagaagcccaaggaactaagaggccagggtattagaatgatcacagacatgaatgttgaaatcgctgagaattatggcagaagtagcattggaaagagttaaaaccaggagctaacatctagaaatgaagggaagtaatgcagggatcaggaaatgactgcaacaaggaggggtagaggataatattttcaggaaggaatatagctgtggagcaaggagacaattgcgtctacttccaggctctgtgatacaaagggtatggaagctgtcggaagagctataaatcacgagaggaagtatagagcatgaagttgcagggaacattcaaagaagagtttgagatacagggtcttggctaatgacttatctggagttccagagaaatcagaaaggggaaagacattgggtcagagcaggagatgcatagagccagttggctgtgggagtaggggttccacaaggagctggaagtcctgggggtcttgcagaatgtaaggcatcatgcagtcagtcccagtggtctctcatgaagagtgtagtggtgagactgggactgctgtggagggatttccttccaagaacacacagaattctggggctccctttccctttctactgaggttgattggaggcttgggaaggagttggttactaagagcacacaaagccctggggaccaccttcattcctctaaccctacggaagatgctatttattccataccttgtttaatgcttcagtgcagctggtccacaagtgtttgctgtatccagaagaaggtcagataaagagtgaaggcacacccctgttggaaaagaagcaacagtctctctatgattgttgattcactgtttgcctgttgactcctggaattaacactcaacagagtcaagaaacctgggtattggtcttgactgagtgtccttggataaatgcctcccccagtttgaatttgaatttcttctctgtaaaataagggagctggatcacgtgacatctaggttcctttcaagccctgaatctgagtctttaactgtggcttcctagattttgggattggcctacattggcccctgcttcctaccctttattctcagttttgccgtggtctagcttttcatttcttatgtcaggagcatgggccagccacagtacttttgactaggttgcttgctgtcccttaggtgactgtgtcctcatcatgtccggacaagtgatgccaaggattgctgcaactctagctggcctttggggatgaagtgggttagaacccaacacacactaatatggttggaatttaggctgtgcatattgtctgagaagcaactatcaaattgcttgtatgtctgtgacacaaagaacaagaagagatgaaaggagaacatatactccatgttgtctctccggctggtcctcaagttgtagaatttctgcctcttttttccccagtgctagtgggacttcccagtcccagtgcctcctggagaagtttcccgtcattgttcttggataaggaaaactctgcttggggttttggtacatgtcactcttgctttgtgaatatttactaaacatggttttggctgtatagctctgatgcactgtaatgatatcattcacctatctgaagtctcactgtttagaggggtgaccctctaaaccatttctcatgttttttaaggttgaaggaatgtttagctgagcctatgaggtcctataccaaaattttacctatcttctggaagctagcaaggcctaggatttttactaaactgaaaaattcaatgaattagtggaactgagaaatttggtgtttagagaaaatgaaaatatagacagaatacttaccaccatttacaaatatacaatattctcaaaagaaccaattatcaaataaaacattttaagatatctatcctttgaaaaacaaagcctattaattttttaaaaactatcctcgaactggcatatatcccctttgtaaaatatcaattccttaagaatctttctttcaaaatagcaattgtgataaccagggtcattcacttgtgaacttgtcttgtctcctcttaactagatccagaacatttgttttgctcagtgctatcctgctttcactcagcctatctaaagttttactaatttagttcagttgtataacttccctccaggagtagtcatctccagctttaaaattttatttttctggaatcatgcaagagtttgttatgcacaaatatggactataggctttaaaaaagctaaattttatgtcaaattggaatttatctcagtgtctgattatataatgtgatgttgcaaatcaatagatgtgtccctagcactgcatcaagtaaggatgaggaacacaggggccatgtcaatccaagagcttcacagtttgtccattggcagccatttattgaaggaaattgctagattcttggattttccacttattaattttcacatgctggaaaaggtgcgaatttgactagttccatttagtctgcaatttaaaagctaccccaaaatatttgaaagagcttatgacatcattcttagatcatgtgtacatgctcagaaaccaaacctattcctgaatagcccctttctcttcagccaatttaagcaatcagtagactgttttgtatatgcaacattaactcatttggaagatttatgcttatgctgttgctctgactgagctggtcagaggattttagaagtttccaggcgaatgggtaaaatgtagggagtaagcacactttgaagtgaactgtgccatcataggatcaatgtattcaaatagacactggagaagacatttccactgtttcccatactagttacatttcattgacaatcccatggcttcaataggtgagactctactgtgtcagaaggtagaacaatgagcttcagtcttcttgaacttctcttgtgaaacctgtttccttcctggctttattaaaaaattatgtcttctgtttttggaaaagtagctgtcagaggattagagacaattcattgaattggattacttgttgtcacaaatattataatagtattgtagagcacagaccaacggagagctgttcccatttgctaggatgttgttactgcttcggttttatttttatttaaattttttatctctgctattctcctttatggtcaaaattgtaaagagtgcatctttggaggaatgcaaggtaggcaagcttgctaagagcttctacaagactaccttaaaagaagacttatatttaacaaacagaatctcaacatatggacatacaccctcttgagctggttagaaaggacttttttctttatttgctctttttgaccactgacatttattttaatttttttcatttttaaacatttttattttgaaataaagtaaaagattaacaggaagttacaaaatagtatagaaaggtcccaggtacccagttttccccagtagtaacatcttgcataactacagtgcaataccaaaacccaagaaattgacattcgtgtgattcacaacgttattcaggtaagaaggtctttttaaaacaagaaataattcattacaaccacggggttcctctaaaaactgtccctttaactgaagaacacctgattgtttgttgtttattcagtacttctccacattttgcagaggcacacaaaatcatttttataaatcccaacctatgaaggacagaacaaagtcattgttctatttttcaaagtatacaaaagctaaacgagaaaaaaatcatctgggaaggcagaaatccattggtgcaaagtttttagaaagctaagtgaagtagtaattatcttactcattccattattgaagacctcttcaaaattttattcatttacaataaaatttcaataaattcaattccattctattacaataaaatttccccatatatttctaaaaagtcacagttttgtggcaacaagatttagaattttcaaacaatactttttgtcacacttgccgtcagcccattttgttataacctcatctgtaataaacccaaaagagtttactctttttctttatttcttggttaactgtttttgagttttatatgcacagatagcattccttgaagaaagaggcaaggtatacatacacacagttgggttgctattttttttcttacaatgtatttatactgttgtcaatttaaagaccaaaatattctcaggaaaatacaatattttactttttaagcttcatattctatgagtaataaatttagttttgagggataagatagcaaaccataaatatggaagcactctcttaaggtcaacattaaatctgataatatgtagaatagatttaagactatttcgaagtttcaactagagtttcacccagtgtgctttcttcttaggttttaatgctggtttacaaaaggaaaagtaaattgctttctggtaacaaattattgcagaagatcttctacttaaagcatagatgcatttttatttttcatttacttctctgtttttgaagggttcagtgtttattcggcggaggtttatgtcaattatttaatcagaagcaggccccagagtttgccagtgatattttggaatgtagggtctacttcaaagaaaggttccatgtctcttgacccagatgaagccaatttttcatagtgaagagcaaggtaattcgattttctttttcagagcaaaaattatttttagactgaatttgatgggtcatatttctctgctcagtaaatcttgcaattatcactccacactggaaaatgtaactcaatgacccaccattgcgccagagcttctgtgggcagccgagctccgagaggcagctggacatgatgtgaagttggtgtctatgacatactgcaagatggaaaccaagcagtcaaccagtggcagtagttcacatgccaacatttttgtttatttgtaatggaaaactttaggaggaaaacacaggagactgggtgccatgggtgtgaggtagagatttcaatcctgttcagtcacaggaaaatccaaattggccacgctaaaccagatccaaaatcccagactaatttcctctcctctttcctctgcgagtgtttctgatttcacacaaggcaagagcaactgagaacagggagcctgactagatgaagtaagaaccgtcgtgaggcccaggagcaagaaaaaaaggcctggagttgtagaacatgctagaacatgaatgacagtctctgcggaattaagaagcattctccactctattccatggcctcttgctgacctaactcctagtcttccttcacatctcaccttaggataccacttcctaaggaaagcttaacagactcaagtttgacttattacctttctctgtgccctgacaattcctgataccctctccagagcagggttatcacaccacattgtaatatttaatattgacatccctactggactgcaagcctaatagaacttgggccataccgctcaagtttacaattgcatgctttttgcttagcactgtgtctagcacacaggaaatgcttaatatgtatgcgttgtttatgttatccatgccttaatgtttgggatgctccagatggcttaataaagtgtttaactatctttacaacctcaacccagtccaatgtattgaaatcatctctaccaagctttgggaaattcaatcagcatctaagaagcccttgtaaaaaacattttagtacccaatgatgactatacgtaaaccctctagctcctgacccagatgtgatggcacgtgcctgtggtcccagctacttgggaggctgaggcaggaggaatgcttgagcccagaagttcaaagctgtagtgagctatgattgtgccactgcactccatcctaggcaacatagtgacaatcccatctcaaaaacaaaacaaacaaacaaacaaacaaacaaaaccctggttttaagaaaacaatgaagatagccatgaaaatacacactggcctataaatgtatatgctaaaagagaatggaaactgaaataatggatctaatgaaaatcaggcatggttttgaaattttgttaatgtgcttcttttttcacccttctattcactttagttggattttcatggaaattcagatctaagagagaattttgagttcatgtctacacagatggtaaccagaaacttctaagacatattctcagtgtaattttcagcccataatgatgagggtggtctgtctacattgtaagaagattaaactgacagatctatgatcttgtacgtatagatggacaatgacctaaaagctatgcttaaaattgcccctggagacattttactcctgaatctgttggtttccatggtaaaatattcagttgtatgttgtcaaaaaggtgaaaaataaaatctaggagaaatctgtcatgggtagaagttggtggaacacatttaatccaccagataaaatgcttccggtctaaaagctgctgaaagatacttgaaagtctagatgttgggtgatcttatccagacagcattataagatatacaaaatatttgaagtaacgtcatattacaaggagaaaaatcattttcactgttcctggaagaagtctttctgtctacactttacccactacaaatgttgagatgttctgaaggactaccttgcacctttagtaattaatatcatttaaaaattaatctcttttaaaatgagattttccataaatgctagatgcccaatttcaaaggaaaaatctatgtgatactctgacatattggtcaaatattttattctaggggacatggtgggtagcaaggggtggtcgtggactgtaggaagtgttgacttcaaaatatatattagcatttccatcattttaaaagattttttaaaagactaacaatataacatatggacaaagggatacattccttagaaaaattttaatggtaacatgaaaccacagtaaacagtgaaggagaggggaggagaaaaatgatgcaaactatttacttccccttagaggctagaatgcagttgttttctattaaacttagattacgtttatgcgtaactgactcaattataaaatgaaagctaagcaactgttggaatttgtgattacaccatgtaaatgttacataccttggcaatgtaaaataataatataattttttaaatagagaagaaagagactgtaagaaaaaaagtaagtgtacaaatttccctatgctttatagtagggattcagataatgtctagtgataatatctgtagttaaaacaacaacaagcccagtcttttagtttttttcataattttaacttttaaaaacccatatctcattgtaaagaaacatttatctttagttcatcaacttctatcattgaagctgtttctctttgttaaattattgtaagtaatatttctaaatattagactacatttataaaactatttctacctatccatctatttttataattttagagatatccagaattttgttcaccaaatgttaacaatttatttctgagtgctagatataggtgattttttttaatgttctttatacttttttggggttaactttttaaaagagtcaacgacattttttttttttttttgagacagagtctcgctccgtcacccaggctggagtgcaatggcacaatcttggctcactgcaacctctgcctcccaggttcaagtgattctcctgcctcagcctcctgagtagctgggattacaggtgcgcaccaccacacctggctaatttttgtatttttagtagagatggggtttcaccatgttggccaacctggtctccggttcctgaactcgtgatctgcccacctcggcctcccaaagtgctaggattacaggcgtgagccactgtgccccgccaagagtcaacaacattttaataaaagagatagatgtttatagagagagatagttgactctctctctcttcatttctatctatgatttccttttttctttcaaaggtttaacaattaattctttaaagcattcgttcaattgtggcacaccgacctctcttgttggccagaaacttataggggtaagtctcaataaaactattgagtctaaaatcacaaaacagctgacaactttgtggcacatcacccaattcttggagacagtgccaacccttggacaggtctatattatcttgggcacgagactgcttgctaagttaaggttatatattgaagagaaatcagacatttttatttctagaattttctgtttcatgagggactgctggctatcttttatttgggccaatgcctaggcccaaaagaggtttaccagatgtgtgagaaaatgttatttctgctttatttggtgaatgataatgagtaaatgggatgaagggaaactttctagaatttctagaatcatatcttgtctgaacaagatatgaattgatcagttcacttgtcaaacaagaaagacatttgtatctatctacaaattttattcttcagttgaattcagaatatagtgatttttcataagaaacgacaaaatttaataagttatgcatttgttaaaaaaatactaacttgtctaacataatcctggaatctcaaacatattctgtagttgttttctgagtgaatgctaacactcactgtaaataaggcattgatacttccttgtataaaaatattttaaatttctaaaacctctcatcttaccatctccttttcaaacttcctccccaaatcttcagacaacttattctacttcatttgaagagaattaagtatggttttcattcattgcatttttctattatatttctacactctatgttctatttggcgatatagttagttgcctctatctccctggctagatcatgtgttccttgaaagcagaaactatgctttaatttatccctgcctctccactgtaactagtttagtactttacatgtagaagctctgtactcaagtcaacaatgtggaattgccttaagatgaaattggtgaataggtctgtagaaaaatgacttctccgtgggtcaccctgcccaccccacctgtccctccacatgcccccttaaaatgcaaaattgctggaagcttggggaagatgtatgcctctatatgtacgtacatatcatctcaaaaggaaaatttctgtaattttcatctaaaagatgcctatgagaacaaagccaaacaagtagctaaggcccgaagcactgaatgggatgaataaaatatctcgatatttacatggttcattttgaccgtacccacagggcagcaaacatctgcgtgaaaagtaaagaattcagcctgttagatgactggttgtgaagagccaaacattgggtatcatgtcatccacatgtctggttgattgaatatgaattgccccctttttatccagatagcttcagcaatagataaagcatggagatttttccacattttacatggtgcttggtgttgtagaattcagcctttgtgtgttcttttccccccgtcttgctattgcctggatctcattaggaaccattagtgatgtaatactaaacctatggaatcttaaacatgcttttaaaatcctgtggaataaagatgtctcctaccaaaccaaaaatgcagtgggaatagacaaagttacatttcttcaagaaaaaatgactcatttcatagttcccaaactgttttgactgaagcttctcaaaataaactttctggaatatggagcctttgatgtctgactttgaaaaaaatatatcatttctcaaacatacaattcaatccttttggggtgttcatgtatttctgcagattaacttacttttatttcaacaagtgaatgacacaatattaaatagccatctgacaaagaaagaaaagtatgtttgaagtggtcttaactcctacataaaccaaatataaagaacatgccatatgattttttaaattgccacaaaaatagaattttcagaacattaccagaagggggatttggtccattaagaataacaaaacagtttagatgtcatgaaagtagaagattaggagtgccattaagcttactaatgagatttttgattcatatgctatttcctaggctaggcaacatttttaatttttcacagtcttgaactttaatccttgaagggtaattcaagtttcagaacttacatactgcaatttgtttggggtggcaatttgccattgatttgcctctgggttcttttgttctctttcagctgggggactcaaaggtggtcatttattaagtccaggtctacacatgaccgctgaaacaactggttttcaatcaaatcttctaaataatccaaccatttttgtgcagttgatcagattgatttaagatatcaattgctctattcaaacaacagtgaatgaaataattgtatgactggacaatctttacttttctttcctcctcctccttcttctccttcttctccttctccttcttcttcttcttcctcttcttctttaataagagtttctctttggagtggtggaaggattggttaagatctgcattctagcttcaactcttccacctctatctgatgcttgaaaagtttctcttaacctttcaagcctcatttttcttttctataaatggagagaacaaacactgaccttgtgctatgtttgggacattaaatagatactgtggcatttgatacacaattggcctacaataaatgtaattttttcccagttccccctcaattgtacatacggagttttctgctttttttcattttctattgtgatgataacttctcaacagaagggttaaaagaatatttgacacccattatattacgctgttaaagaatattagaactagagatatacgtcacttggtcagatctgagctccagggcctgatgtctctgatgatggcaagaagagactgttgttggaatttgtgttattctctgagactttaagaatactacctttccttcagaggcttttaaatatctattatgcagtaacatctctaaactactcttgaacctatgcacatttttatcatggtaccagcattgaaagtaatagattccaagtgtttaatacttataatggaaagaggtttttctattatttgacctaaaatgatcacttcaaagctttaagatttagataaagtggggagaaagggggataggaaaaggagcatgggaaaaggggtaaggtaattaacatttataagatgatggccaagtttattagaaaacagatggagtcatacatttgggtagacctgaacttcacttccagctctgtctcattccagggcagagttgttaagagaatgtaatgtacccgcattaaaataaatttgctttgttaactataaatttaagtttggatttcctctttccaagcatttatttttataagtgattagggtaatttaaggtctttaaattgctataaaatatctaagcattaaagaggggtgagaaaaattagcattttaaaattctctatataaggataattttatactctaacttttggatttatagatatcttatgtatattttcccagaaaaaatgtgaagatttcccttttggtgaagtcatttagagttcattgttggttggtataatctgcaaaattatattcaattatgcaattaatgtaaaatattacatcacataataacccaaggtcattttatacttacaataaaaaattgttttgacccttcctgtagattaacctcccaaatgatttattggtcattaatagctcaatttttagacccaggggtcagagctcagggcattgcaactgagggtagatccctgtacagactgaccagaggagccctgggtatgccggggagaaatacatgcacatttctcaatgtctcaggctatgttttccttcagtttcaccaacaccatcttaattcaggtttcaagaatctccaaacttacctacacactctagtttagccctttcaagtatcattccatcctgtaaactgattttaaatcttcccaaactactgtttatataaaaaaaacttagtctcaaaatctccccaaactactgtttactttaaaaattttaaattaaagaggggtgaacaaaactagcatttttaaattctctatataaggataattttattattctattgtctgctccaaagaataaagtacaaaactgatatccaaggacccggtcaacattcctgctttctcccaccctcccaggcaggcttttgaatgtactcacccacgagcacagctgcccatgaccacaactgatgtatttctgttctgctgatgttgctccttcgtcatgtttgaaatattctcacacctcctttctagttatccaaatcttaactctttaagtgccaatcatcttcctgaagcatctcctaagtactccagcccacctaatcaacacacaccggagcttttctagtccattcttcaactttttacagtttaggagacccaatttgcagagtttgtgacttgcctgaggtcacaaagcaagttagtagtgtcaccatgacttaaaattgaggtcttttaccacgaacactgttgcctgaattccctaaactatcatgataacagacattttactgataatattggttttgtattgttggttcattgttcctaagtatgaaacctggatatgcccaaattgttcctggattattctttcatttcagatccaaataaaataattggggcctccatctcaatatttctgagaatccccaagaaagagataaggtggtgggatgccttatatttttgtcacctcctgctccaaattccagtcacccatttacctcctcagtccaacctctacctgcttaactctgagcatggaaaagttctttttttcttcattcccacaaagctgctgcatttaacagactttgatgaatggtttatggtgatagaagggcattaaaatgcagcccacactggatcacagctcaaaattaaatattttaatttgagaaaaaaattaactctttagctctttgccttaattctctcccatgtgattttggagtggacagggccattcaacttttacaaccacaaagcaaggtcaggatatttatgtaaacaaaatacaatagttatctaccctgggcttatgcccttagtaactctaagaagcaatagaagttttgacattagtttttctttaacttggcccaggctgaaatcttaggcagatctccctatctcagtggaccaggacaatgtcaggagccaatgggtattcatttgctacattcttagttgggaaaatgaatccagcactattttccagaatgtagtaagattaggaagagagtaaaaacagaaaatgggcattttttgccatttgctgagctttttctccataccaggttctatactgttatacacgttaccccatttccctctcacaacaaccatgcaaggtaggcattctccacttttcaatggagcaaataaacaatttgccaaagtcatccagtaagaaagtggcacaatccagaattcaaacccagatctgcctgactttaaaagcctttctggacttggccagatgacaacggcaatggcccaggcacaggaaagagtgaggaccatatcacatcacatgatattccaaatttatcagagtgctgagagtcagaataaacagaaatgtcagtcaaaggtgttatttggggaaggtgatggagggtccacgatggactgaggttcagatagagatgacttttttcattcattcttctgtttaaagctaccggatttaacacaaactcaggaccgtctacagaatctgaattggatatccccaggtcacttagtttttataacccaacaagggcaacatattcaatagactatcaccaagagcctttctgagcagcttgtatttattcatcttgcctgtgactgggcaaagggggcaggtgtctggcttttgttactgcatagaaatacaactttggtttcgttgatgtgaacagataagcactgcatgtgaactgaaatcacactatgtctaaacagaggactctgtggcacttttcttactaaaaagttgttaagtttggcaatcctcactctgttccagtcaaacattttcttaaccatattaggttatatggaaataagccaatatcgcggctggtgtatgagtaggtcctctgcaccaaggcagttttcttgagagcattttctcactggtttaaaagcaatagagacaaatgtggctcagagtatatttttaaatgtggctggaaagaaaaataaaaattcactgatccaaaaagaattcggaatcgcagctagaccaaagtcagatttttaagctggaagacttggagagatttgggtatttgcttgcttcttattgaaagactcaatcaattttttaaaagcccagccaaccttaacacagatataggagaggaaatcagaacaaaactgcatcatctgttccataattgtccaatgttgttctcgttgcttaatctcgtgggttagaaacccagcatttgagctctggattcactacattctgagtaatcctagacactgggcttaatttcattgtttgtcaaatgggggatgatatactacctatatcataggattcttaggaaaatccaatgagataatgcatgattcaactattaccaaaaaagcatattataagccttctgtttttcaaactacaacacttggagaaaagtagcagcagagaaaatagcttttaggtctgcccctggttgctctgatacagttatctgcttttcatttagatttatcatattctgctttgacagctaataattattcatctatatattcattcttttattcagaatattgagcacttagcaagtgccaagctcttaattaggagctcttattctcatctttgcaaatagatgataaatctataaagctccccccccatcttatcattagatactcttttgaaatatttttatttcaagatacatgttggccattcattcattccatgtatatttattgagtgactactaaatggcaggcaactgcaaagtgctgaggaatcattagtaaacacaataaatacatcctcatggagatttcagtctagtagaaaagacagatattaaatacataagtaaccaaacataaatatcattgcaaattgtgattgtacatgaagacaaagagcagagacttacaacagagaatgacgtggaagtaacatcttaaaactctatgtctaatgcaacaaattttaatttacaataccttggcaataaatggataggatacgtgaaaacgttatcatctgattgtactgtaacacaaaaattggtgttttcagggtgttgcaattatttagtactattccaactttgactttgtgggtttaagaaaggttaagaattatccaagtaagaagtatgcctttgtcattaggtaatggtgagggactcatttctggtctctgtggccagtaagctctagatccatgcaagaaattgaaagcaagcttgtgtgactggatcacaaaagagagaggcacaagaggaagctggagaggcaggctgagctagattatacacgacattgtaggccatgggaagagttggatctgtattctagatgcactatgaagctactgaaatgttttaagcatgggagtgacatgattagatttatgtttttaaaagggtaattgtttgcagatggctggaagatagaacagaaagaccagttgggaggaagagtccagatgagatgatggtggcttggatttgagtgacagcaacaataatgaagataaatgaaccattttaggcaaatatcctgaagggagaatcacctggatttagtaatttactgtagagggagtaacggtagatgaggaaggaggaagtgtatgaaatgattcccaagtccggagcttaagcaaccaggtaaatattggtgtcatttgctaagatgggaaaaacttgggaaacaaggactgtgttcaattctgtcctgtttgctgaggaaaaaaaaaaggggccagggagtagtggtggaactttttgtgagttatagagaggaaacaaaagtataaagcttaacacccatcttcagaatgcttgcaccctaagcattaaatccactgttgatatttccttaacaggctttctcaaaccaccagaggctctactatgatgtgtgttatctcactcgtagaatttattctttcttcacccttcctctgtgtgtgtccaaatataatgcagttgattttaataatttaatttgctacacctttgaattatctcatttatcaaggcatcagtcaatcttaaaaattagatctttattttttttttaatttttaagctcagggctacatgtgcaggatgtgcaggtttgttacacaggtaaatgtgtgtcacgggggtttgttatacagattatttcatcacccaggtattaagcctagtacccattagttatttttcctaatcctctctcccctcccaccctcaaccctccaataggccccagtgtgtgttgttcccctctatgtgtccatgtgttctcatcatttaactcccacttataagtgagaacaagcagtatttagttttctgttcctgcgttagtttgctaaggataatggccaccaactccatccatgtccctgagaaggatatgatctcaaaccagatttttaaaggcaatatattttttttggtgcttctataatcttggcagtgaataatgacaatagaagtctttaccattttgtcttcctgttatttactgtaactcaactacaaatattccaacttctccagtggtgtatgtggaaacaagaagagttcacagaaagaaaattatgatcagtttgattcccctgagagccgctgatagagtactaagctctacattacttagcaatgcaaaaacaaagtggtagagatttagtgatcaagatttatgtacaagaatgtccatcacagcactacttataatagcccaaacctgaaatactctcagtgtccagtgataagggaatgattacatataactgtaaagttatcatgttttaaaaattgtgtaaaaaatatgtataatataataagtgaaaaaattgagtgcataacatcacatttgtttttaaaatagaatcttacctttgttgaaaaaaaagactggaaggaaatatattgaaactttaaagtaatctcagggtgggaaggatgaaaagagactttagaattattttctgcataatttctttctttttttttgagacggagtcttcctctgttgcccgggttggagtgcagtggcgcgatctcggctcactgcaacctccgcctcctaggttcaagaaattctctgcctcagcctcccgagtagctgggattacaggtgcccaccacaacgcctggctaatttttttgtatttttagtagagatggggtttcaccatcttggccaggctggtcttgaactcctgacctcgtgatctgcccacctcggcctcccaaagtgttgggattacaggcatgagccaccgcacccggtctctgcataatttctgtattttctataataaaatgcatatttgtatactttctataataaaatgtatatctatatagcactcagagatggcataacttctagagatttgatgatttttgttagtggaagagatccgagttatctgcgagttaccggcggcgaatctgtaggggtccacagcaacttcagtccttgcctcctcagaagaaagaattcaactgaggggcgtgtaaagcagaaaaagagatagaggcaagtttcagagcaagagtggaagtttattttaaaaggctttagaacaggaaagaaaggcgcgcttggaagacatccaagcaggcacgtgagtgttaaagagagaaggtcgagtgtcccgtataaccgtgatcctaggacttttataagcccgtcttttccccatgcgtcttccgtagggtgggcatgcgcacagcccttcttacgcttgagaaatgcgcacgcgcagtgtatttagggagttatacacatgcccatctgaggctttcttccttcttccagcagagagtacccaggagatcttacttcgtcatttttgtctcttaatatgcatttccagaaagctgtttctctctggggtctgcactcagttaacacttttaaatgttaacaggtatggaccatcaggagattgtctctttctggctgctgtgaattatcatttttagagaggcaaagggataattgccaaaccatcacctgacatttctagtgggtggtgggagagccctctcctgctccctgctcatgactgactacctgtaacaatttgggacctttttcagtagagtgaaatagaaataaaagcagtctggaaaaccagcaatgaataattgtcaagtgctgcctgagatactgtggggtataaagttgtgtgaaaatgtgattgcttattcatggatcttatgatcaagttcccacactcctggatttcccttgtttgggttcaaacagcctaagaacataataagggcagttttgattttcatatctgagtttttcttttaagccacatcgggaaatgaaggaacacagacagacagcgggagaaatacactcgcaaaacaacctaagtatctgtgcagcctcaatatcatttaaattctggctaagtttaaggtttttcctttttttggtttcttccttcactcttcaagtgtattccacataatgtagttgtagctctgctcaaggttctggagtagcatttctatgcaagcttagttattttaagttattcacagttatttgttttttaaccctttaaaagtaatttgtcacaatcacatctttatgtgccagatatataagaattattgtcttgtctctggacagtatgttttagaacttttccttatgaagctgcaagacgtgttttacacttatcagctctatttagcctataactgtgtctgcataatgccagaattgccatttcaacagagaccaagaattccccaacagttatttggtggcaactgccaaaaatttttattgaattaatttatctttttcacttaattcaatccacttagctatgaatgttgaacccagtgaaacttctggttttggggggatttttttggcatatgaatggaagcattgctgtgtttaaaaatactatcctttggagataaacattatgggatgttcaatatgaaatatcttattaatgtggaaatgggtttcattaacccatctgtatctgcacgttatccttcatctggttaaaattccacattttaaaaaagatagcagcttgggtttaagtttgtggccacgtaagactgaagtttgatactgtccacgttaccatcaaccagctaatgtattaccaataaaaacagcagtactattcttcagtgagattctcattgtccaccttgtgtcagttttcagtgtagccctgggaagaagggcactggagaatgatgtttccatcaagatttagaagtggaaaaaattgagcttctggagacctcacttatttattcacttaacacacatttattgagaaactgctatgtgatcagagctatgctagacactggggatacagaagtgaatatgacataaataatttaatatttatttgcccactagagtgttagccctctgagagcagtgaccttgtctttctccatctctgctgtctccttagcaactcccatttaataactggaaatagaatcccaagcggggcctaactttttgtctcatgagataggaatagtagaagagcaaatctcaaacttttcccccatatgaggaatgacattcacagaaaagacccacttagaggaagacaaataggcctttttcttccacggaagaaagatgcctagaatccagttgaatgaatatcaagtttatatggatagctttgaatccttcctaatattttaaaaagtaaatcacatgaaacctcacatttctgatgatacgtcagagtagcaacaatactgtgatcagaactccacatagaaagctgctgtggtgggccaccatacctgatggaagatctattttgatgttcaaatgctttgagattaggacggttgcttgaagtatttatcgcttgttacactttctctgctgtgtgattactgcaaagacaggccagattgcaagggccacaaaggatcagttcttgagataattatatgaaaactgtttagcccatgatggcagttagaaatcgagcagtggattcttccaatatccaaaaacagatgtagtgattgatttgtcctaaaataaaaaataaccagctcctgctaaatggacttagttgttaactaatcaaacacaggcagaatggtgttctacaaaaagaacagatttggagacccagctcctcccatcactagctgagaagccttgggtaaaccatttaacctctctaggcctttctaggtcttatttataaaatgttgccaataatacttgtcttactgacctccagggtttctatgaaaatcatttaagaatagagatatgcaagccctgtttactgtaaaagggccatgtatttgtattcttaacccatttgtgatgtcactaggcacttggaaatcagcccacaaatggctgatctgattgatgatagaagcataattgccctgtgaccaacccacttcatccctaccaaacattccagacatttcagtgcaggaacaaggtctatgggaaaaagtcaaaaggagactgatcagaggaattccactggcccttcccagggccctgtgcacaaaatggtcccctgtgcattgttattttgctgtgtttgccgatgtccacagcttcctagacattaacagatggatatctgggtgatgatgaacagacagagtgagtgtgatattttaccagttttctagtgcaaaggcctctgtatctaatctatgggcttgcagccttcactagttactctttcagctgaatgtgcaaagagataaagtactgcctgcctttctttaaaatgctgaggaatgacatctagtgaattttttcaaggctacacatactgatggttttgcttttggttgcaagggtaggacaaggtgattctagatcctgacctgagccctgtgtcctgctgctgcccagattctctctgtcagtgtttcatgcttggcaccgactgagctcaaggctctggattaggtcttactgcacagctctgtggcagagaggagaggtgggcaatgccagttggttggaacgtgggaaagaggaacaggataattccacttagggtgttattttgctttgttttttgcttgctttaagcaactggccataaaggaaatatatggccctgtccttaggtagttaaatttcaatcagtagtcaaaactaacattagaaaaagttttaagcatactttaaacaaacaagaacatattataaataggaacatgaaatgaatttattacatcaataaagtgtgcctaaatttttcagagttgacttaattgcacaatagataatccgatcgtgatgacgtgtagcctgaactagaatttattgacttgagacactctttctttgtgaatatcgaaaatttctaagtacaacctttattgatgagattgtcaaaaattgagagtctaatagcattaaagaggttcaatttggccaaactggacattattaagtttatcctatatgctggaggctgtgctaaattctacagataaaagataaatgaggctaggcgaggtggctcacacctgtaatcccagaaatttgggaggccgagtcaggcggatcacctgagttaggagttcgagaccagcctggccaacatggtgaaaccccgtctctactaaaaatacaaacattagctaggtgtggcggtgggtgcctgtaatcccagctactcaggaagctgaagcaggagaatcacttgaacctgggaggcagaggttgcagtgagctgagatcgcgtcactgcactccggcctggtgacagagtgagacttcatctcaaaaaaaaaaaaaaaaaaaaaaagataaatgatatgactcttacccttgctcagatgtccatcctgtttcctcagctttgcctcctcaaccatgagggttctaatcttcatagttgcttctgtttgataagttctatttatttaggaagccatacacaggaacacaggcagaagagaaccagaagactgcatccattggaaaatttaatatacataaaaattaagtgcaccatttcttatcacttgctgaaacttaggtaacttaacatcatgccttacaaacaacagtcagtgctcgttgataatgatgacagtggtagtggcagtggtgatgattacgatgatgaaggcaagagaaacaactgccactaccttttcacaaactttggactttttattatctacactaggtctttcgtgatgagtggtagttatacccagctcaaacttcaggtacactatgactctgtgaagagaaagatacatttttctcagtgtctctcatgcctgtagccacgggaaacttatcaaacactgacgtcagctactttcccatgagaagttcagaaatttcataagaccgcaaacgactttctctttcctatttgcttcagacaagtacagaacttttcatgaagcttaaaaataaacatctgaccttcatggatacattctcattgcttctccaatcagaaatcatcttgcctgtgaaaatccaccctcattcttctattaacaattgaaacatcttggatgatgcaaatagcatcgcagattactcttcattcaatgattgtccaagagaaaggagaaaaggctgcaatgattaggcaccattttaagataccaaagcccatcttttgtactatcatagaacaggataagatctgtttttttttttcataattttaccatatgggcttctctgagaacatacatgtaagctatatcctttgcactccataaaattttaagaactcagcaaaatttccctgggtagcttgctagtcttgggacctgatggcttagaaataaactaagaattgagccattctactttctagatgcagaataacaaagaaggcagagaaagaagctgataatattaaacgagggtcaatggcatgctaagttcaatactaggtactttatatgttatctcaatcatcactcaacaacagacttttttctttcgttctcctttttttttttttcctgagatggaatcttgcactgtcgcccaagctggagtgcaatggcatgatctcggctcactgcaacctccatctcctgggttcatgcgattctcctgcctcagcctcctgagtagctggcatcacaggcgcacaccaccacactggctaatttttttaatttttatttttagtagagatgaggtttcactgtgctggccagactggtctcaaattcccgaccttgtgatctgcctgcctcggcctcccaaagtgctgggattacaggcgtgagccaatgcacccggccaacaacagacttttatgaagcatatgatatatgccagagaacatgctaaatgcttggtatggagtgattgataagaccatgcccttaccattgggaagcccatactcatgcaatgctaccatagaggcattaaccaagtacaatggaagaagaaaaaaacccttcagcgtagtaattactatcctcattttaaaattgaagtagctgatacctgttagttatctttgttaaagagcttctcttaggttattaagtgtagagttctatgtgacccatagtcagtcttacaattccatgctgttttaatgggaaagatctatgttcaatccaactgaatgatttaaagctttgtctgctatccaataaatctgtttgctacagaatgccacaaaaattctgactttcactgaataattgactttttctttaattataagaaaaatttccttaatttcccactttagcctgtttggtagctaaattcctaacatattatcatattaatacatcttgtccctcttatctactcatttatacaaatatctgtatacatttccatatgcataataattccttaataacacagaaaacatatcccataaaaatcaagagattctcatacagacataaacctatacactaaactacaagcatactatagatgaatttgttcaagatacatagggaaaatctgaaatggaaacatacaattttaaaaaataaagaggaaacattgttcaaggacttgatgcacaaaagagctacaagaaataatttggggaaggtgggtggttaaaagtgaggacaagaaacagtggatactaagcaaagggctggatggatggtgaaattgcatggcattcttaagatgataagtagtccctgtatttggattgccttggtatggaccacttgcaaaaacattcaatatttcacttctaagatatggtaagccaaaatacatatatggaaagttcactaagtcattggcaaataatccagtgttgacttttaatttagaaataactggccaaattgatcccagccttcccaactacaattctccccctgcagagtacattgatttgtattatcttattgttttctctcactgtttgtctttctttttattattttattttcctactggtacaatgtatgacaagagatagtgaactttcctgattttatatattttgagctcataaattccctggagttgtcatctttccagactaaagtttcatctttttctattcacatgttctaaaaataatctttttaatgatgtgtaacatatagagaagtgcacaatttataattgtacagagtgatggactttcacagaatgaacgcaactgagtagtcagcatccagatcacaaaacagaatactacttgcattcagaagcaccctaaatgtcccttcagagtcatgccttcccccacccagccactgcctcatgataaccattattctgatttctaacatgaagtattaattttgtctgggcttcggtttttatattaatgaaatcatatagtaatttttgttgtgttgtttacattatgattctgagattgattgcctgagcaaaacttagatcattctaattgctatatagggtttcattgtttgcctcccacaatttatccattttgctgttgatagacattgaggttatttccttttcatggctattattaatagtactgctatgaacattcaagttcatgtcttctggtgaatatatgcatggacttttgttgtatatatgcctgtaagtaagatttctgggtcacagggtatacaaatattcagctttagcacatgctgccaaatctttttcccaagtgattttgccaatttatattcccatagcagtgcatgagcatttcagttgctcaccaccattttgatttatgtcttttaaattttagctattctagtggtatgtagttttagttcatcataagtttcaatttgaatttttctaatgattaatgagattgagcactttttcatacacttgttgatctttttgtctttttgtttttgttttgagacaaggtctctctctgtccccaggctggagtgcagtgtcacgatcatggcttactgtggccttgacttccctggctcaagagatcctcccaccttagccccccatgtagctgagactacaggcatgcaccaccacacctggctgatttattttttagttgttggcaattttaaatatcctcttttgtgaaatgcctgttgaaatcattactcatttctctattagatcatccatctttttctttttgatgtgtggaaatttttatatattctggatacaagttctttgtcatccatattgctaatattttctcaatctatggctagcatctccactctttttatggtttttagttttaatgcaacacaagtttttttatttttatgtcccatttacaaaatctttgcctatcccaaaatcatggagattttctttttcctgaaagcgcaaatgtgtaagttttcacatttagatccacaatcaatctgaaagaatttgggggaatgatgctaaatagaggtcaagttttgattttcctttttccatatagatattcatttaggtgcgggatgatgttacttttctacagacaggggttgtcttaccttctggttgttttgatagagttgggaaagttctcttcagttaaatggggctgagctgatctacaactcatcttccattttgcaagactccttcaacctctggtttgctccttctccgtggctgaactctccaagtgtcctaatgcctccaaattaattttggttttgtggaatattatccagagtttctagttattctcaatgaaagcactggactgccacaagctattccatttaggcagatacctacgtcagtctagctacattccacaaactcatcaacaatctcctccaaaacatttaaagaaaaatgttgtgtagaactcaaaaaggtaaaagaaaatgtcagtgttggcagctatggctgctccatgtatcctgtcatggaaggagctttggaataaaacaaacctgggttttaattctaacttgtcatttattaactgtgtgacaatgaatcttacttccaagtggggataataaaaaacaactagtttcacagttttcttgtgaagattaaatgaaagaacagatatcaaatacctcgcaaatagtaggtattcaataaataatagatattattatgtaatatattataatttctcttagagttataaaatgcactcatctcttagaaataatagagaaggagtcgggataggtggacttgaaaagcaacactcttctctgagcaccctgttagatgctgaaaagggggaacttggttgaacttgttttattcaaaatgatatcaaggtcattcacatacacaatacatttttttcgtggaaagatggtagaaataaatcatctgaattgagtactgtggcaaatctattccaaatgcttcattttatagatgaagaaattgagtggttaaatgactcgtacaaggtcaattcacttgttagtatttatttaaatgacccaaattccctaagatcatatatttcttttcttctaacatactcctagctcccatgtttaactataaatgtaaagcagagacaattaataatgtgttattattactagctcattctaactaaaacccatcgatctatttttaaatattttattttaatttccatccccacaaattatgtgacttcctgccaactatgattgaaataggtacttgccattcctttcccattttaaggattatgtcctgtagcttttcatttttctgtctgttattaagaaatgatctgccttatcctctaatgtatgaaaggagctcgtgcaagcctgtagaacacagctctcttgaagtctacctagcaaaaaagggagtggggaacctccatccctctgggcactggatacaaaggtgatcatgtgcttctttggcactttcatctctgggcagggacagatcctcatgctttccagcaaaggcagccctgtggggatcgttttttggtaagaccctgtgtccagcacatctttcagcattgtgtactctacgaacagacatatgagcctgaatcccacatggactgagtaacttggaagtttcatgatcccagagcacacagccatctcataaaagcctcacaccaggcttctcaagggctctgcctggaacatgcttccttcagatctttacatgggggggcttcttcctagaaatgtgtttttagcctagatgtctccttttcagagagactatccctcaccatccaacctccagggaccctcagtggacctctttacatcctgctgttttttatttgctcactcactatcagaaatgtatggtgtctgaactccagcagagtataagctccatggaagcagagcccttgtacatcaccttgtgctgtgtcctgaagcagaggactcactcagtgaacaagcaagtgggctcctgtatccaccaaatacacccagcatggtgggtcaggccctggctttgaatactggcctcaccactagctgggtgaattcaggcaaatgacttcagccaagaaacttctcagtgcttatcctaagataagaatatgtattttacaaggttgttacagtcatcaaatgaaataatgtgtgcaatgtgcttagcacagggcctaccactgaaaaatacttaacaaacaatagttattattattatttccataatgaaagcaaatcatattatgaaaaagtcacagaggaattgttttataaaaatggtaatgttgaaatcagagaccctaattcaaccatgtaagataaaattttaaattaatgaaaatctgggtcttcttgttagttatttacaattatttatttttgtaaaggatccctaatttaacctttgcaatgattctctgttgaaataagttatcatctcaccctctgctcttagtatccatttggaaaatgccatctttctgagaatacttgcagtagaaattttaaattaggatattaaccatctcctgtaaatatatgctagcaatgtttttctatttgtttaatctagaaaggtgctagttacagtttttcatgctactgaatgactttagctagaggtttcctgggggttctaagaaaatcactattcttaggggactagaaatctgatcaagagggaagaaattacttctttctttttattacaccttggttctcctatagtaaatgttttcatataaaactcatttctccccatgcccgaggagatggttaaatcaaaggagcaataactagtgcctggctgtttgccactggctgcaatggggactcggggaggaagacaggctcatttgcctaacagggcccagctcccttcccgtcttccttcatcttgggccttttccttccttactacctccggtctagactcagctttccctgcagagacctttggcaactgcttctgagccagggcagccagcatctgtgtgtcgggcactgcattaaaagctatggcttaaagggctcaagggaggaatggttcacccgggcgtctatttgaagttgcgaggtaactgatgggagagaaagatcttaaacagggagtaagagctttagcaactctctggcccttagaccctaaatctgaaaatagaaaggaaagagattatctgaagacaaactccactgttagtgactctgccattcattttatgttttctcttgaaagcctttctgtctttgtctcactaacaaggtagttcatggacatacatagacactacagaccaaaaaagttttccacttataacattttcttccttcagtttccctttattcattctcaaattttgaaataaaattactgaggggattgggagcagtgaaaaagaaacttggcaattagatactatccctgggtttgtcttaactatacctccttctccagaataatttattcagaataaatggatggactttgcgataactgtattttccttaaaatgcaaatgcacaatagctatttctacccctgccttacttctccctttagattctaactaacaacagtacttgaggaagaaatgatatttgaaaatatatagtctgtattagctaaaattcattcaactgaattatgtttccatcctccttttattccaggtatcattggaacatttcaagatcatcaaatcaaattccacagggattggtgaccaaccagaaggctcagacatctgattgctgacctgtgagtaaagtttatgttttattaatactttgggctctgctcttaggaattacacagcctctgtgcctgatattctaaattcttacatctgaagatgcactgtgagaaaccagtttttctgctgtggccctcctactttacttgccagttaattaatcagttagaatctatcaagttttgaaggatctatcaagtcttttatcctgttttgtaatctgattttttttttttgctttatttttaaatgtttcctgcaatgtaatatctttcacaaaacagtcctggatcaatcatgaagtcttcacttcctgtgaaaaatgctagtgacttgaatcaataaagacaacatgagtcagccttccaaggtgaataagctcacctttgtgcaaacactggtgatctcaggagtgctaagtacccctcactttcaacaaatctctctcacctgggaggaaaacttctaccagaacaaggaccacctagggaggtgaaagaggggatttccactttagaggatggagaaaccaaagggcatttcactcattcacagttttgctgagcttggctccagtaggtagaaaagttcttcaggagttcagcacaccactcaggcaattgttgtttcaaaattctatctgttgcccccatgcaagttttctcaggctaccatagtgaaaatccacagactgggtggcttaaacaacagagatttcttttctcaccattctggagggtagaagtctgagatcaaagtgttggcatggtggatttctcgaggccctccttgcagatggccaccttctccctgtgtcttcacgtggtcctctctccgggcacacacctgtctggtgtctttctctctgtgcccaaatttcctcttcttgtaaaaacaccagtcatattggattaggcccaccctaaagacctcattttaacttaatcactctttgaagaactcatctccaaatgcggttacattctgagatcctgaaagttaggatttcaacgtatgaatttgggggaaataccattcagcccataatgctgccaccatcattttccctctctaatatgctgactttttgtttattgcacgtgggcttccctctgtttctcccctcctgaactcttttagcgattacattactctcagagcatctgcagttcttagagtgtattataatcatttgggtacagctctcatttccctatgacattctataaattctgaaatcagagagtgtgccttttacatctctcatagcactagaggaggttttgtatacagtagacattttgtaatatttattaaatgaatgaatgaatgaatggaaagaggattagatgcagcctctgaacctgcaatttatttgctttaagactgtctccaaatgatgagtattaaagatgctttctcctcacttcctgccccccaagacaggtagaaataagttaaggctgaggagaaaaattgaaagaaaggtgtgattgactaatagcaggagagttacctttctcccagaggtaggaaatagtaaatagcacaagcatgccccagttaaggtggcctttccacaagaaaactgttcggggatccaagagggacttactgagtttgaagcctgtgggacatgcaagggcatgtgtctagaaaacaatgcatatgcaggtctgaaggtcaggtgagaaccagagatgttcacagtcaccacctacaggcaggaagcagcagtgtgtcaatgaatgaggccaccaaggaagactgtgtagagggagaggagcagtggcttaaagattccatcagaaattgtgtatggaaatttttcctgctagataacaggagaaggacccgtccaagaggaagaacactgcacgatacttctaatgaagctgtgtgagaacatgtagatgagctaatgtgtgtgtctattttttctcccctagtgtttttggacctattttgttccttctctgtcctgtcttttgggggctatgccccaaaccattcctgtgagccttctcctacccacctttgctcccttctagctaactccacctatggtcattgtccaactcccctgctgcctgctcagggaatcttagacaaacttcctttgggcccattttcttcatcagccaatcagagctgatcagaatggacaggaggggaggccaggatgagaatccttaatgaccaaagagacagaggcaggtcgttttcagggtcaggtggctgtgacgctatggtcacagagcatcatcttgtttagtcagtaaaggccccagataggggtggagggctgtgcctcttttgccctgaactccctcctttgtccattgtcccctgctgattgtcccactccacctgttccccagaataagctttggcagtattttagggtttccctgccagaccagagagtggaggggccaggccatggcccctgacagtcattaccagcctcccctctctaggcctcaccatcaaatgtcatttctcacggagccatatttacccctgggctgaatttccctaatttgccctgctagcatgatgcaaataaaaggggtaaaggtatttattcatctctcttttattttccaaagtgttatttcttttcctttaagttctctccttgctttatgtttcttctctctcccttagttctccttccttagtagaaacccttgagcttcagggtgattttctgattatgagcagaagaggctatcagagatctggaagccacctcctgcatttctttattccccctcctcacccaattgttttaaatgtacattgagataccagctttcttcaagaacccacttccacactttcctctttgtgttcttggagtagccaggaaaaagatgcccattttctcgaaggtacccaaaatgtcagtgacacttgggtcagtgattttatgcaaattactaattatatcaaatgagaaatgttgaaagcaagaggaaaccctttgcaatccatgaatggtctagttggggtgttccaatgaatgatggccagtggccaacataggtgcctcccgactgtgtttcattaatttcagtcagctcgtgggcttggagagaaagatcattttcctatgagcacgtaaaagaagtgctttgagttgtaagcacttcgaaggctttgcccttgttttcgaatgggagattttataaccactgtgggccagtatttttgaagtcagtcgaagctccagatggagtggaaagagaagcttgggtttttattttcttcttcttttcttgagttttgcagaatgagcctccctggaaaccttgacaaagtccttagtctcctttggttcaggtgggcccaagctttttatagtaggatctgaagggatctttcttaaactaagattccttcctgtgggtttttagtagtggctgtagaactaggcttatatgggagaaggtctggaatccactcccttccctgggagtctcctctcaaggagaccactctcagggtccttgtcatgagatatgagaagaaaagtccacaatgagcctgggcatagtccagatttggttaaggattgaggggacacgaggtcacaggtcccatgggactcccagcgttctggaaacctccatagtaaagagggtagaggacattccaacaccaccacgtgcagctttagtaaccttgcccaaataaacgtgtttccccggccagggaattgcacctggtcttaagaggcacctccatgaaaacacacctttctgcctggcatgaccattgacagagaaagactgtgctgagaagggggatacagcagggagaaaaacacacaacggtgccaggagctcttgtctagaactcctttccaggctttttttccccataagcgcaagtgagtacacaagtaaagagaaaagaatgattgtgctatttagctttgaaccaaaaactatcaagcctttcctaaggttccaactggaatagcatttgtacagttacaggacacagactcaattgcttctgaactctgctttaggatgcctaacaggattaagttgtgaacatctcataccacgccgtgcaacagtactcaaataggacttaagcagaacaaacagtctggggaaaaaaaaaaagccctaagacattttccttcctactattctctgtatcccaggctcaacttaatgccaaattaaatctggatttttttttaatagacgtttcctagaggaaaaggcagagctgcattccctgaaacatattttagcccaaacttataacttggattttttctttcctcctccctttcgctaattcaaaacaaaatgtccatcacgcactctaacaccagcctctaagagctagagacaaatgaagtctgaatattcacgccaatgtggtacaaatgagctgtgatttcaggatgctggctgttttactgacaggggaaaagggcagttgactagtttaatatatttggctgaaaacactttgctaaagagcagtgaagaaggccaatgttaataatgaatcctgttctttaatgaccaaatatgatatatcatggaatggggcatcctgagtttgggggaaagcatttcaccatatccacaggatgcagacgagaatgaatgcaaacatactgcattcatgttgggccctaatgaagaagctcttctaggagtattttctccaagttcctcaaagaattcctcccataagtatatgataccatgattttgaatctgatttcacacagaattacaaaattataaatataaagacatttgttattatgagagactccgggaatctagctaactgtctcccattattggctaatggtttataaattttaaaatgcaattataagttggggttgatgagggaagcctgtgaccaccattagcaccttccttaaatatgcatattcagtcagtcgttaattcattcattctacagatatcactggattggaccttctccatctcacgtgccatattagttctgtgttacatttgcaattctagtattccttaccataaaatgggcttttttttaattaaatgcaatggaaaattttgtgaatccaatgacgtgttcagtgacgtaaattgtgatttctaatactgtatttatttttcattggcttcgtcttggcaaagggtcataatattttaaatttctctgccctctcatccacctatcacactttattatgcggtttataggcaaaacacaggcatgcactggctatatctgtaaatctacttttctgcaaatcacttgaagggtaatgcataattgccccctacattattgtttcctagattctaacttttgtatagaatgttgttaaaagcagattataatgtagttccaagtatgctgcttcctctgtatccataggggattggtttcaggactcccgaggataccaaaatatactgatgctcagttccctgatatacaatggcacagtatttgcacataatctatgcatatcctatcgtatactttaaatcatctctacctctaacacctaataaaatgtaaatgctatgtaaatcactgttatactgtatttcctattatattttttattgttgtatggtttttttaattgcgttggttttttttaaaaatatatttttctatccctggttgattgaatctatggatgcagaacccatggatatggagagctgatagtaattgaatttaaaagcaaaataagggtgctgtgatatttttatgaaatgctcatgagaatcaaagatgagagaccagaagccaatttaccgtgaagtcagtagagtttaagccgcagggcctctcatggggagaggtccctgcctcaacacccccatgcctaactttttacatttactattgtattctggttttccaagaaggcctctcaaataatcttcaggtcccacaaaacctggatctgccctgaaactgacacagatatactgagatgatttagcatcgtgtctaaagctaattaagtaagcaaagcaaagaaatggtcaaagtgtgaaatgtgatcatttatttttttaaggctttaagacaaattcagcttattttctaaagtgaaccccacttaagtgaaataataaatcagtttgccaaggcacaagtgaacataaacagaagattcatttttacttcattaataaacatcaaatatgaacggaacctaacatcaagcaggccaaggcctcctgctgacaggaaacagctcctagtaagagcatttgtagaagaacataaatccttccaggcaatcacgtgatcatttcatcattgaggtccttgctacagtctactatgtattatccatttacaggtcttgtgagatgtaacagagtgttgtgattaaaagcacacaatctggggctgagttgcctggatgtagaccccagctctaccacttactagctatgtgaccttgggccaatgactcaccttctctgggcctctgtcttttcatctgtaaaatggaaataataaggattgtcacaaggatttaaactgatattatcacagttcttagaactgtgcttggtacatagtaagtgctacataactgttgtcgaaagaaatcaacttatccatctagaatgaaagctatatgggattgcttgtgggttcactcttgcaactcctcacagtgcctaacatggcacatggtcagccatcagtgaaagacagcaacccagggcccatgctgccctgcaaatgtgcttcccttgtccacccttgatgtggtttggctttgtgtacccactcaaatctcaccttgagttgtaatattcctcatgtgtcatgggagggaccaggtgggaagtaattgaatcttgggagtgggtttttccctgtgttgttctcatgatagtgaataagtctcacaagatctgatggttttataaaggggatttcccccacacatgctctctctagcctgctgccatgtaagacgtccctttgctcctcattcaccttccaccatgattgtgaggcctccccagccacgtggaactgtgattcaattaaacatctttcctttataaattacccagtctcaggtatgtctttactagcagtgtgagaatagactaatacaagcatttttttcaaattttgagtctgaatgctcatagggatgcagggatgcatatgttctccattttcccataagctaccactccccaaatagttacctctttggtcctttaagctatttgagtttgtcatgcctgatataaatgaatgatcccataatacacgaacactgcaacagttagtggcagttttatggctcactggagtaaagagatgggcccataaggaagtgaaatatgagtcacttccactccctgatgctctacctgcaaacagtgttccggttaacctacctatccctgtttctaaactagaggtctcagaagggaaataggaaatcaggaatctgagcaagcacttgcttagaaacagagacgagtacaacctaatgtcagagctggccaagactctatcagtcatgacaagctaggttatgctggtgtcagaaacagccaaaatctcagcaacgtcaaaatgaacgtgtgtttatcactcatgctttgtcactaaccctggataggcaagggtttctagtccacatcactgtcatccatgcttagccacccctactgacaatgactgtctggaaatcttaccaaccatgatggagagaaaagagctctttggagggtctcctattggcaagtctaccccagaagtgacatgatacttctgctcaaaactcattggccagaattagccacttggccccagatgaccacaaggggcaagcacaatactataatgtgcccagaagaagtaaaacaagaatatggggcaaacagcacaaaggatcacagctgtgacattatttggaacttggagtctcaggccagaattcttaagcttttcaatgagttcaactcagcaaatatttccattcataaataactgcacagcaaagtactcagcactgtgaggggatgtcagaggagatgtaggccttgacactgagcagcttcagacttggtcaagagaaagtgatggtacaaaacatttgaacagcaaggccatatagtattgatcaccaagaacaaggccaataattgctgtagaagctgaaagggagggtggttctgggataaagataggacttgagctggactctagaaaaatataggggatttgcaggagtggagggcacttcaggttatgggcagcaagaagccagagacaaaggcccagaggcagaaatgagggtgaaattattgcaggattcaggagtttggcttggctgtaagttgtgtttgcatgggagggtagggtggggagaggaatcatgtgatggatagagtggagccatttcacagtgagtttctgggttctgcagagaaacaagatggtggtatgtgggaggaagatcatttttcctgaataactccattcaaaaccaaggaatttgcacctcccaatcaccagcctttcccagcacatttattccccaaaacaagagtcctgaatacccaacagcttcccagaccttctaggcagtcattgaatggagacagtagtaaaccctgggctgctcctgcctccagtttaaagcatctttgatcacttctgctgacaaagaatatccaagttcaagtgaaatagcctcttattgctggggtcagtgtagcctttttgctatgtaacatctgtttttaagattcggctgagagctgagaccttgacttaaatctgtttaacttaaaaagcagcaagagaacatcttgttttcatgaatgtccaggggctgtgtgtcaacaaataaaaggtctgcttgtggtactcaaagtggaaaagctggttgtgagatgttctgccactgggataaatttattatggactgtttgtctcttggaatcatgcaccagcatttgaaaataaatcagcatatttctgcttgatggcgtgttagaaccatgcttttattgtcggaagttcacagagctggatgggtctagaaagatgccctctttcatgcctcccaccttagctgcatgaagttaatgtcttaacgtggattccccgggtctgcatgaattctggcaacagtttctgatggatcattatttttatgtgacttatgtaggacctgaagtgggaaagaagtgggtgagactagttcaccatccctcaaatctgactagttgcttttctcctcacccacctatttaggagagagaagtggaaaggaattttatttatctgcacctaggggagcaaatgtctggcatgtactcgatgtcaatttaatttgttgaatgaatacaaactccagtcttataaatttatgttccccgtatgaattcatgtctctatatatattaatgtcattccttttggaaaaggtgattaccacccagatcttattctaacacataggaaaccattagatcgttcctgtagttctctctcatagtagcttctttttttcttctttttaggtttcttcctaacattaacctaatttgtattttatttgttgattgcccatctccaccatcagactacaagcaacttgaaggcagaatagctgcattcacatcttatatgctacactaagcaaggtagctagtacatgaatatttcataaacatttattgaattttttatttatttatttttattatactttaagttctggggtacatgtgcagaacgtgcagcttgttacataggtatacacatgccatggtggtttgctgcacccatcaacccatcacctacattaggtatttctcctaatgccatccctcccgtagccccccacccccaccccgacaggtcccagtgtgtgatgttcccctccctgtgcccatgtgttctcattgttcaacttccaattatgagtgagaacatgcggtgtttggttttctgttcttgtgttagtttgctgagaatgatggtttccagcttcatcaatgtccctgcagaggacatgaactcatcctttttatggttgcatagtattccatggtttatatgtgctacattttttttaatccagtctatcattgatggacatttgggttggttccaagtctttgctattgtgaatagtgctgcaataaacatacgtgtgcatgtgtctttatagtagaatgatttataatcctttgggtatatacccagtaatgggattgctgggtcaaatggtatttctagttctagatccttgaggaattgccacactgtcttccacaatggttgaactaacttacactcccaccaacagtgtaaaagcattcctgtttctccacatcctcaccagcatctgttgtttcctgactttttaatgatctgcattgaatatttttattaaagttctcattgggatgatggttgtagagtctcagccactcttgattgtatctgaatttaaatataatgcagaagacgacaggacttataatgcagctgaatatgtaggggccttttgtttaatgacacactcacattcatttggccatacacgctactgaaggtcacggcgggatgggctaaactaaccatctctattttctcaatttaaggtggtcagctacatctgtcatatagctggcccggattaatgtcatagcacagggccatagcttaggatttttttcccctcaaatgagtaactcattcctggtgggataaatctgtgactttagccttattagcaagaaattctggcccacgaagctatctggtaaaggcagtgtgatatggtttggatttgtgtccctgccaaatctcatgtcgaattgtgatccccattgttggaggaggggcctggtgggaggtgattggatcatggggaaggatttcccccttgctgttctcgtgatactgagtgagttctcacaagttatggctgtttaaaagtgtgcagcacctcccccactctttcttcctcctactcccgccatgtcaggcatgcctgcttcctgtttgccttccactatgattgaaagtctcctgaggcctccccagccatgttactcatacagcctgcagaatcatgatccaattaaagtcttttctttataaattacacagtctcagatggttctttatagcagtgcaagagcagactaatgcacagtgcaaggatctagggtcagaaaggtgttttggtgctcaacagacctatggcttaatgtccacgttcacttgtccagtggtcaatgcagatctttctggtgatcaagcacaatatgaatactctcacttgaggggtacgaaggtggattcatttgctccatttttctttggcttcctgtgtagatggaattgaaatgggaatgatatgtgcattccaaaggatctcaagagaaatgctcattcgtttacaagaggtgcaatcccacaatagtttcttgctttgtatacttgaaaacattcccaaagaaacaaagttggatgcagaaaagatattgggagaaaagaaaaataatactccaaattctgaacaattctactttaacatgttgatctgtctgccagctggccacagggttgactacttgtaatatatacttttggtaggccacatgtagttcttggaactgtttatattcggctgcagaaacttaattattctaaaattggcagagtgatctttggttacttaatacaaaattgcttagtcatctttaaacatagtgtggacagcttttgtttaagtgtgaaaaattaggaattgcaaatgtactccaaagagattttaggtcagggagaaaaacaagaaagtatcattctttcaagatatttagcccggtggttgccacatgttttaatttgacaagctaggtaactgtcgagttgaagtccttgattacaagtatttttccattttctttgtagatattgtcagaagtagaaagctgttgctgctgcttcttagatggtattctaatcctacactctgcaaagtataggtttttcagcaagagtgtgaggaactctaacatcagctgctggaacagctttcttgttctacgaagcgaacaaggatgccatttcaagctggttgtcacaaagatcctccttttgcctcttttggtttgaatcctcgaactgttgccttccacgtatagtacagagctatagtgctttagcgaggaaacaggcaggcagagtgagcttctgcattttttaaagtctaaagtggcaccggaagtttctagtttttccaggaatgcccatggcaacctcacacttttcctgtgatctgggctggggctcctaagagagatggtgagaaaagataaaagtcctgtagccaatgggtagccacgcgaggcctgggaagggtaggttcccaagcaaacctccagaacggtgccttatgtttctaattactgagcatggttagagagcaaaatcaggcaacagtttttttagactgatggaaacatttaattggctctgaatgtcagtgttttctaattatgatagaggggtagcaagaagtttccaaaggctgcggaaatttgaagtgtatcagctgaattctgattctcttcttttcttattcatcctgtcttctttttctttcaacatccaagaacaaacctattccctcagttaaatgcctaatactcctcttcctgaaatcgaaatgtctctctaagaccaagttcttttccactagagaaaaacaaccacaactacaaatcagaatataaaatagagttccatagtaaaccaccaccattcccaaggttactaagagctcagccagagaaacagccttttgataacgtcttagccaagttcatttgtttaacaactaagttcaacaaataaacactgccctggcatctgttccaactcaacaagtgtgagcctaatgcggagtataagaaaaacagtcagttaagaactttgagggatcacgaaagacagtaatcatttctaagagataacaaccttttacagaagacaaatatgtacttggtaattaaaatacaagctatagactaagtgctccaatagaaatacaacatgggtatcagtacaaactcaggctattgagtcagttgttcaaagatcctatggttttgcgctattctttttttttttttttttttttttttttggagacagagtctcgctctgtcacccaggctggagtgcagtggcgcgatctcggctcactgcaagctccgcctcccgggttcacgccattctcctgcctcagcctctccgagtagctgggactacagatgcccgccaccacgcccggctaattttttgtatttttagtagagacggggtttcaccgtggtcttgatctcccggcctcgtgatccgcccgcctcggcctcccaaagtgctgggattacaagcgtgagccaccgcgcccggccagttttgtgctattcttaagcaggccccaactgtgagccattccctacctgaggaaaagtccaggtatccccaaactaataaatgagtgaaactgctatctaaatgactcattactatctaaattactatctaaatataaagaaagaggaagcaatctaagtacttttcaacttattatttatctgtaaatatatatgcttaaattatatgtctgttacatccaagggacatagcagataacatcctttagttgggtttcaaacctttccaccttggattataaacttctagaaggtagtttttaacctgctttgcagttccagaatacagtaaacacacttgatgatcatgatgaatagaagtcaaataattcactagagaataattagtccctgatcagtaacagcttgtccttcacatacaaaaatactgctattaacaaagcacctctagaacacacctttgaattgttttcagcactataaatggatttgcatcctgccatctaagctatcctactttatattagcaagatagctggccaaggctctgtatcactaaactggaagtgttagttgaacaaaccagtcacaaaaagcaggcacatgagttgctgacttttttttttttttagctgagtagttcagcaagtccagaaggccatgcacaagttaaactacttttatgtaaaatatggtgatctctgcagcatgtttacaactgggaaaggcccatggcttctgaactttcattccatgtgaaccactcttgggccttgttacttaacttgaagtgtgatctttcttcagccagtgtctcagcttcttttgtatttgccaagcatttcactttctcagttgcaagtgcccagtcacagctagattgcccccatccaaaaagcctccataggaaaatggagagagtaccaatgagggaattatgagagcacagccatgctttgagatgctgacccatacaacaccccacaacttaccacatcttttctatgagattgtaaggtctttgaagacagaaaccatatctaacataccttcatgtctctgaagtgcatagcattacttcactcagtacaatcatttcatattaggagttgaaagatctcttttttttttgagacagtcttgttatgtcaccaggctggagtgcggtggcatgatctcggctcactgcaacctccacctcccaggttcaagcgattctcctgcctcagccccttgagtagctgggactacaggtgtgcgccaccacacccagctaatttttgtaattttagtagagacagggtttcaccatgttggccaggatggtctcaatcccctgaccttgtgatccacctgcctcggcctcccaaagtgctgggatcacaggtgtgagccaccacgcccagccaggagttggaagatcttatagtagagctgtccagtagaactttctgcagtgatgaaaacattctctgcaccgtcttatatgggggccactaaacacataatggctactgagctcttgaaatgggactggtgaagctgaggaactgaattttaaattttatttattttcaatttaaatgacctcgtggctggtggctaccatattggacagcatagccttagaatcttaaaaaatatattttcgccataaccctaaatagatggccacttcttctccctggctttttcagggataggggtctaccctttccatgcacccccatttttgggtagttgcgctggagccagccctccctgtatctgaattatgtgtgataatattgtgaatgcctctgttagtcaggcatacatttagaaagcatctttacatatttgttgcaagtctacgcattttttctcacatggacacaaggtagtggagaatttccaccttgccttagggtttacgcttgtgtcatttgttcttctctagtggccaatagagcagcatgcctattctgatttagcattaaactctgtctttcagcctaattctccttgagttcatcaaggaaaagtatttaaatgcttgaaaagaaaacagaagaagtcgtgtcccaaattttcacttctcttcattcttctaagaaactttcaagttggtttagaaattagtctaaatgccaatcctggttttccactgatttgtagtggttaaggagctaatgtcaaagctttatatgtctcagtctcctttcttcaaatggggttgaattgattcttcttacttgggaggatcaaataatgataaccataaagttttgaaaaatataaagtgctccaaattaaggtggtgatatttgtgataacacttgaagatgcaacctaaagtccctaaacatggtgtcttcctaagtgttgaagttagtatatacaaaaaccatcatttcacaaatctaaactactcaaactgtctgctactcagaaggtgaaagaaagggcataaagacattggctttaataatgttaaatctgccaggtcttctgtttgctagtggagaagtacaaatagagaaatggtaatgctaagagattgtgcggggaaggcaagggaaaaacaggtcataacctgttaacctgcccttagtatgttggattccattgattagagaaaagaaacaccttgagaagacaaagtgcctcaggttgattgtattcactcttatttctatgctgctgttcttgacagacctgccttggtaaatgcatgtatttttttaaagtagcacagatttttggaacaagatggtgaaggttgagctaaagttaagtgcaaactgtacattataatccatttgtttatttggtttttcaatcccaaatgaaccattgagctcagaaaagagcaaagtgggttgacaaattgattttttttgaaaagaacaaaagttcatttggtacagtcggaaagaaagtgctgccagatttactgtgtaactactgcaaatgtgggtttatataatttttgagattcatacatagtcaattaccaaggtctttgattcactttgtaaacactgatcagtcaataaagtacagagagatgaattggcttgagttacattttccatactcagaatggtaaaatctagaatagaaatccagtggctcaaattggctacaatttctgagtgcctactctgtctcaattgtggaaaaatttttttaaagactatatcttttcataagtggccttaagaacaaaagcatatggaaagtaaaatactaatacaaatatttaaagactagctaaagagaacaattgatgagctgtagctgacagtgtgttattgattatcaacatgaattatagatattcaaggagggaattgtcgcttttaagctagggttctcaggaaagggtatcatgagggaagtaaaatttgagcatgaaattcatgattgaataaaaatatggatagtgaagatgtagattaaaaagaatgagtaaaaatgtagaggtagaaagttgtaagacatatttgagaggtgataaaatatttttatgtaggatgctgtggtatgatcagcttgaaaggaaggttaatggtttctagatcaaaaaattaaatgagaacagacttagatactcaacacatttatgtctgggaaggaggaagaagcatggatatgtcatgtgtgatacctccagctttgctggctcaagcaggtatacagccatagtattattatgtggcgtaagatgaaactttgaatattatctctccaaccagctcactttatagagaaacaaagctcatagagcttcagtctcagtctcctaggtctcattccaggtcactatttgccaagggtttgtgaaggaaaacagttaaagggtcaaggtaagcgatgatcattgcagatcagaggtaggaaatctgctggagtatgttgtacccagaaatcacccaatacctgtaggatgaagagaaacatcactgagttgcagcgatggcccaactgaaatgaatgcaaatctttaggatatacacgacatgctccctttctcccacaaagcactgaatctcaagaacacaaaacagaaagcaggtgataggtgtgattcaaggttgaagatgggtgtgacaagcctggtggaactttaaagaagcaagaaagtctaaactatcaattccaggaaggcaaagaccttttctgtcttgttcactgttataccccagtgtcgagaacagtacctggcacatagtagctgtgcggtaaatatttattgtatattgattgtataaatgtttttgtgaggcctcactgaagtagctgaatcatgaaatttacagtgggtgcaaaatgatggctagtcagagaggacctgtctaataatggttttgagtgttccaagactagagttccttgcgagagcagagaaatgatgatgttgtgaatgaggatacagtgggttagaggaggaagatgtgtaatgaagaaggtacaatataagagaagaaactaagatattgaagaaaagtatgcaatgatgctgtcgaggatacagccatcctgagttacgaattttacaaagcactaacaataaattaacagagatgaaataagcatttggaaggctaattcaattgagatcttttgtgacttgataattctatgatttaaaccaaacaggttgtaaaccgaaggcataggtaatttttaggattatttcttacctaaggttatatgatccaatgaatcaatgtggcaatcactgataatagtcctctcagaacttctttggggcactcttgtttgttccctgaaatgggaaacaaatcctagagagaaatagtggattagtcctattatagtggttaagtgtatgcactttgaaattccataaaatggggattatactagctacctcacagatctgttacccagataaagtaaaattacttatattttaatggcccagcagagctatcagccatgaaaagacttgaaggaaacttaaatgtgtgttgttaagtggaataagccaatcagaaaaggctacagacatactgtatgattccaactatatgatattctggaaaactcaaagctgtagagacataaaaacatcagtgattgccagggttttggagtaaggagagggaagggataaatgagtggagcaggtggggtttttagggcagtgaagctattctgtatgatgctactatggtgaatacatgacattcggtatttggtgaaacctatgaaactgtgcaacaaagagtgaaccttaatgtaaactatgaactttagttaatcataatgcatgaatactggtttgtcaattggaacaaatgtaccacactactgcaagatgttcctaagtttcctagggctgccataacaaagtaccacacactagttggtctataataacagtaatttcttgtcccactgttacggagagttgaagtttgaaatggaggtgtcagcatggccaggctccctctgaaggcactggggaagggtttgtcccatttctctttctcagctttctggtggccttaggtcttccttgtctccattttctcatggcatctcaccatgtcttcacattatctcccctctgtgtttgtctgtctctgtgccaaatttccccttttcataaggacaccatcatattggataagggaccaccctaatcacctcatcttgactacatctgcaaagactctatctccaaatgcaggagaaaatgtgggcaggagttggggaggggggaatatatggaaactctgtactctctattcgctttttttctgctctaagaaataagtctattcattaaaaatgttaaaggcttaaaaaacagcctgccacatagtacatattcaataaatgttagttccttttggatgctgcattaacttattcagtgcccctgacacaacagattttattcttcttgcattccaagatcaatactggcactgcccaaaaagtagataagacttagcttcttccacatggccttgtccctaagtgttgagtgctgggttagccacctgctcacaaacatctcctgccttgactgcatttacacacgtgctcatgcacaggtgacacaggtgagcatacccacacacacctaaaatggcttatctgccaccaacactgacccaaacaaaagcagaaacttactagttccccttataaaggcatcacaggaaatatctatagtgagggctacatgcccatagagggaaaaagaaaaacagcaaaaaagaatataaaacataatacatttcttggttgaaagatgcacatcagctattgaactaaatttttaaaggaaacgagccataaattgattttaataaatataaatatactttcatttccgacacagggtgggagacagagaagaaaaaaaagtcacaaagaaagagaaaattttttttaatgtcagaagaaataccactcaatattctgcctttgaaaagaggcagagaaaaaaaagcaaggaggaaggaaaggaaagagaggaaagtcccggaagccctggcgtggtggtaagatgcaggacacgcctctcgtcacatcatgccaatcccctgggccgcaggctcgtggctttgttcaaaaagaagggcaggctgggtgcggtggctcatgcctgtaatcccagcactttgggaggccgaggggaggatcacctgaggtcaggagttagagaccagcctggccaacacggtgaaaccccgtctctactaaaaataaaaattagccgggtgtggcggtatacacctgtaatcccaggtactcaggaggctgaagcaggagaatttctcgaacctgggaggcaaaggctgcagtgagccgagatcgcgccattgcactccagcctgggtgacaagagtgaaactccatctcaaaaaaaaaaaaaaggaagggcagtgtgtttggtgatttgaaatcttttttctttccttttttttttttgagatggagtctcgctctgtcgctcagactggagtgaagcggctcaatctcagctcactgcaacctccacctcacgagttcaagtgattctcctgcctcagcctcctgagtagctaggattataggcacctgccatcacacccagctaattttttgtgtgtttagtaaagatggggtttcaccgtgttggccaggctggtctcgaactcctgacctcaagtgatccacccaccttggcctcccaaagtgctgggattacaggcatgagccactgcatctggcctgaaacctttaacactgacttatttcttaatcatggcagtttaggcatgccctgttttaaaagaaaatcctatctatgagaatccatattgaaaacacagacatatccataggtaatgacatctgcctctgttaaggtttttgtttttcccctctttacaaaagaagtcacctcagtaaatttttcaatagcatgaccacagtccctcctccagcacaaaaatttagattttcataaaactctccgagaacgcatcatctgtcactaacatcaatacttagctctttcacactactctatttgtgacacccagagcctcacgactgatggaatcaccctgtcttgacttttcatcccttcattggttgagagtttgtttcctaaccaatgttgctgaaaagaattcagcactgagtaggggtagggcaggaaatgagggattactgcctggggactggggacgtagaagagaaaaagaaaatcacttaccattctacctagacatgtctcctcttacaaaggaaagatgctagagaagggctgaaaagctctgtgatataagggtgcagggatgaaggaggatctccagccccatcctgggttgataccgagagccattttcataaacacatacagcttctctcccccacacaagacacacacaccaccgagagtcataccacatggtacacagatgtggttttgtgctttcctctaagctacacccactcgtgtgcacaaagcctcacctagaaaagcactggtctgtaggaaatggcacacgctctctctctccctctgggtgcccccacatgtatactcagcagcattcaaatggcaggtagtttttctatggctgggaaagaaaaagtgctcaagtaagcaagagaaggtgaggagtgggagaagagaatgggtaggagaaaaagaatttgcgtgggttaagagccagtgaggatggtcagccaaactgacctcacgatgttagtttcacttcccttttaagtattccaagacactgcccggctctgcagaccatgtgcatctccagcctgcttggagatattcatttcactgctcattagcacctctaccagaggtataggctgagaaccactgttgctgacaaacagccagaatgactacttaaatttgatgaggtaggagcaaaaaccagacagaggcttagaggatgctcttcaagctacttggataaattttaaaaggtaaaattgtttgcttatagacggacctctttttcccatgtctgtttgctattgctatagttattcaagaggcactttatatgcaacaaaagaccacatggaaggaagagaagagtctaccctcccactgcacctggcattcgagtccaggagtttagaccctactgcccacagggctgtcctcacacactcctgccctgtggtcagaacaggagcctaccccagggagaagggccctgggatgccctcttagggaactctcaaatcactttttctttttccattcagataattacagactagattggaaagtgtagaaaaatttctttatggtcgatgaaataataagaaggaaaatgggttgtttccttcataactagcaaagcctagggaagtactcttggtaagagtaagatagataaacatcaaaaatttaaaaccccaaataaacaccaagatttgaatttctaaagatttataagcagcattaataataccctagaggataaaaaaggggaaaaattcaaacattgtatagttttgcttttgttggctgaacttttatttttgtttttgtggggtttttttagaggggaaaaaacctttgaaaataaaataattggacaatttatttaagaaggtttctgaacttggcttcaaaatctaagttttgttttttgctccttcaaacaaagatgccttcaggtgtgatggctttaggttttgtacagctccttattttttcacacagggcaaatggctcgtctcatgtgcacataaagggctggaaaatatttctgtgattcgagcgcagcagagagtctaggattccagaggaagtggaggcctcccattccgcacaggaaacaatcttcaagcaggccttaaatgccagattccaggctgagtttaactaaccactgacagctctgtaaacaaagcaaggacaaaaagagcccgcttccccctttctggtagtcattttgggtttgggggctgcaggggaattctggaatacttgactccatggcacagaaacgcaggggaaacgggctcctcatttaaagagctggaaggggaaggtctttccggaattaaaaccatcacagaggaggtaggaaagggtaaaatggttgggttacatctgtagaaaagcagtgattttagagcttggaaaacagcttgatcaccacttaactgcttttaaaaatgttgcttcatgatgtttattcatgatgttactgctgcagtctttattaaaatcctgatgcttctttgagaatatgcacattatatgcctagacactgtattattttatttctcgctttcacttttctcctagttcctacaaatacctcttcttgccacttttcttttctgtttgtcattcctgttttcctcctcctttgttcactttttcataactttggtctggggttcagaaagttacaaagagcaaaatcattcattagaatttcaagtgattctaccaatatttcaagtcttcaaaacctctctgtctccggaggtcttttttaaagaataaataatcttgggatcttacttatttgtctctaggagattcatgaatgagactgaatttaactcggctcaggagtcagaaattgatcactggctaccttatcagctttctaagagtaaagaaaaatcaggagaatgacaaatgggaaagagggcccatagtaactcaggagaagtaacacactgagttatcaatgatattgactctacctcctctctttcaggtccagacatcatctggtctccctgaacctgaaatcacaccatggatgattttgagcgtcgcagagaacttagaaggcaaaagagggaggagatgcgactcgaagcagaaaggtaaggatctagggtgaaaaatacttgtattcccttattaacaaccttggtttcaggcctcaaagaccatccttttgagaggccaaatgtggtcatatcgcacaccaaactgttcgcaaaagtagttatggaaaatttttctgctaagactctaaattaagcatttaaaaaaggaaaacaaacaagaatcaagaaaaagagagatttgagaggaatcaattgataactgcatattgataattgcatttaatcaatacctttcacattggaatgttttaaatgacaaaagtaatgtgtgaatgaaggtttaaaaagcttatataataagaaatgacaaaaaaatgtcaagtattgaatattggaaccacttaggacatgagagtcttcaatctaaaaaatataaaggcaaaaagccctggatgaatcttgtgaaaaattttcattcttattagaaaagtatccaactctagggatctgcatagtacaggttaataacgggctatgttaccgaggagattctgggtgtaactggaagctgttaatgtcgtgtgaggcctctacagtggtggctatgaggtcaaattggggagataaagcattggcatataaaacctggggcataaatacatattttaacattttaggcctcagaacaaaggacagtgtggtatttgatgcgacttaaatcagatgttcttttgagaaagcaggttaggcattcacagagagaaaaatgttaaacaatgaccttaaaatcaaatcgatttttttcccagtaactccaatgctcagatgaaaaatgacactttaacgataccacagcacaaaactggaaacttacacctataatgaaaagtattgttcttatgttctacttatttgcatggagaatgcaaaagcaaaagataaaataactgcctatgatgaactgggccagagtcagctggcattcatgaactgactaaacatgtccacaaggcactatggatggtacctgcattctgttggttcaaatcctagctctgccatttgcaagctgtgtggccctgagcaaatgatttctctttaagccatagttgccttatatataaaacaggcataatatctacatagcctgtgtgattgttgggaagattattgagcttcataaatagcctagtcaggtacctagcacatagtagtttttcataaatgatagtttttcataaatgatagctattattattattaaccattatcactagccaaacaagaaatagcatagcagcatagccagagctaaacaatcatgccaagagaaggaaaggtagtcattatcctgcaatggaactagtcagagaaagtttcttggtggaggtgagccatggaggaggtaatgatggcaatgaagagggaaacggagcctgtctaggtgaaggaatgacaccggcaaaagtgcagaagtggaaataagaatcctggtgcaagaaacctgttgagtgtttaagggaaaatggattggactggtatatcttggctgttcctatttgccatacaaggaatagacagagacttaacaagggagttatgtgcgatgacactatgctggagaaacttatctacagtggactagaatatggggataccagcactggaagagatagtatggtaatgagggcctgaatcaggtcagtgagtatggaaatgaagaaagatcaaatatgagagtctttacagagggagaattagcaaaccttttaggagagcaaagaacttatagacggttccaaagaatatacatctgaggagctggaaggaaagtctctgctttgtcctaaatggaggatttccttcttgaatcgtcagagaggagcagtgtttaatttcaggtagaaaccacatccaaaaggggatttcctgcaggcatgtggagataggaaatttcactctttgttcaaaaagggagagaaattattattagagtaataaatttgggcagacacagtatggtggtgctagtacaaaagctgaggggatattcccaaaaaagcaagtgtagaaaaagtgagcggtcatcaaggtataatggaagccatcaaagaagacaacgtaccagggagatgggggagaaccagggagagtatgaggcccaatgttgagtggacatggtggacatggaagtcttgcgggcagtggccgggctcagtgaaccacacctcttattccttccaatgctgtgttatttcacctcaggttctcatgatagtctacaaaatatcttcatccaacaactatttattaagcactaaccaggtttaagtgtgccaggatgggaaaaataatggtggtaaagaagtagacatggttcttgcctttatatacctcacagcatgctaggaaaccaaagtgtaacagaatcaggaagcagacaggccagggtgtaggggcagacctgatagagttgtggctagagaggctcaggactgaggatgtagacactgggcatcaggctagattgccattgtcagcttctttcctttccacgtgaacagggggtcagggaatcattgacagaggtgtgacagaactaaagtgctgtggttagagccatactgtcattagagtgaataaacccagtttcttcaggttcaggactttgcttaagaattgaccgcacggctacgtggttcgttcctttgacttttttgttttgtgtggaagaatttctcttcttttaatgtcagatgtaaaaggaatgtacacagtaagtcttagttatgtaccctgaataacctaaaataaacttacacaaattaatcctaaccttgtttaatttatatttctgtctgtattacttcttttgggatattatattgttttcttttctgttttttatttcttctttccttcctttctttcttgcttccattcatttccttccttcctctctctctctctctctcgctctttctttcttcttaagagtagtacttacataattccttatacttgtactaagtttacctttccatgtttcaaggtgagccttctagttctgctattctgagatttggtaagcccatgaccacccttcaggattttgtaaaatctgatcatttatgggaatagtgaaagtcaggcttcatggttcagccagctctggtgggaaagtgcagggtgtgtgcaggaaacaggtggccagaagctgaaatcaaggccatctaaaatcatggttttgatctgaagacaaagagcacatgagaccctgagcaagtccctcttcctttagctccagaccttggcttcctcctctaaaataagactagccattttctctggggtattggtggtcactttaatttttttctcgcttttggtattattgatttttctttactacgatcatatgttactttatttaaagccaaataaaaatgaaggcaattttctgttttgaaaaaaaataattctatggccctatgcagtatacctgagcccagatgggagaagacttaacttctctttgaatttagggaactaaaagaaagatttcatccctgatctggagggcagttaccaactactggaaatagagtggctccaaggctcagagctgcagattcatttacttactctcaacacatttttactgggcatctattccactacaagctctattttgggtactgagaatagacccacagagtaacagtgttgggaagtgtgtgcttagtgctttacaacctatctaaaatgaaaaaaagatcaagaaattatacttttgtatcctcaaacataacatgtaccccgtatgggttcatacttattagagatgacccacagcctttgtacacctgacccctgcagacagtgtgggggatggggtatactacagagaagagaaagtccattgactttccttacccataaaagcttttcaaataaaaataccctgttatttttatttaattagtattgagtctgattgccagatgcagttttactttgaaatgataaataatttaaaacttgtacttttacccggtgttataaccacagattaaaataaagcgaatttttacacattttattcttcagaaacagaccttttcaaagactattttgcaagctaattgaaggctttgtgccatgctggcttgcatgtgcttaggactggcatttattcactgcatccgagctgtcctgagactctgtcgtccacatatctccttctaagggttttagcccagttcatttcaaataacctcgactgcaaacgtagtgcatcaaaaacgttcttccagctgggcgcagtggctcacgcctgtaatcccagcactctgggaggctgaggtgggtggtcaggagttcgagaccaccctggccaacatggagaaaccccgtctgtactaaaaatacaaaaagtagctaggcatggtggtgggtgcctgtaatcccagctactctggaggctgaggtaaggagaatcgcttgaacctgggaggcagagggtgcagtgagccgagattacgccactgcaccccagcctaagtgacggagtgagactcggtctcaaaaaaaaaaaaaaaaaaaaaaaaacttccttctttgtcttgccccttagcctgtgcaacttttatgccattacctcgtccttccttgtcttccatttggctttctcactctgagttcttgagataaggtctttagatttggcaaaaaggaaggaagtacttcattttgtcataaaaagaaatacagatgctgaatacctacaaaatgcaagatactataccgaaccataggaatcagtggtcaccagtagggacagtatcccagtagtcactaagctcctattctaagggtattagtaactttagagcaatcgtgaccaaaagagggagaaaaaaaattcagtaggcagaatggaatgagcagtaatcagtgaaaatccttaatgcattgtttctaagcaaaaggcactatttgctcacatctcaaattaaactgtattttaaaagcaattactcatttgaacaaacagataaaaatttagttttgctgtttattattctccaccaatctcaggggagtaaaaagttaaatagatacattctggccggatgcaatggctcactcccgtaatcccagcattttgggaggccaaggcaggcagatcacttgaggccaggagttcgaaaccagcctggccaacatggtgaaaccctgtctctactaaaaatacaaaaaaaaattcgctgggcatagtggctggtgcctgtaatcccagctactcgggaagctgaggcaggagaatcacttgaacctgggaggcagaggttgcagtgagccacgatcatgccactgcactacaagctgggcgacagagcaaaaacaaacaaacaaacaaacaaacaaaacaaaaaaaacccaaaaaacaaaaaaaaacactatattctgcttccctttctgtttcttttatttcaatccctctcctctgccttcatctctgttttccttggtgcaccttcatgtgcctcttccccggtccacgtgcatcttcatcaacacttgatttgtttgtttctgtgtctcttcccatctgcactcctaatctgtctgctctgaattatgtgtggatgtgctgttgcatcaccaggaaatacatacttctggccaggaaagagggagagagaaacccagttctcttcctgttcagcaagtataaaaaagtgctagacattttatgtgtgtctagtaaagacggaccgccgccggccccagaattagctatgtctgaatggaacatttttgctctatatgaatgaggcaaccccaagacacataatgatggcaggcagtacagttggcagttaagggcatgagctttagcactgggcagctatagtgtcaaatcccagctctgccacttactaactatgggatctaccaaattattcaatctttcaaatattttgtatcctcccttacaaaatgggggtagtaaaagtatccacctcactgggtttttgtggggatgtaaaaaggtaagacatgaaagtattaacacagtgttattcatctaataaacattcaataaactcattattaattattattatttaatttgattctctacaacatggaaataaaaaaataaaaatatgaaaggcttgtggattgttttgcacatcatagatggtacaagaaccataggcaagatgaaaggcaggaatgcgtgactgactgaagagctttgagtgactgtgatcggtaacagtttttgaggaaggactgtgttgtctcagctggaagaattagcaccagtttaagttatttttaaaaatttggccgaaagaatgttgagctgtggtgtattttctttttttctttttttctttttttttgttttcatttttgtttttttgagaaggagtctcactttgtcggccaggctggagtgcagtggtaccatctcggctcactgcaatctctgcctcccaggttcaagcgattctcctgcctcagcctctcgagtaggcacacgccaccacacccagctagtttttgtattaattagagaggaggtttcaccatgttggccaggctggtctcaaactcctggcctcaagtgctccaccggcctcagcctcccaaagtactgggattacaggcatgaggagctgtgatgtattttctgagaaaccagcagtgatgcttttatccatgagaaaatctccagcagacatacttggccgacaccgggcttggttccccaacaaatggctctctcactttccaagatgtgctcattacgttcacagcatctgctttctgcacccaacatgagttcctctcactgatcagaagaaaggcccctattgtagagttacgttatcagattcagaagcttacagacataaataaagggaatgaaaacacttgctgttgtcatcattcatacatttttatgggcttctgaaatggcttgatgattagacatttgaaagtaaatatttttactacactataaaaagaagcaattttttaaaatccatggggtctctaaagtcccctctcagaactgtatcactgagacttttttacatgatttaatagaaacagccaatgaatgattatacaacacacaacccctcacacacgcaaacccaacacttattcaaaatgcttagcatcaggaccttgacatttttaaataaaatcttttaaaatgaaattactgttattttatcatcagaacattattttccattaagaagttaaatacgatattcctttgaaactatctaaattatcaaagtagctagatttgctcaaaatttcccttcagttctctcagaaaactgatcactccaggggacaaaagaaagttagaatctgccatctagttttctacttttattttttattttttgtagagatgtggtctcgccatgttgcgcagtccagtctcaaactcctggactcaagcaatcctcccacctgggcctcccaaagttctgaggttataggcgtgagtcaccacatactttcaaattaaaagatctgtcactgggcgcggtggctcacgcctgtaatcccaacactttgcgaggctgagccaggtggatcacctgaggtcaggagttcgagaccagcctggccaacatggtgaaaccccatctctactaaaaattcaaaaaataagctgggcgtggcagtgggcgcctgcaatcccagctactcaggaagctgagacaggagaattgcttgaacccgggaggtggaggttgcagtgagccgagatcacgccattgcactccagcctgggcaacaagagcgaatgctttgctcaccccttaaaccatctgtgagcccagattttcgtcaccgtgggacagacaagaaccctgtctttagctgaactaaggaaagtcctgcaacagcaatagactaaacaaagactattgtgcctagttgaactattttttatgcttcttcaggtaaattgcttatatgtgtaggcaaagtcattgttttgtttgccctcagaaaatctcctgtgttattcccatttagcagaaaaatagaaacagagaagatcgagtttccctgcttaaggcaaagaaggctgttgatatgactattcttgacttttcactggacttttttcaacaagactgtacatcattaggacagggacttagtcacatcatcactcttaaaaacttaaggctgtctctgaccttatgaatcatcttccgcaggggaacattatgtattcagttttggaccacacactatttttgaggcactgatgaaagctctggaccctcctccaagaaaaatgcacatatgcacccaccaaacttggcacttacattcagtggcatcatgaacctccgtccgcagacctcctgggggccgatgccttctggccaagaatccctgatctaatgaattttaaaactgcctgttaaatattaagaaactcaagcctaggagacatatccccttaagatcacccagttaagctgtttgcatagtgtgggcccctggacaaacaaagccatcctgatcttgctatatgtaaaaaagtctatggctattgattaggaaaataaagcatattttggaaaagagtgtattctacaatgtactgcatgtagagtgctttctaaaacttaaaaaccgtttatggataatgtttctaaataaaggagattcggtcagattacagtgaataaagtgaaaaataaagaaagatgagtggataggcagaatgataccagttaatagtcaggaactgggaatcaaagtttggcgtctttgtcaacaaggacaaaaaaactttggtgatttactacaatcccattttctatcaattttggaagtcttttatttggtatatgttgtgttagcatgattccttcaaacaaagcttaattttgaaactaagttatgtaggatttctccattcttaccagtttttagaaaattcatcaaatgacttttctctctaaatatgaaaaagataagaactgatttgattcctaacagagaaacttatattttacatttatcactactatctttggggaggatgggacagatttggagtgggacaggtgcctttcagagagtaggatctagagtcatgaagacttagattcaaatcccagaatcccagctggattcaaaatggttgttctactccgcctctctcagcccatttcatcaagtggaaaatggccatcgaaacagttcttccttataaggtttaatgcagattataaagcacttagtagtccctaaaacatgactagtgctcattctgttacctcttgttgctgtttttctgctggctgaaggacatggtaagaaaggcgctctcagaaaagccctctctggggtcacctcagaaactcagccttttggcagctaccatctggggtatcactgaacaaggtacaactccatgtgtcagatggctcagtgtctaatcttttctctgtttcagatctgttttagcagctaccttgaaagtgatgggagaattatggatataaatgtctccctgtaaaaagaaaattacctttttattattaagagttcttttccattttccctacttgtttgaaatcaagacaaaagcatgcaatagtctggtacatatcaaggtctttgtcacaatgatatatacatatgtgtatgtatgtatataatttaattaatcatgtatggtcagctctccatacctgaggattcaaccaacccagatcaaaaatgtagttaggcctacaatggttgcatctgtgctaaacatgtacatacttttttccttgtcatcatttctgaacaatacagtataacaactatgtacatagcatttatattcccctgctgatactgagggatgactatatttaaaatactctttttgccttgtgaaattatcatttctcttttcatattgcataatctatggtttcattaccattaaagcatcaaccagaagcttctcaatgccaacattatatataaatattgtaataataacataaggaaaatcatatgcctaattgttacaaaatgattttgaaaaaatgtatcccaaattactaatttattcattttaattatgaaaaaactgatgcatacaaagtaatcctatgtaatatatatggaagttctaactcatcctaatgcgtatcctataaactcaccatacagcctaagacctagaacatttccaatgccccaggcccctctccaatcccttcccttcacctccccacccacagaggtaaccagtgtcctgaataattcatttattttaaaataaaatttgaaatgagatcatacgaatttaggtactagcttctccagggccctgggatccaggcattccaaagattctctccagactctcaggtaaaggtgtcagtgagagcccacttccctgagagggcaagaagtttgtctttctaaacacacaggacaggctgggcatggtggctcctgcgtgtaatgtcagcactttgggaggctgaggcgggcaaatcacttgaagtcaggagttttagactagcttggccaacatggtgaaacctcttctctactaaaaatacaaaaattagccgggcatagtagtgggcgcctgtaattccagctactggagaggctgaggcaggagaatcacttgaaaccaggaggcagaggttgcagtgagccgagatcgcaccactgcattccagcctgggtgatagagcgagaccctgcctcaagaaaaaataaaaataaacacacaagataaacgttcttatgctgtctaaagctgcaagaagtatacagtgtgaacaaagaattctcatcaaaataaaataaaaatacagaccaggtgcagtggctcactcctttgggatcccaacactttgggaggctgaggtgggagaatcacttgagcccagaagtttgagaccagcctgagcaacataggaagacctcatctctacaaataataataataaaaaaaatagctggatgtggtagtgtgtgcctgtagtaccagctactctggaggctgaggtgggaggattacttgagcctgggagttcaaggctgcagtcagctgtgagccatgattgcactactgcactccagcctggacaacagagggagaccttgtctcaaaaaaaaaaagatgtaatgaaagctatccaatacttatattgaacctctctcttttgccctatggttttctcattggccagcaggagtgacagatctgcatttgcagctgtcatttggtcaggtggaactggcagacagaaatgatgacttcagttgctttcaagtcttccaaggaagttcttgacctttattatcccaaaggtccctaaatggtgctgcaagaaagtaccacagggcatgaaacatgagcatgttggaccaatgtggtggctgtgtaagtgggctgtgtaagtggattctcattcatctgtgaatcaggttaaagaggaatcatgtgcatattttgtgaataaaatcagttctttccactagtttgctatctaatgagcactattcatcagcagtggaaaatcagtttttagcctatcctaaacctgcattaacgcagactgtttttgaatttttaatcatttattcaggaacattagtaaagtacaactttgaattatttataaataaagtctttggttaacatgttaaatatgtaagctacattccatggcttagtttttaagtactggagagtacaacttttttttaaaccttttaaataactttaaaaacattcactgacattgaacagcttaatttgttaattataaatcatttgtatgtattcaccatttgaataagcttctaatgttttgccagcatgatggaagttaccaggtaggtagacttaaacatttttcaaaattaaatttcttttaaggtattttataatttttactgggcttacttctagttgatctattttagtgagacctgacattgcatttgagatgtgtaccaatgactaggttagaatgtgagggcttattttccattttaataactccctacatcacatacagttcctttgttgggataaaaatctcagtaaagtacacatcggtcactataaatagcagctacaagcctgtacattcaggagagtctccagagtgtattttaaaccccacattgtttagaataggaaattcttccaatgttcatattttccattgtgggtgacatggactactatcccatgtcacatcttcactggcttctgttttcctgtaccatttaggaactcaactgacggtttccagcagattgttcaatatgtgctttttatttttctaagggtagcctgggtctttttgtccagtgggaattttgcatgcttcatggggctctccaaataaaagctagataactcagagccggcaccagcactaggtaatgaaagagtcctttatttctggagctagtagcactactgtgcccgcttagaataacagcagtcaacccattttttattcccacagaaaactttacactgttggaaggttttctggaggtggggggagactcaagagactaatatgaaaaataactgagcaagaagtgagcaaataaacaagcaggatgagatgatgggttatcaggctgattcaaagacaagaagcatcatcaggtctaatcacactgcatctttcccaaggcacaattggcagctacagtacatgtatatctctgcccacttcttccttgaacaattcttctgtttctctcatcaaaactgttgtgtagatcttgatctttttttagtggagtttcatttgggggatctaacattccctcactatttgtcctttgatgaagaagatgagaaaggacctattattaaggggcctcgcgcaaaagttgtgatgtagaaagaactgatatctgacacctgtctttcctgctactaccttttaagatcctttaactcttcctatctaagcaggagagtgtattttccctgagccagcatcttcatagcatatcctggctacctagggattatcattgctacagatgctcagcggcttttgaactgaacagaatgaagttttttttaaactctaggttgaggctggagagaaattcccaaatcctttagtccctaagtgcctcatgtcatataaatgatgtctcattgtggcattgtcagagctatggtagagctgaaatcagagacatatgcgcttcagaaaggtgtcagttttccatgagaactctgcctgaagtgcagaattacttctagaagacagattctggtgtccagttgggttatgtcatcagaaattaacatacactctctttcctacgttctctgaaagggggttggaagcccaaatcattggacccaggcttgtagagcaacatgtccaagagcacacagtcagtggcagggtcaaatctggaaaccttgtcattttctccaactctggcactttttttctttgcatcgtgtgaggccccactctcaatttattatcacattagagctaaatgtcctctaactcctgctgaagagactggcttttaaatcaaggataaaagaaaagacactggataaaagttcagcagatcagggcttccttatctataagagagaactaacacttctcagggtggctgagaaaattaagcaagatacagaaaaaatgtcatcgaaagtataaagggtaatgcgcatgacgtacgtttatcatgttgaagtgcctgggtgattacactggattcacttctatattaactatatgtagagttgcaggtttcatgctggtcatgtgctgtgtttcaaaggaattttcacacttctaaccctgctgccttatgctagctgactggctgtcaggtattctagtctttcagaaatcagatgctgagaaaacacaatgaaataaaatgtcacctgtcaccctccctagagcccgtcacctctggagagggcttaggacctcaattgcagattagaagaaccaaagccattttattttcccttttcctctagttgtgaattgaggagaaaatgcagacgatttaaaatcctggctttatcccaatcagaaggaaactgtgctgtgcttacgaggagaaccctactcccaccttgggtcttacgtcgcactttttacatatgttaattattatcctctattttatgtttatttgttctcgtatctgttttctccaccaaattgaaagcaaccgtagatcagaaactacatcttactcacttttatttccccaagaccagcatacaatgttgaatgaacactaacacttgtgtatcaaggcacaactgtgacaaatgtgctaagctacttgtgagggaggcagaaatgttagtgacactcgttgtgtcttctaaacactgacaccatcaatgcctctcctggggtttcatcacttctctgctgagccttcaagccattgcaatttcaactccatatcttttctccagagaaatgaagagatttatctcatgtatttttttgattattaaggataattggacctttacaacatagaattttgaccacttatgcttatttagttgcattgtggaggcaaatgatattaatatggtaagagtccatttccttttgttggcctatttactccggtactcaagcccttggtatatttgcaattagtatctgcattataaatcagataatcatcaaattacagggtttatgccaaacgtacaggagtccaacagtgaacaaactgtataatcaaaaatttctctaatgaaggatcaagcttgtggtcaggaggagtaaagtatccagttaatcccagaagaatgggcagaagtaggataagggtagggccaatctctggcatgtatttatcaacattctttctgataatagaatgtttagcatacaatagaatggagtgtttaacatacaagttgagttcaaagtttagatttcaaatggtaaatggttttccaatattgggatgtaatgatggaccaaaaaagaaaaagaagaaagtaatacattagagcccaatactttttaatcaagatatgaggacttaattatttttttccagtaaagtcgagcatttttataaatggtttatgctccttgagtggtactatttggaagaaggaggaggagtatttataaatggattttcttcatcataaaatataccctttggttaatttgttaacataaaatttgtaattaaaataaagttagtgaactggaacactcaaagtacgtaaacccagaagcacaatcgaatagcctcagaactgtatttcttaggtaagaaattttaatttttgattcttagatctactgggaaagagtcagaaggaaaggtaatttgaagttatcctagaaagactctgaattctaaaatacttaggagaatctcagattacttcagccctctctactttgcaacatattttagaaagctggattcatatttcacatcattggctttcaaatttgaagtgactgtcggctattttttttaagtatcatctattttatcttttgttgttgttgtcttcataatgtgttaacattaaaaagctttccagatggcttctggcttttaaatgagaaaattggatatttttactaaatattttcccttaaaaacctgccaggctggtggttattctataaattagtgagattaaaaaaaaggccccatttgcttttcctgttttaatcttaataagagcttgatttcactactcaataatgtcaaagtaaaatagcatcttaaaatggaaaagctttcttctcctactctatttctaatctcctgccttaggctaccatcataaagatacctaagattctacagaagagcatttctgataaatacaattcataagggtcaaactgcattaggtctcccagatttgaacaagtggagtccaactgtaatccacgatattagtgagtgtaaagaaagaatggccagtagaagctggccgcggtggctcacgcctgtaatcccagcactttgggaggccgaggcgggtggatcacctgaggtcaggagtttgagaccagcctgaccaacacggtgaggtctctaataaaaatacaaaattagccgggcatggtggcacatgcctgtaatcccagctacctgggaggctgaggcaggagaattgcttgaacctaggaagcggaggttgcagtgagccaagatcacaccattgcactccagcctgggcaacaagagtgaaactctgtctcaaaaaagaaaaaaaaaaaggaatggccagtagaagaagcctgcatgtctgccaagttcaagacctggtttggccctggggatctaggaatatccaaatgagacagaccttgaatctcagggttggttgagtttcagggtggtgacatgagatttatggcttgaatctcacagagttgtgacatgaaaagtattctctccacttggagaagtgtttcctcatgtctcccactggcttgggtaaaatattacctgtgatgatttcaccccgctttgctctgacttcacactcatgaagaagtcgctattgactacgcagcttcctaacatcctggcttggggaatgggaggtgccctggttgggaatgagagttctccaggcactgaagatggagagcatttattctatcttaattggcactagagaaggcatcagtctcttgtgcatctgtgagttcatcaatcttcctgatacctgtcgattctggacctcccaagatccaatttctggtgcagaactgttatgaatactccaaaaaaaaaaaaaggccaatctttagaaacctttggaaaaacaagccaactgaccttggtgcagcgtctctactccatcgttgtccctcttcactccagagaaaaaatgacaagtacttattggccatctgctatataactaacaccctcctaggctgtatcaggtgcaaaagtggtggtaggaaataccccttccagcaaaaatgttacactgtaacttatttggtaaaaacaagtatatacacaggaacaatgaacaaataagactgtgtatttgtatttatccatattttctttctttcttttatttatttatttttttgagacagagtctcattctgtcacccaggctagagtacactggtgtgatctcggctcactgcagcctccacctcccaggttcaagcgattctcatgcctcagcctctggaggggttacaggcgcacaccaccatgccaggctaacttttgtacttttaacagagacggggtttcactatgttggccagtctggtctgtaactcctgacctcaggtgatcctcctgcctctgcctcccaaagtgctgggattacaggtgtgagccccgacacccggcaccatacgtttatttctatctgtagatcataatcaagtgctgatcccagtcagaggttattacaaaatataacagaacctaataaagtgttattatataatgtaaataataagcacaacacctaaagtatctgaaacacataatggattatttctctagcaataggagcaatatgctttcatccaggtctgaccaccccccaaaaagaaggaaatcaatattttttaagactttatatggtatcactggaaaaaaatctggatttcattccagctataaaagccatgtgtaaatttaatatccagatgcaaaaggtggacacccacaaataaatttatgattgtggaaatatttagacactttgaacaagagtggtacacactgagaattctgtggcttaggaactaatatgcttcctttgaagatttgaccttttcttctgcactagaattatctcctgagtccttataataatttccttcacaacctgtacctatgaacaacaaatctacattctaaaatatatcactatggcctagattcagtttcttatgggtagaaatcacattcttcatgtacacacttctttcctagaattatataaagcaggtattattattatcgttttcaccgagaccagaaccagaattttgtagatgtgcaccagccaccattcattcaagaaattgttagagccctgctatttccaagcaccgtttattgttttaaagatatgtttcaagttggagggcagaaaggagttagaggcatgatccttttcagatagaaacttttcaggaaaagaaaatagtccagttgtttaaaaaaccctggattttaaaaagagcttagagagtcggcctaagtaattggtgcaagacagtttaaacagaaacagggagtctcacagcaagttggctggaggagctgactcatacattgcaacataattatttcccaaataacatgcaaacaagagtgggctcaagctttctggtctctctctccctaacaagataaattagaaagaaataaagtcaaatccaggaagacttcatagaggtaaggcctggaactggttcttaaagaaccactagaattcagagaagcaaaaggagtaagagtgggcataggacttacaaagcaattcatttggagaagaaaaaagaaaaagcaaaaaccctggatatagcacaaaactgaatgaatgatctctctaagagatgctattatcaatgtgaaaatgatgttaggatgtgttaacaggaacgtggcaggaagcactgggacttcagccaggccttggtcagcttttattatgtccaattttggtttcccgtttgaagagttgttatagtcaggctgatattaaaaggatggaaaataggcattggcgtctagcctagaaaagacgagactaaaggatgacttaatacctgtggccctcctagagataagtaggtttctatttcagcaacaggaaatctagttcgataacaggataaattgagcgtgagagtgattaaacactgggaccttgatcacaggatgtcacctactgaagtatagttctttagctctactgctttcagagtactgttcactttctgtcttataatagaatttttgtatacatgtcttatctccctttaggactgcccttcttatctttgcatcccccacagcacttagtgcaatgacttgcttgtagtaaacattccaatagtgctacgcgaagcaaagcaaaaaggaatgtgctgggacaaaataaaactacatgctcaccattataagggcaataagacagtgtcacaacccaagcccctattacaggcctagagacagatgaggcaaagaataattaagaaacgtgtatcagcacaggccatgaagacgctggtgaagaaccactggaagactaggatgaggagtaaactgtgatttttccacagcagctcctgcattcaagatcacaggacatgacagagcaatatagtttaagtgaacacgttcaacgccatggcaggggcaggggatgggagatgccgtcgtctatgaggggaaaactatgagaggccaacagaaaggaggaaagagatgctgcctttgaatatgtaaactcctttacctacattcctgttcaccttggggtgggggaacagctgtctaggcaagattttttgcctagttctaagagtacagagcctatgaatttcttcataagaaaatttatctccaacagccttttcaaacgtcccctttgtactactcgaactgttgcctccctagtggtagatttcccttaggtttatgtgtttccatagtaagtgaatggctctgtgcatgttatgtgtgtgcatgtgtgcgtatgcatgcatgcgtgtatatgtgtgtgcctgtgtgtacatgcatgtctgtatgtgtgtgcatgtgtgcgtatgcatgcatgtgtgtgtatgtgtatgtgcatgtgtgcatatgcatgcatgcgtatatgtgtttgcctgtgtgtgcatgtgtgtctctatgtgcctgcgtgtgtatgtgtgtgcatgtgtatgtgtgcgcatgtgtatgtgtgtgcatgtgtgcatatgcatgcattcgtgtatgtgtgtgtgcctgtgtgtgcatgtgtgtctgtatgtgtgtgtatgtgtgtgcatgtgtgtcataagcgcattagggcatatgcacagcacttcccacatacctctcttccctagggaattgtttcaaggtagaagctgttcttaaacaactgctgcagactctaaagtctggaacagatcttgtggtccggtctcccacctccatgaagtaaagttatttttaaaaaatcatattttcttaataaaggaccaccctgtggtgggagctgttcctttctattacagtctgacctccctcaaaccttcccagcccagaatctctttgatgaaaaattaaacaataaagtgtccagaaacaaaggatactatgagtaatctcagaatggcccagactttcatttttcctagtaagagtcctgaagcatcatcaaattcatgatacctattatcttgctgaaggatgactggcccacttgttcatggtgccaatgaatagtcattagttcacttctcagagacaccagttctggcagctggacactgggtaccattctctgctatgcagtgaaagcacacaggcctgtaggtctctgcaggaccagaacactgtgcacaaataacctttagattgttatttctcaatcctcttaccttgcctctccagccccaggcaccaggtctcagaggactcttggaagcacttgcctagcccagccctgctctcagctcatgattcacttgttatctctatgcgtcttcccgcgttgcctgtctttcattggcctttgtgttcttcctcttcccagagagtgtctgaaccaggtccaagactcacttctctcttcactcttcccatgtcagtaccctaccaggtagcatgagctataacaccactgggttttactatcacaaactgaagacagacagctgcttcccaaatgcatgcccctaataacaaaggagggtgcgcgctgtttccctttccctcttttggcaattagggaaatagcctggtggacatcctgtgtacagctggcaattagcacactttctgtacatggattctgcacatgagtggaagactactaaattcttgctctcctccatggagaatactggccagaaagaaccacaatttttttttctaggtttttccattttatgaacctattctgaatatgccaaaaccatacctgtcacctcagaattggcgtggggggctggggaggagggaatcaggaggtgatagctttctcgcatggctgcgacaaataactagaaacttggtggctttaaacgacacaacttattctgtacagttctataggttagatgtctggcacaggtctcactgggctaacatcaaggtgtcagcagggctgtattccttcctggaggctccaggggagaatccatttccttgccttttccagcttctagaggaagtcacattcccaggctcttggaccccctctccatcttcaaagccatcaccagtctgtctgcccaccctgacagataagctcctctaaccacagctggaaaggggtctctgattttaaagagccatgtgattcattccagcacacctggataatccaggatgctctccccatctctatgcctttaatttcatcatatcgacaaggtcccttttgccacgcaaattaacatgttctcaggttctggagatttgcgggaaacgttattccacctaccatagaaaaccaccgacttttgtaagtaattgaagggaaaaaattaattgggcaaaattcggtagaaagagaagcagcagaatgcctcgatacatgtttctgtctcagttctagagcgagaaactcaggacaagtcagtgtatatttaagtcctcttgtgtgaaggcagatgtatctctacttttatgggtgtcttatgtgctactttcatcaatatatgttcggtgatcatatgtgtaatcagagatatttaaatgcatatatacataatgatatatagagataattaactttaagtttattaaactgtatttactctataaactatgacttcattttttgttttgttttgttttttgttttttgagatggagtctcactctgtcgctcaggttggagtgcagtggcgccatctcagctcactgcaacctccgcctcctgggttcaagcaattctcctgccgcagcctcccaagtagctgggactacaggcacctgccaccaagcccgggtaatttttgtatttttagtagagacggggtttcaccatgttggccaggctggtctcaaactcctgaccttgatccacctgcctcagcctccccgagtgctgggattacaggcatgagccacctcgcctggcctataaactacgactctgatgaccgcatagtatttaagcaagaaaacaaccaaaatgttctagctaaagtggagaccacttaacctaacccaattaaactttaagttgaacacaagagtagtagatgcagttcagctccatgacattgggtgagttgtctaaatgctctgtgctttggtgtccttgtctgcgtgtgacatgaagccgcagatctcaaagatctctttcattccgtgaaagcgctctcaatgtgtgaagttgactgcttctcctgctgtttaccaagagaataatcttaactctacattgtggagatcggatttgttctcacttgacagaaagccagtcccacgagcagcttggtacccaaataccagtctgtttagtgctcattagagatgaagaaccatattcataagtcaagctgagacggagtgtcatctccagacagaatcaacaccaccccctcctcaggaactgggatttggctgctttccaagccgctgctgaccaggttccattgcccagcttggctgatgagatcactggcagagtaccatgggtgcagacggggcctgctgtttcaacatgttctcaggagggctcttgcccacatttcttggagaggtgtgagcaccaaacatgctgaaccatccagcccatcactgagcagggccatctctcttcatcccttttcatttggtttgcatttttatgtcatgctccttccctggataaaagggataagaggagtttctcagatttgatttctcagtgggaactgtttgctttggaagccacctacaccaatgctaattgagaacagagctcagaatgggagcctgagaactgcacccggatgaactttttggtgggctgatttctgttgatcttgtcagaattaggttgtatatgcatgtaataccatgatcaactattttccaaaaggctgagcaaatgcatcagtgtctttttcctttgaccagttacttaccttggaaaaattatttgtagttaagcatataaagtcttcatcaggaaaactactggagatcctggccctgactacccagcaataacatttctggaactcccgaagcaatcagtgctctctgatcgctaaacatgatgggcttctattagagagattacagtaaaaaataacaatcagctctctgatgatcctgtgaggagggaacgggttgggaggagtagatttggctgaggacaagcccagactttcgtcacagggacagaccaacgtgttaacacaaagggagaacacgggagcatcctgcaccgtgcatttcagccacagatcacatggcccctccgcgggcccagcccacgccctgaccgcccggcctggccaggtctccgtatctctctgccccgccgccccttcccaactgcggacatgctgggtggatccggatcgcatggaagacgcagcctggccgcgctctcccagtgagtcctcatttcgtctctttggttttttcctttcttttttttttttataaaaaacaaacgaattgttgtaaaaaaaaaaaaaaaaaaaaaaatgtgggagtgggaggggagaggaggagacaccaggcaggaaaggaatgcagtgagtgtgtgagtttcagacctgtctgaaactttctggtttccacttcatggttgctctgattcgctggcttttctcgtttccattttaatggtggtttgtggaccatttgccaggagtttatacctaggcacgggtttctccgtttcaaataccaatccataaagcattgtgtttctaaaggtctgctgttaatttagaccttagccctccgttcagaatgatccatttgcagggctcagagattttggctaaagcacacattgcccaatccttagagtaaacagccaaagccctcaatatactgaccatctgactaagacagaacaagacccagagcatatgctattgatcagggaattgttcagataacggactccaagggtttaggatcatgaaatcctggaatgttaaagccagaagggaggcctttagactctttggtgcaatgctgtctttcaataggcagggaaacagaaaccagaggggcaactcaacttaccccaaagcagacaacagtcggtagcaaagccatgtctttgtactctcatgcaaagggccgttttcacactggtgtttatgaggtttgaaaaacttactgggtcttgggaaaaggtaccgcacaagaattagaacaccaaatggcctttcagtaaatcttttccatttttgagagttttggcaccgattcagcatgacaattgttgttccagttgttccagcgtttgtgcaacagttaatcaaataaacagagaaactcatcagggtcctaaaaacaagacccatgtccattacattagcagatctcttggagagctagtttccgtaagtgtggttggttattcacgtgggagagctcaaagggactttagacgttatctgtatagtccagtgcttatcaaactttttaaaaaatcaaatttaatcttaaggggaacgctattgtataaaggagatgttctggttaaagaaaaggtttgggatctagagctcctcatcctcgctctactctgcagtcatagcccactgcacaattctacccctctcctcatccctcttctaccccacctccccaccctcttcatcaaaacttccttggaatcctaggtctccatggaatagttcagaaaccactgatctcattgaaagccttcatttcagatgaggaaactgaggcacaggaagggcttgcccagggtcacacagctgatcagcaatagagcgtgggatgctaggaaaagagcccagtctggctggctgtctctctctcaactcatggtcctgaggcttgtttccactccttcatgcctatgattctatcagtctcctttctctgtgtctctcttctctgtttactctgccatttcctggatttcaacagctattacctctcaccgggatggttgtcattgcctgccatctggtcctcggcctctgtctctctcccctttctgatccagccccctacagcccccacctatgaagataaagtccattctccttactacagcattcaaatttctccacaacatgccttcactatttcttcccattctgacttccgccagggagaatgttaaaaacattgtggggaaataaataaatgatgggcataattttaccagattctgcagaaatgacaaaagaaatgcacacagggatgtcgagatttgtaaaaactataggagtacctgatccggtgaaataagatcactcacagctccccaaactcagcatatacaagccaccactgtttcttgactcattctattccctacacagggaataccctcaccctcctgtttctgacctcctttctgttctgcaaggccctgatcaaatgctcccttcctctgtaaaccttcctcattcctcacttctctcactctaataacctttgcccatccttctattactagctttgtaccgtcaatcgaggaaaatgacgaggcaagtctcaatcattttaggaggtttacttgccaaagttaaggatgtgcctgggagataggtctatgcctttatctgaagatgattttgagggctccagatttaaaggggaaagggtggggatattgagaagtacacaattttcatctaagtgaatctgtgttttgtacataagatcacataaacaaagggggcagaggaaaaatgcggggaatctgcattttacgtatgataacagacaaaatggggtagggcgacactcagatatgcatttgtgtctggtgggccagggtgactgcacctataaagataagctgtccatttgcattgccatggtgaagttttaacagctctctaggaatgtccttgtggacaaaatatgggggaggcttgtgtagcttttcaccttgtagccatcttatttaggaactaaaaggggaaggctttgagtgacccagttcccggcttgacttttccgtttgtctaaatgcgttcggggtaccaaaatttaatttcctttcaataaagttattgttgaacatagctatcttccctcccaataaatggcaattcacttgagggcaggaatgattttgaatctttgaagcttcagcatccagaacagtgctgatgctccagaaatattctttaagtttcctattattgagtaaatcaaactcaattccccttagtttacctttttcatttgaaccgtttgaacacacaaagccttcactccttttgctttgctagacgtactaggttaaatgctaaaacaggtgctcaacaaaatgaattctaagttcctttgcatttccatcagataatttatctctgtttcatcacctgtagagcaagattggctgtgattttttaatgagacatgttaaaattcctgaatgccaagacctacacaagggccatgttattttcaggagcagtcgtgaatggttgttcagttatttagatttcaaggcatgtttaatttgttcctaccaagatcactgagagattctgtcacttgcggtttaatattttcactggtacttttatcattttcccaaagcctaaggaagtttacttgcaacaagatttggggtttcctgtaaatatttgttttagtccataaagggttatttttcttatagagaagtgtgcttttatatatcttgcagctgaaagttaaaagttttttgtgtgtgttacattttgtaacaaacatggaagggtatgtaaattgtaaaatcatggagtcaaggaaacgtaggaaattatttagttcatcccactgttttctgagggaactgaatccaaaacagtgctgggaaataaataaataaataaataaataaataaataaataaataaataattggcacaatttttaaagattctgcagaaatgacaaaggaaataaacataagaatattgagatttgtcaaaagtttaggaatgcctggcttattcaatgttatcaggaaatgtagcattataattatccaggatgctaaatttggttttatatatgtatgtgtgtgtgtgtgtgtgtgtgtgtgtgtgtgtgtgtgtgtgtgtatgtatttagtggaaactctttgccttcattaaagcagatattacaacacatttaaaacattttcaaattgctaggagctgtccttatgaacatagttttttaatcatgctgtaaaacagtgatacctcaggggataagactcccatccaaaaatgggtccagttattatgtgatgtcttccatcacataatattgatgcttttaaatctcttctaatacctattaatgcatctgcctgtcatggtcccgctccctgttctgctgtagccaagagtaacaggacacccatttgttagaattacgttcaaagtaaaaatcaacaatctggtgagagaggccttctctcctacaaagtaatgggcacttacattttgtgactattggtttgtaggccaaagtgttaaatatagtgaacttccagtttctcttcaaagaatcagtatgtcagtatgttcagctttcttattttttaattcttgatttcaaagtttaacttcctggttctctctgcccacttgcttctagtttcagtaaacaactttcccaccagtcctattcagtaggttcacatctgttcccctggtcacctgctctgtcctgtctcatcctggtcacgtgctttgacctgaatcacccctggtcacctgctctgacctaagtcacctttggttacctgtttctaaccatccttcccgccaaactactcaccctgccactctggctcatatccctgccctctttaaaatagccagtcggaactggcttagactgtgtggtccaaccctagccaatagggaacaacacagcagtaggggccgcctgcatcaggaataagaactcctgcccctcccctgtccaggtgtgctctcgccattgttccatcttcgaggggcaccctttctgcagaaagtaaattttgcctttctgagaaaattgcatttatgttccagtgctatttctttgtggcactgggaaacaagcattttgcatttctaacactgaccaatttgtctactttttggttcaaagaaaggtttcaaatgatctggaccctttatctggttatggataaaattgctactgctgtttatagattaaaaataaaaaagaatggcagagaaataggtcactgtgctttgcatgtattgggtactcttctatacaagatattgcagcactgcacgagcagtggtgattatggaggtggtcttgaccttctgtatatgtgtcttctctacaaatggccagcccacccacactcacactggttcaatacctggtggccacaagcctttcaaacctattgaacagcaatttgcattgctgtctgcgtttttccctctccttacctttgatctattgatccttgaaatgagccctgcctatgctgcttctcacattcctctcagcccatcaaaatcactttatagagacaggcctaacagtggcaagaggaatgagaaatggggaagaggtcctctgtcctctggaggcgaacttacccctggcatttttaatcagactagtgaggatccgtttccctatagaaacacagcttcgtttctccataccagcttcagacacaccttgggtttaaaaaggtggttgtaggctggtctgagagcccgactaccatgtgtcatgctgttgaaagtttcaaaagccaatttacaatgaaggtcttggaaacaacctcttcataaatgtagtgctgcctggatctatttccaagcctaattgaatttttaagaggagtccttagaaaatctgtaaacctcattcatttccagtcattcattcagcaaatactcattgagggtttcgcattctagtgaatactgctgtactgactgagcattaagaacatcaaaaaggacaaagctcaggctctggcctcaagggttctgttgtcttctgacctcccacccagcttagcattatctacatcagtgttctcagttttcattttttttttcctgtgaccttctgaaataaatgcattttattttgtaaccccagtacctatatacaatatatatatataaatatatatatatatatttgaagcaaatatttcacaaaacggtgctcacacttgctgtgtacaaagtcatctgatattttctatacgattctatttcattttaaaacgctggtcatccactaaatagatttcagaagctgcagatgggtcacaaaccgaagtttgaaaaccactgaacatatcacatgaccttggtatctctggtccctgccttcagggcagcttaggaagctatgttggctggtgacaacccaggctgccagctacaagggtcagcatggaggttttttgttttgttttgttttttgttttttttaatctaactaattttgttttttcaagggaaggtctctggtcactcagtctggagtgcagtggcacaaccttggctcactgcagcctcaacctcctgggcttaagcgatcctcctgcctcagcctcccaagtagctggggctacagatgtgtgccaccatgccctgataagtttttgtatttttttgtagagatggggtctcgctgtattgcccatgctggtctcaaactcctgggctcaagcagtcctcccacctcggcctcccaaaagtgataagcctccactatctcggctcactgcaacctctgcctcccaggttcaagcaattattctgcctcatcctcccgagaagctgggattacaggcgcccgccaccatgcctggctagcctgggggtttaagaaaagtttttttggatgggagtcagagggtctggattctggtctaactccttcagtaatcagtactgtgatctgcagcaagtcgcttcaacttgctgcgacacagctatgaagtggagatgctgatgcctgttctgtgtaattcacagggtgagcaagaacatccagtataataatgtgcattaaagtgtgcagaaaaatattaagtacagagcaaatccaagttattattaaacagtcttacttttacaattaaaatttaatatcagaggaacaacttggagggaccatttgttctttgtagatctgggaaaggattcttgaacaaggctataatatgatgcaacttcataaatggaaatctcagggtaactttttttgtgatattttaagtagatttgaattgaagaaactcagccaagttatcctggtccctcttcccttaaatacttttttttttggttttattttttatttttatttttttgagatggagcctcactctattgcccaggctggagtgcagtggcatggtctcggctcactgcaacctccacctcctgggttcaagcacttctccagcctcagcctcccgagtagctgggattgcaggcgtgatttttgtatttttgtagagatggagttttgccatgttggccaggctggtctcgaactcctgaactcaggtgatccgccaacctcagcctcccaaagtgccggcattataggcgtgagccactgcgcctggccatttttctggttttaaaatcaaggaagcaactaggtggttgttgggtttttaagtcatgaacctatttgtaaaggagcgtgctttgcctgatattatctactctaacccagtagatttataaacactaatttctactgttttaagaccactttttattaaaagcaactaacagtaaataaaaccaaccactaaaagagataattttatcaagaagggtttaaaacaataaacttttagatcaaatatagtactttcctcatttatctttcacttttccttttgtaactatcctagacctcatttcacacatctcacacagacattggttagaacaaatgcttctttctttttcttttttttttttttttgagatagagtttcactcttgttgaggctggagtgcaatggcacgatctcggctcactacaacctctgcctctcaggttcaagcgattctcctgcctcagcctcctgagtagctgggattacaggcgcccaccaccacacctggctaattttccatttttagtagagacggggtttcaccatgttggccacgctggtgttgaactcctgacctcaggtgatccgcccgcctggccctcacagagtgctgggatttcaggtatgagtcaccgcgcccagccagaatgcttcattcaaggcctgctgaattcctattcggagcctaacccaccctagagctgtgccttacaggctagctctgcctgctgcattagctccctgtgtctttccatgtctgtttattgatctttcttttttgtttttgtttttgtttttgttttgagacagggtcttgctctgtctcccaggctagagtgcagtggcactatctcagctcactgcagcctcaacctcctgggctcaagcaatcttcccacctcagcttcctgagtagctaggactacagatgcttgccaccactcctagttaatttaaaaatttttttttgtagagacgaggtctcactatgctgcccaggctgctctcaaactcctggactcaagagatcctcctgcctcgggatcccaaagtgtagagattacagacatgagtcaccacacccagtctgtttgctgatctgttttaaaggaatgtctacattcaccttttctaggagtcagttctccaaatcactctacctttcactttgtaagtaacggtggggaagaataaaataacaataaaataaaataaaaacaaaactatattcactccaaagagaagaaaataattcccttttgtcctttaaagagtgaaaatattcattacacaaatcagcaatgtccaccaaaggccactgctcatcagcacttagtgtagtttccagagaaaacatctaaaatgcataaaagttaagcagtttttgtatacctagcttttagctgatttcatgactgctgtatagcttctttgtagatagtttctgcagctgtttcatgaatgttatggtatgcctgcgaattgaattgaaaaagactgagttcacacggcttttgaatcagtaagctgaagcccagaggggttaggtacattggactggaagcagaagggatggttttaaagagcagctggttgttcatcttcactaactggcaggcagcctttctggggtgtagctgcgctgcaggttgcacaaaagagtctcaacgcccctcctgctacccaggcctagccctcgcagcactaaatgggtacattcttgacaaataagaaactggggcccgatatgctgattcccacatctgtatttagatcccactcatgacacagtgtatgaccacaagcaggtcacttaatttcactggcctaagtttctccatctgttaaagacatctgttgtctgtcttataggtgaaaatgaaaggaactagctatgcaaagtatataaaccacagtgggtgcctgatcagtgtgacatttccatcttttccctttccctctgaacattcccctccccaaagacccccgaagagaaatggcatgatatcttctgccaacaaactgatagacgccagggtgaaatcagcggaattcaacttgtgattggcatgcatttattaaaacatccttctgctttcaggaaaatcagagctctttatttcagatggagttatctcgttggcttactatttaaaataagaatttgtaccactatacgttggctaactctgatgttaaaggaaacttgctgaaaactgatttttgttttggcaaaatatagaattactacttttcctggtgggcctaagccagattcagtgccaagagggaggtagggagaagtagggttttttttttttttgccagcagatgccatcaatcttgaagtattctggacaagtgaggagagcataaattaagactattgacgtcaaaatccagataaacttgaatccaaatcctagtctcatcattttatcaactatgtgcccttgagcgaattactgaatctctctgagtttctcagctgattgatctacaaaaagaggaatatacatgtaaagtggctagcacagtgcctggtgcttactcagtgctcaaggggtgggaatgggggaacgtaggtgtttcacaataattattgccatgaactgggtatgtaggagatgaatctgggggagcttctgggtaatcacaaaagcatgagtgactgtgatgagttgtattagcttctgagggctgctttgcttgtaaagtacaaagtactatgagccgggtgtcttagaacaacagacacttattgtctcacagttgtggaggctagaagtctagaatcagggtgtcagcagggccatgctccctctgaaacctgtaggggaggatccttccttgcctcctgtagcttctggtagccccagatattccttggcttaggccatcgtaactccagtgcttccataatttcatacggcattctccctatgtctcttcacagaggcttccctctgtgtgtgtctgtgtttgtgtccaaagggcaccagccacactggattagggctcatcctaatgacctcatcttgattacatctgcaaatattctgtttccaaatcaggtcacatcctgaggtactgggggttaagactttaacatatatttggaggtggagtatacaatttgacccatcatctgagtatacatacttctagattaaatgcaacgagcctgggcattacctccacattctaaaattgggcacaatctccacacattgggcacatttcttgcaacctagagaggcctattgtgaaaaatgatattgtgatattggttagctttctaagtgaatattttctcgtcacaaaagagcaaaagttccctagactcaagcgtaggcagggactttctttttaaccccactgagtgaaaggcaaccaggaagtgtgtgcatgtccattcaccccaaaggaaacagccttgcatcatagacagagccatcccaggtctacataagttcataccatggagaatatttttcctacttgctttccctttcctgtatatatgttcaaatgtctgacattaatgaaacattcagtgtgatccagggaagtatcatgagtctgtttttcctgaatctgaaggttttggggctgggagggagatcatgtaaaccaccccctactcccaggaaatggagtggctctgtgatccagctacccctgggagcctaggaaggcttaggtttcatgagcccacctcggagctacagggaaatctccatccaagatccccagataccagaggacaaaaggaacacagcaaagggaaaaactgaacatccaagagaataaatttacaacctacaacagaaggcatctgaaaaagtcaggtggactgccgcttcagtgtaatgaaccactcacctgaataaacagtacaaggtgctggaaattgtggaaacatgattattaacaaagtagaatccttcaatccttaaactgactactgtattactttcctagggctaccttaacaaagtatcatgtactctgtggcttaaaataacaggttgtccttcaataggtgaatggataaatgacttcagtggatgagtggataaataaactgtggtgcacccagacaatagaatattactcagaaccaaaaacaaatgagctcttaagccatgaaaagacatgcaggaaacgtaagtgcatattactaagtgaaagaagccagtctgaaaaggctgcatactgtaggattccaactatgtgacattctgaaataggcaacactatggagacagtaaaaagatgagtggtttctaggcactagggcaagaagagagggatgaataggcagagcacaggggatttttagggcagtgaaaatagttggtatgacactacatttgtccaagcccattgaatgtacaatggcaagagtgaaccctaatgtaaactatggactttgggtgatactgatgtgtcactgcaggttcatcagttgtaacaaatgtactacacttgtgagggatgtttataatgggagaggttatgtgtgtgtgagacggaatatatgggacatttctgtatcttcctctcaattttgccatgaatgtaaaactcctctacaaaaataaaatctttaaaaataaataaatcacaagcagggttggttccttctgagaaccgtgaggaagaatctgttccatgcctctgtcctcacttctggtggtttggcagcaagctttggcatttcttggcttgtagatgcgtcactccaatctctgccttcacatggccaagattgtctccctgtgtctcttcttagcgtctgccctctgtgcaggtctgtctgtgtctgaagccaaatgtccccttttgataaggacatcagtcatattggattagaacccaccctgataacttcatcttcactcagttagctcggtcaagtccctgtttccaaataaggccacattctagggtactgggagttaggtcgtccacatatcattttttggaggacacaactgaacacatgacaaatactgaaagatttaaaaattgtaatgtgcagtttcataatttaatccataagcaataagtgggataggctaggcatggggcctcacacctgtaatcctagcactttgggagtctgaggcaggcggatcacctgagatcaggagtttgagaccagcctggtcaacatggcgaaaccccgtctctactaaaaatacaaaaattaaccagatgtggtggtgcatgcctgtaatcccagctactcgggaggctgaggcaagagaatcactttaacccaggaggcagaggttgcagtgagccaagatcatgtcatcgcactccagcctggggtacagagcaagacaccgtctcaaaataagtaaataaataaataaataaataaaagcaataagtgggataattattgaatacatttaaaatgccagctggccatgcatggtggctcacacctgtaatcccaacactttgagaggtcgaggtgggaggattgcttgatcccaggagtttgagactagcctgggcaacatggtgaaatctcgtctctacgaaaactaaaaaaattagctgggcatggtggcacacacctgcagtcccagctactcaagaggctgcggtgggaggattgcttgagctgggaggtcgttgttctcaccactgcactctggcctgggtgacacagtgagatggtgtcttaaaataaaaataataaaaatcaataaatgaaatgccagctggctgaagtttgttggggcagggaggacagctgggtccttccctcacaggtaaaaaacctgtataaaaccattgggtctagggagcttttgcctctttgtgatcaggaagtattcgcttcttagaaagctaactaatctccctgcatcgagctctgatccatcaattctccgtgaagtctgggtattaaaccagccccaaagaagaacagaaaaggggattatcctcttccactaggacacatgccttttctggcatgggaagataaagctctctgatgataaatttccaagtacattttaatgagaaatgacatggattaagaaagagatagagaaaataagagatgaaaggcattctatttgttggacatttttagccacagttctccttgtacacccctcaaaaaagaaagagaaaagtaatcaacagggaggaacaagggaacacaaagaggagataagaattttcttctacatgtattctgcgtttctcagccttctgtggtgttactatcatcaatgaaaaggcatttaagatccttaagttagaaaaatcttttctgcccaattccccacttcttgtttggaaacaagaacatgctctgcaagacctgtaagcacagatttaatttccatcatgatgatgatgataaaattttaaaaatggtgaacattcatatagtactaactatatgccaagcactgttctaagtaccgtgcaactattagttcatttaatccttacaactccactatgacttccgtggttagctaataatgtgttacctccatttgcagatgaggaaaatgaggccagaggggttcactcacttgcccacttcctccctgcttggacgtgtgtaagactggtgcctggtttttggctccaggctggctcctggtggctcccctgctctctccagcttagcatttatgaaagttattccctgtgttttcagagttctaaccgctagtctttgagtgggtgaatctggcagcagctgtgttattacatcagatcctgcttgatgagcaaacttctcctcctggaggagcagggctggagggctggagaggaaggatctagcaagagactttgagttctataactctttcccttaaatatctagcccaggggtctaaatactgctttacaggccctaaaaagaagtcatgagtgtacctctttccccagcaggagacatggacttccgtataactagccaatcctctaactccattgttattaatctcacatgactttgtatgccaattcaaggaaaagaaactcggcataattttggacctctctatatcttttttttttttttttttttttttgagacagagttttgctcttgtctcccattctggagtgcagtggtgcgatcttggctcactgcaacctccttttcctgggttcaagtgattctcctgcctcaacctcccaagtagctgggattacaggcacccaccaccatgcctggctaatttttgtattgttagtagagacagggtttcacaatgttggccaggctggtctctaactcctgacctcaggtgatccacccacctgagactcccaaagtgctgggattacaggcatgagccaccatgcctggccggacttctctatatcttaagttctaacccctgtcctgtcaaagccagagaactgagacctggaaagaaatgaatgggctttgctgtcgtgtaaagagcccccactttggggttggccgggtgatggctaaaatgctgtgtgtataatcctgggcaagtgatttgacttctctgtgccaggtttgcacatctagattgtaaaatagagcaatcatgtctattcaatgttgttctaaggatgagatgagatgcatctgcctggcaccttgtaagtcctgcacaaatgcaaattatcactgttaagtaagcttcaccatcctgtaaaacaatctgtttgactcacttattccaagtaagattggctggacctgtacattcttctttatttaaaactatcaatgttactgttcatttttaaatagacagtggctatgatttttagtttttttagccttacaaatgagaaacctagaacttcaacaagcagtaaaattgagcaggttaggtattcctcactagcagcataaacccagcagggtgaggtgattcctagggcctcctatagtctcctagcagccctgataccctttgtttacgggtccctgggggaagttgaggacttaaagtctctctagtaggcttcagagctccttatttgagcagaactgtgacatcttggagaaagaagagaacaccaccagtcagaaaagcccacaattgtagtggtgtcccggttctgaatacaagttacctaacgcctctgagccaatttcctcaactatgaaatagaaataatagtgcccgtctcacagatactataactacgaagatcaaattagatcgcatatacatgatgaaagtgttctgtaaaaagttgccatctgtctttgcttggatggacctgagttcctgagttggctctgaaaacagcttaccacgaaacaggataggattagtgggacagccttgctgacacagatcataacagggagatgtctcattttgacttggaagttgcactgatatcatagaaaataaaaaaaccaggtttaactgttggttggtaccttgtgagaagaggaagaaggtgataagaactaagatcagagcatagtagagaaagtagccctgtaaacagaggagaagcagaaagagagaagggaggacagagcttttattttgctccaggttaaaaagaaaaaaaaaaagcacattacaactctatgttcaggtgtctgtcccaggtcctagaactggaatagaccaaccaagcccaacccttcttaaaagtaagactaggtgcttcctgattatatattcaactgcctggaagcatgcaagtaaaatttccttgatggcatttctaagtttcaaacatattcttcctaaaaatgcatttacaaaaaatattaggattgtgtttttttggtttggactttaaaaaaaaattgttttcaaaaccataattgtggcctaccccaaatggattctcctccctacagtgaggatttcatttttccagtccccccccgccttttcatttttgatgaactgcacatgttgtgggagccactcgtgggccctcagacacgagcaatccttctggccgctgccagtgtcctaataagggaatgaacaagcgcctattggtgagggaaggggagtcaggcggtggatgatatttttgctgattaaagaggataaggtgtggtttggcaggtatctcattggtttggctggctccagacctaggttttttctcttttttcagtttgaattctgtagaacagactgctaagaattgttttttcacagatctctaactgagctttaggaatatcatgctgacacagtttatctatgttgaaaaaagataggaatttggggttacatgatgttttcattaaaagaggttgaggatataggttaaaatcttctcggtcaccaggcgatgaaggtgatactggacttgatcaaatttagtcatggagagaacaagggatataccattggatatatttaacacatgtttaaaaagttttaaacatttatctatgcaacaatattaagtaacacctacttttgcttgtaaatatttatattctccaattttaaaataataaaagaaacaaaaagagcctggcacttaggatcatagtgatgagttgctcatctatttcctgtctgatcactaaatacctgccagtgactcctctctccactctattttctgaatgactcgacactgccttttaacttaactgcatctggtccacagtgttcttaagtcactcattatacgtcagtgtttctcacatgagctgcaggctggaatcatttggggagctttcaaaagttctaatgtctagatcagacctcgagcaggattctggtttaattgatttggggcatggcctgggcatcaggattcttaggcacttctccaggcaattctaatgtgcagctgaggttgaggacctcgagaagcaactgctactctgaaatgcatcctctattggatcatctggccccgtaaagggccaggcagtttttcttcctgacattttgaaacctctcaagaaaatactatatatatatatatatgaaacaagttagacaggtttcctcccaagttggtagattcagttcggttgtttaaaactcaacagtagagaattgtgctttcaaccaaaatcaacttctagacacatgggtattgtttaaactttattttccatgcatataaggagtgaagtactctgccaggtagttgaaaacagtatccatttcaaagtcataagtaatgagatgagattttttatattttctctgtgtccctgcaagttattcatcccttgatatttaatttagttaatacatgcctcttattttactttttcttataatattaagccaacttcacatcctggaattgtgaaattgctgtagcaaggataggatgatatgatcgagaagtttaaaaaaaattttcagattatcaatttttaaaagtaagaggatatggaagtgcagtgcctgcatggagagaagttttgaattttgaaagaattttggattaatcaggtgtctagaattactcattactctcagcttccttactggatatttcattaccaaggaagaaggccatttagaaattcaggagtgcaaaggctgggcgtggtggctcacgcctgtaatcctagcattttgggaggccaaggtggatggatcacctgaggtcaggagttcgagaccagcctggccaacacagtgaaaccctgtctctactaaaaatacaaaaattagctgggcatggtggcaggcacctgtaatcccacctacttgggaggctgaggcaggagaattgcctgaaccggtgaggtggaaattgcagtgagccaagatcacgccattgcactccagcctgggagcctgggtgacaagagcaaaacgcagtctcaaaaaaaaaggaacttcgtttggaagtgcagactgagctgggaatataaattagagaatcctcaccttaaaactgacagacaagttataaacatagatgatattatccaaggagcatatgttggataggagaagaaaggagttgaggaagaaacccaataaaaggtacaaaagaaactacaaaataaatttaaaaacagagaatctcaaaaagggagatgtggtcaacagtgtcagagctctctgtgggatcaagtaagattgagagcacaaagggacattggacaatttgtctcaaaggacagcttagaaagcacaagcccataacacaatgtcattttggagttagggctactaatacctggatcaaaaatattgaatatagtcaatatagtgttccgatatatttaataatgaaactgaactgttcttttgatattttgatcaactggtcaagtgattaagatgtctggaactaaaaatcactagccccgtagagatccatctcaagatgattttaggtcaactaccaagtaggttaaactaactgataaacctaactccaaaattgaatgtaaactgacaagacagcccgtgatagggtggatttaactattttgggctattaatgacttatccattgaatttcagaaccagttttggctacagcacatgaaaatatttccaaaggactgctaaatcaaacatgctcagtttacctagttgtactgagttctttttgcttcccacagacattgcaaaaggccaaaactaacactaggcttgatagtgaaaagagaaagaatataagaaatttgcaagggaagatggtgcaggaggagttatggaggtaaaaaggcatgtgctggagttgcaggaaaatatagaactgctctattcatgagccaagccaaggccaatcacatgacaataaaaaagactgatggcacatgcacacacgtacacacacacacacacacgctcttgaagcaggccaaagtccacagtctcactggaaaacaccagttgactccgtttgactttagcacctgatcattgactaggttcaaaagtcaaatacttttcctgtccataatcacttggtcttcttagtaagtaaaatatccattttccagctctgaactcaaggggattttctgcatatagttgcaacataatgccatctccagagaaagtaacatgggaatgagaagcaaagaaatgcattaaaacatttgcattctggaccaatgagcaaaatgcaccaagaacctacctaagcaaacactggcaagaaagtttgtggctagtaattgcttctgactattggcaggaaggaattgaaagaagtgcaaagtgttgggggttccatctcctgtatttttttctaaaaattcttctgtctccaagcctagcttttagtaggctgccgccgccactcctcggttggtttaatatggttttgtcatgatgatgaaactgaaacctgagaggtcatttcctttttcttttttttttttttttttttggtgaatgatcaggcttcaccttctggaactgatggtcagaaagcgagccctgcagcccatagcaacatggcagcaggtgtagccaggtattcctggttcatatccatgagccagtatgaagtgtctgcttttaaagccactcacaaaacttccaacagagtgtatgtgtgctctgtgtgtgtgcacatgctttggttttggggatgaccttctcccgcctctgttactgagagaagataaagctgtaataactttaaacaccatttttgcagtaaatactcataagcctagcatagaattgtcagcctttccctacacatggactggagtcatatttcattgatctgccttttaaggaagcactgttgttctgtatatgacactaaaacttttaagtcttggagtatttggcctttccatgttctgatttagatgaatccacatgagcttaggcagttcacctcttattcaggtataggttagcctcatgatggctattgctttgtgttttaatgccatatgcctttcttgactgcagttaactaaaaatacttattaaatccctgctttatgcaaggcactttgagaagggtgctaaaaatgtataaaacttgacttgctttcaagaaacacatgccataatatgggagataatacacaaataacagcaatagagcaatatgtgataaataactggaacaaccacagagatttcagaggcattaaagagctccttctagttgacttccatgatggaagaatgtagcatttgagctgacattgatggacagataagcggggtctcggtaaaaatggagagaaggaaagaaccacttaagtgtaatcaaagagagcaagagagtataaaatgaagttgaaagaaaaagaaagaaagctttactgatgttcgttatgctttctggcacgagcacctcccctcaatttccgaccccatgtgactggtcctgagagcatcacacaaaaatagtgccctggaaaaatggaacatgagtcccctgcacccccagaggggagaacagtggggccttcgcttggccctgtcttttcagcattctgtgactcaaggcagtttacttgactgggtaaatggatttaccagtggtaaaccttatctagtttaaacttcatgaaatagacctgtactgagaaggatttctgcagaagcttcaagcagaggtaacactaataatgcaaacccaaggcaacgctgacacttacacacggagaggacactaatgcttgtgaacgcagaccagtgcgtcctcagctcacactttacctgttcctttcagcaaggtgagtttacagcagagagggggaatctcactgcttttcagaagtaactcatgagagaacagatcttttggaaaatggcagcatttttttgtgattttgctggtgaaaaagatgtaaacatgtaacctatcaagactatcatatcttcatactccaccttggaaacattttctaatgtatttaaaaatctccccagtgaagaatttcagtaggttttgaaactatttatttaaaatgtaaaattgaaacaccttgggattactttgaactggaacaactgattgacatcaggacagacaatttttgatacaattttctaggcaaattgtatcaaaaaattgtgcatggttagtggggcagatttaagatattagtactgtgcttccacctgtcaagccaattatgtgtttctttgtatatctttggggattaaaaaaattaagcggggctgagcgtggtggctcacatctgtaatcccagcactttgggaggctgaggcgggtggatcacctgaggttgggagttcaagaccagcctgaccaacatggagaaaccccgtctctactaaaaaaatacaaaattagctgggtgtggtggcacatgcctgtaatcccagctacttgggaggctaaggcaggagaattgcttgaaccagggacgtggaggttgcagtgagccgagattatgccattgcactccagcctaggcaacaagagtgaatctccatctcaaaaaagaaaaaaaaaattaggctatgactgtcatttaaaactaaatgcctaaataaactgaacttagaaccagaccttcacattatcgattacaatgcattcagccaagatgtttcaaaaataattaaagttttatgaacattaatagattaaatttaacattactttaaatgtatctttgttttattgtcattctgtccttttaaatttctgttcattgtgttttgtaatgtctacaaacatttaaataacactacatgtaatttataaatgactatacatatacgtataaatgtatatgcatacataaatgtatatatcagtgttattggtgcatgcttaatttttaaaattgattgtagtatagtatgaaaagtcatttagaaaccattggcttagatcatggatcaccaaacttttttgtaaatggtcagatagtatatattttcaaatttgtgagccatacagtttctgtcataataattgagctctggcactgaagtgcaaaacagccatagatgatagaggtgtggttgtattcctataaaactttatttgcaaaaacagagtgggctggctttggcctgcaggtcatagtttgccaatccctggctcagatgactgaagctctttgttagtctccagggcaccctaagaaagcttcctattgtagaaagaaaacaggtataggaacttgaagacctgggtcaatcctgattttgtaattacttttatgagtcatttcacctcttagatcccaggttaccaagtataaaatataaagcttgaattcgaaataatgtcaaaattccttctagtttcattaatctatcatcttagatgctcactaccttgccacaagcagtggatttcagctgggctctgaatggaagcagaataagtgaaaatccaatttaatacgaggtgggcaaagtgagttcaaaacagtggagaaggtgacaagaataaaaaaggacagaaattccattctgaaaaatgtaaagtcacagcttatggctcttgaggggtcctccatggtgctgctgttctaaatgattgtaggacttgctcaactgaagtctcctcttgcagctaagatggatgggatccttgatatggggtagctggccctaatttcttttatttcttggggaaagctgcagagtgaaatgaaacacctggagtggagattgaaactagaaaatgtgtgctgcccttccgggactcccttccacagggccatagcctttggaaagagccttatacttcgttaaatgattggtctgctcttctcagttcttcgaagccatctttctgtatgtaccaagcacgattggcgcctcactaatgcccttcatgccttccaagccctagccagatggaattgtgtgcttttccataaccatatttcccgattctgcaaccttgctatttgagctttctgtacatggaaaggtcctctttcattcccccagctcccaatgctagccatcccaaaagagccagcttgaataccactttctttatgaagcctcctctgatcccttagctggaattgccttcttcctcctctaaactttaaatcactttaagtcttctgtaatatttaccacattctacctattatcacatccttaacaggtcttaacttccctacagattatgaactcctttcaggggttgaatttatcttggtttctgccctcactggcttgaatggagtaaatgttcaataaatatctgttgaatggatgtgctaattccagccacctgtgtgtccatttccaggttatagcagcaagcattacctaccagcatcccacaaccgcaagttcagactccaccttggtatctggcagatggttctgaacaatggtttgccacctcctcctcagaacctaggcccccatgcctcctcctcggaacctaggccttcatgcagcccccttgctgcccagagctcaccactctgatgacagttctgaattgaactgtccttgcctccaagtctaggttccacgtggatcagtcagggagaggaatgtataccagattagcaacccataagtcagtgccagtgctgtcactttgtaattcagaaatatgaactttttttttaagtcaagtcagtgatcttcaccactgaagcagttcctcctgtattaggtaacaagtttaaggaattaatgattacattggtgatctagtcagaagacagcataagccttattggttagtaaactaatctaaccaatgaattaggatggaattgccttgttgggatagaaatctgttccaggagagacaggaaccctcaagtcatttaagtgctgtagaatgtctctaatgctcatgctccctctctcagagtcctgattccctgagtcttaagctgttggtgattctaactcaatttgcacacacaaatgtgggtgcttagttatttaatattattctatctgttaaaacattcacatttttataggggtcttctattaactcaaagggagtctttaagcatagaagattctacttggtttggtttggtcaggctggctttttaccaaatcacaacaaatgggtgtttgcttttctccctccacattgagcaggccctgtgttaagcaaggtttccactgatttaggaagatgatctatcaagagcagagaagactccttgacttcttttctcaacagtagggagatgggacccatgagcagtggttgactgccaagtcccctgcaagaataaatattctcttcaatgggcaaagcatccatgatttggcccttcatttcccatttcctgtctccactcaaggtttgtctttttactttctgccacttgtacacaaagctctccaatgctagcacatggagtgggggtatgagccaactggatgttagataggtgtgtgcaggacctctggagtcaggcaggtagggttcaccccattcttgttagaatggcagtgacttcttccctagcagagctagcaacaatgccccagtgtcagatctatcatatattacagtttcctgtctgaagaagagatgaggggtacaagagggaggaacaagatgggaggcaatgccactcgagtggaaaggagccctgggaaggaggaaatgaatagtaaatctttttccaattaagaaaaatgagagtggaagcagaaaagctccagagggcacttttaggggagggaaagatcataaaaggcctgttatgaaaatctattacccataaatttccccacattaagcagagcctgtctagagaggatgctgagaattcactcagctgacacaagatatgtgacttgatttagtggcatccacatgctgtgtaccgtttccattggcatgtctgcaataccactttcccttgcagggatcccctttaattactcgcaggcttataatctccatttaaggacatcttgcttccattttccaatcgctttatgtcttttgtcagatgtttaccgatgtgatagtggtaccataatttgaagctcaaccacatgagattatggactttagtattgcatcacatgaacatttcagatttagggatgagtcgaacttctagatcactctaaatataagacttatctaaaaggagttcatattttttacatttgaagacgacagtggaaatttctctttctaggtgattgtcttcagatacgaaaataatgtgcttgtttatatacctgtggtcaaatgtcattgcatccaacttagccagtagaaatgtgagaatatccctacatcctgctctggagcaggtgtgattcagttgcatatccagatctagacctctatgcaagagaaagagctggaaaaatatagtgctgccagccatcgacacctgggtctgaactgtttcctaatgttttactttttttaaacgactaagcccaaggtttattgtccacatctacgatgcacattaaagcaaaattgtcctttaatagataatagcagtcaaagaacagctccaactcagattttacttttgattgacaacattttttaaaagcctaagttcactgaggatcatatttatttaaaaaaaatttttatttttttgagacggagttttgttcttgttgcccaggccggagtgcaatggcgtggtctcagcttactacaacctccatttcctgggttcaagagattctcctgcctcagccacttgagtacctgggattacaggtgcgcaccaccacgcccagctaactttttgtatttttagtagagacggagtttcaccatgttggccaggctggtctcgaactcctgacctcagatgatccacccaccttggcatcccaaagtgctgggattacaggcatgagccagcacaccaggcctatttaaaattcttactcattatttaagactgttataaacaaagaattctaggttggggatgaagaaaaggtaaagttcatgaaaacccaggtagtaactgggcttatcttttttagccacatttataccagttgaatcttaaataatgatggaaagagaggaaggagtttggttattttattttaattatcttcctggccacttaagcattcataactccttttcattcatttcagctaaagtttaattcaagtaactaagtcaggagcaatagatatcttctccaccatcaaccctgtctttccttacatattctttgtaaacatttataaattaaaaagtgaatgtttgtatctgagcaagcttattgatttaatagggtggggtagatggggtggtgcaaattctgtccctgtttgtggcaagatgaatagattttagtttatcttaggaaactgtcatggacttatccttccaaaatccatatttactggggttggcagatgcactatttcttttaaaaataaatgtgagaaaaatagcaactcaataaaagataaatccagtttctattcattttatttgtactgaatatcacaaaccatttctggatgttttaaaagaaaatggcaccaattgaaaaagaagttaaacatctatcccatacaaattataatctcaagaaatgtttggaaaagcttgtgcctcatctgttgttataaactacagctattgatataaacatagatgaatctcaaaaacatcatgtcaaataaaagaatcacagaatgcatgcagtattgttatgcatagtttatttaaggcaacactgaaaaatatgctgtttagggatgcataccatgctggtaatactacaaagaaaagcaagagaataattcagagatcttaaaattcaggctggtgcttatttggaggcatataaaaagagatagggatgcgattgaagaggagcacataaggatccctaacaactggtgctgtttacattgggtagtaggcacatggttgtgtgtctgattgttctttaaagtagtcatgtacatggctaggcgtagtggctcacgcctgtaacccagaactttgggaggccaaggcaggcagattgcttgagctcaggagtttgagaccagcctgggcaacatggggagaccctgtctctgcaaaaaatacaaaaattagccagatgtggtggtgcacacctgtagtcccagctactcagggggctgaggtgggtggatcacatgaatgaacccaggaggtcgaggctgcagtgagccaagattgtatgagtgcacaccagctgggttacagaggagaacttgtctcaataagtaaataaattaataatagtaataaaacaaagtagtcatgtaccatacattcatttgtaggtacaatataagtcatgataaaagtctttttagcttgaaataataaacccaaacaattagaatccatcattttaaaatgtcctgtgaatatgtgcatggattcagaaatgagcctgtacgcttggggatccgcctgccctggagcaggatcattctaaaaactgtccttttataactcagagtcagaatcagaactctcagtactccctgggtgccttctaaccatacaggacccaccagacctgatctatttgttggacaggatgttccagtcataatgatgctaagaaccagactgctatggtatgtgtagacacaagaagaggattttatgtcaccatgtactctgttctgcagcatatttcccctgttagggtctgtaattatagaaactcatccaattatgggatgtcaccattgtataaagcaaatgttgggctggtggtgacaacttgtgagtacatacataagaacactaaagcttccaagtacacagtgttttattattgagagcccaagtatggttggtatgcaaactttagtgactctcaaatatgtctatgtatggggagatggggtgggagaatggggaataaatgaagtgggaaatgctttgcttccttagtaactttcttccaagtaatatatccccttgcatgctctcaccccaggaaaaggcacaacactgatacagcaatgaaccccacaatgaaataatacagcacttttccatgaaaattttttttcttctaaaccaagagggctttctttcactctatcctgtattaataacagaccaattcactacagactacttactaataaatgtctaaacatattctgatatgaaaaatatttttattttcttgattttttttcctccataatttttaatgcttgccttttaaggaatccaaggaaaaaaattcagagttggattttatgtgaattaaatgaaaccacaacattttgcagacaccacatataaacaaaatcatatttaagagcctggaatgtttctataaacttcttttaactttcaaacatacagtaaatctgcaaggcaaatatgactcatttcagtagctcaggattttccctcctgatcacagtatggtctgagattttgctaagaatgtttgagcaatttatagagctatttggatatgtttggagaatgtgcttgtatttcatgctatgaaataaaatccctgggggttttggtacatgaaaaagaataatgaaagtatgtgtgagtcattttgcctccaaatagttgataagcatgtttctaacctacatgaggtttttaactttttaagttggatcccaaattaagacccaggttcagacaatgccattagcagaaccaataatgatgggaatcaaataaaagtaattgactaagaagtcatccttttttgaggctgtgagccccaggcattcttctttggggtgtggccttcatggggagtgtattgctgcagaaagctggggacagaatagtgttctggattgagtatctcagttaccagcctgaaatctccatcgaccaacactgccttctctcaaatgacttcttatatgaaagtggacagacagtggaatgcagaaattttagagctgatcttggggaccggtcaactgtctactggccagtaagttactatgaattcaaaaatggtgaacttcaatagcattcattctgtcagatagtgagtttatttgatctgttggaattttaggtgcagagttctttttcaaaatataggaatgtgcagaaacaattaaggaaaacagacttggaaactttgatctgaatggagtcctctttaagtcttttataactgggcttcactacaataccttgagccttttgttttctctgaggctttttctcacttaacctgtgtgtctgcatctgtgtctgcatttgtgtgtgtgcttatcaagcacagggaatattgaagaacacaaaaaagtttgaaggtgacaattcaaagtctatccactggcaatcttgtaatctctttcaatacagcaattgttctctagcggtgaagattttgaaagagattcccaaattcatgtccacaccaagtattttctgtagtctgatgaacagttgtctcatgtatgaaagactgtttttcaaataagcttatatgcactggtttataatatacagattcctttttatgcactattgaatttatagatattttataaaacactttatcaacaaataacaaaagtataagcaattgtcatgagatcttaattttttcataatgttttaaaaggatcctcattcttaagatgttagaaaccattgcaatacaagatctagaagattacatcttttctctaatcttaccagttagcagtggctatcttagtgtgtgttgatccaacttggctatttgaaatgacaaagcatgggaatgtaaattaaaacaactgctgtggtccggcatggtggtttacgcctgtaatcccagcactttgggaggccgaggcgggcggatcacctgaggtcaggagttcgagaccagtctggccaacatggtgaaactctctctttactaaaaatacaaaaattaattgggcgtggtggcaggagcctgtaatcccagctactcgggaggctgagacacaagaattacttgaaccaggaggtggaggttgcagtgagccgagattgggccactgcactccagtgagattctgtctcaaaaaacaaaacaaaacaaaacaaaacaaaactgatcttttaaattttaaatttaagtgaacacatactatttcacttctcaatatctaccctaaagaaatacttgcatcgtgcaataggggaaaaaatgaaagaacccaaaatgtctttctatagaatggttaaactgtgctatcctattacataaatgatgaaaataaaggtatgccctagtgaactgattttggcaagtcctcaaacacattattaaattttttacatggcaaaataactatattatatatcccatgtatgtaaaaaatacagcattgcaagatgcaaatccaaacttgattaactatttggttatctaggtaattactcagagtaatactgtgattatcaacataaaataagtaaatatttgtactctctatagacttaaactgttctttttcattctctctgagtctttaatgctcctaaacatgtaataaaatcagcaccctccccataaaaatgtctattatttttccctgatttaatttttaaacatggcttcctcataagagatcttgtcttgttaataaaatactattgccacaattttacttgaacctttaaggatgatgtcctatagtctcaaaccagaagataccaaaatggagaaaagacaaaatgaagggaataagagcaacattctttaaactacggggaacacggagtaaaaaaatcaaacaagacgacctatactatagttgagatgaaaataagaattttgccagtgttgcagaagttttgagaaatatttgctagggaagctggggtcgggggacactggggcaagaggaaaactcgttccttgctccagtgtcttgctacggaagcttctgcaagttcttctggctctcgtctggcatatatttagaccctggcccttccaaatgtaataacatctcattggtctcctcatttgccatgtctgcaagactttaattcatttgaactttctatctgaaaggcacaaactaaaacatggttatcttgttacttaaatacactgaggcagcaaggcctggtgttaaagacctaaaatatcttcagtgtaaaagccacagcattagaagagagctttcccattgcatatatatttttttcttatcttgtaacaccagggcccttaagcaatggttccaggaatggaagaaaagccaatcctctctactttttcatgctactcgtacaatcaaataacatcatgtggttattatggacttttaaaattcgttgcatttattcgtcagtgtgaacacacacacacaagattatttctctttctccaaaatatccaatgagccatgttgctgtcagctgacctttgctgcagaaaggtacctttctccaagtgtttgtgccaacagatgagctaaaagcagttaccaagtaacaaagtggaatactccacaataaaccctcttccaaccagcataggtgggaagttcatggattctggtcaaacaaacattttatttcatagagaagtactttatagatcatttgtggattgccagtttttttaaaaaatagatccacaataaaatgcatttgatttaaactctattaaacaaaattcaataattctcagatgattcagataaacttcaggatcccacactccttctgaatcatctgggaacatcacttggctttgttctgtagcatatggcaaacaggttaatactggcatctgctgaattttcacagaaggaacaaatggattattatgcttttattacaatccagtggttggttaggtatgatttttactagtcagcagcatttcaaatacatttaaatctggcgtgtggaaaatcagaaatgtcaacattttgtctttcactgaagcatgaagcagaccctgtgctatcgtttgatataataaggatcctgtgtacttgtctttttggacaaattctgctttgtggtgaaattagctttcatgcattactggtattaaattgacaatttgtcgatgattatcaaaagcctttaaaatgagcatactcttaaactcggaaattaaactcagaaattctaacttctgagaagttttcctaagtaaataattgaacaagtgattaaagtgagtctgtaataatgtccttagcagcattgtttataagaagatataaagttgaaaacaatcttaaatgtgcctcagtagaaaattggttagtcataatagatccatgtaatcattatgtatgtgtatacctaagtggtaatactgtgttgctattgaaattatatattgctaacatgttaaaaatagtcataaacaaggtaaattaaagaaatggtttgtgaaatgatatgtatgacataaccctattttattaaaaacaaaaatgtctgtgcatgcacaggaaaatggtagaatatatcacatactcatcatgttcaaatctgggtttgcatgattctcgggagtggcttttactttctcctttatatattttgaattgtttggttttaaaaaaaatttatgtgtgcgttgcttttaaaatccaaaagaatgaacaattcagggtacttttttttcaatttcggaagaaaaaataataaacctgtggtgttagtaggatgggaagctcaccatgagggagaggcctaaaagctaagaaatgactgtttgctttgcttgcctaacgctaatgtagggagcctcagagttgaagaattttcacccctatcaagtcatttggcatggacacaattttacctataaagtcaactgatatgttcttgaaccagcaactggacatgttatgattgaaaatgccatgaaaccattttagctctttttttgttcttaactttgtaaataattttaatatgtttctttattagtagtcataaaaagatccatagatattttgccccgtgatatcgttaggctttgtgtccctacccaaatctcatcttgaattgtactccccgtaatctccatgtgtcaagagagagaccaggtggaggtaactgaatcatgggtgcagtttcccccgtgctattctcatgacagtgagttctcacgagatctgatggttttataagggggggctcttcctccttcacttggcgcttcttcctgccacctagtgaagaaggtgccttgcttccccttcaccttctgccataattgtaagtttcctgaggcctcaccagccatgctgaactgtgaatcaattaaacctctttcctttataagttacccagtctcgggcagttctttatagcagtgtgaaacggactaatacactctagtagctgtgtatcctagaaaatgggctcccaatggagaatgattgcctataaactttaagctgtaccaagcaagaagaggtagaagagatagtggagatgatcggttgttcaggttgctccactgagaaatcaaagatgaagagaggttacatgtgatgtggcctacgtggcaaatctagttcatgtcagagctaacagccagcaatatccagccatgaagcccagtgggtaggtgaaaagagaaagatggtaagttctgaaaatagtgggaaattaaggacttaaggttatattccattaaggggacggaggagttttgcttttaggataggtgtataagttcgttcttgcactgccgtaaagaactgcccaagatgggtaatttataaagaaaagaggtttaactgactcactcatagctggggaggcctcaggaaacttacaatcatggaggaaggggaagcaggcaccttctttacaaagcagcagaagagagaagagtgagcgaaggaggaacttgccaaacacttataaaaaccttgagagaattcactcactgtcacgagcacagcatgagggaaccacccccatgatccagtcagctcccaccacattccttcctcaacacctgacacgggggattacaatgcaagatgagatttgggtggggacacaaagcctaaccctatcaatagggatgtcccatacggagttttatgcctcttgcttgtcttggaagaagaaggccccaagtaacagtcatgacctcatggctgatccagagatgtagaaaagcaaattgagacttcctgtttgattagtttaggaagcagttattaaggattgattctccctgttgcggttaaagctgtctaccaagaaataagccaaaggaacattaggccaagaatctgaagggtgaagccaaaccactgggaagggctttctacttcaactacaatgtgattgaattagaaaggaacattcgaatcctgtcatgtcacctcaaattcaacaagtctaaaattgaactcatttttcctcacgaagcggctccttaactgaactttcctaataacaggaagacactgcagtgtagaatgctttgccacaacatatctatctattatttcatttgattgtcacacacaagaaaatttaactctaaaatttaactttaaatttaactttaaaaggttaatcaaagggctgcaaattagtaagagaccaattctaaaacccaagttttctgaatcctaatctagtcatccattatcaactatatcacattgcccccccatatttgtgaaataaaccagcccattttatagaattactaagtgacattttatttgtattggcttttgaggattgcacatgagcagattttagtaaatatgaagtcagattttctcaagtagcaaagaagaaaccaaccaaccttcggaatcattaatcctgttttttatgagatacctcagtgaaaaaacattcatagcattcttattattgaagtcaaaagatgacacagatgaaataaagtactgactctaagcctaaaaatgcctaacttacaactctaacatgagcaaaccatcatcagttatattaggttaatatatggtataagtagtatggttctactgttttgttttaatttgcaaattattttggctttgcaatgatataagaattataagcctgttctagagaagtaccatgcaacattgtacctatagttaacaatatggttaacaattttaacaatttaaagtgtattgtacactttaaaatatgccaacagggtggatttcatgttaagtgttcttaccacagttttaaaaagaattattagcatgaaatgtttacatatctgggtttctattttgtagatatgtaagtaacattgtaataaaaacactgtaactctccaatacaaaaagcagcttcctacacaatgcagccccatacccatacccaacccattgacccatcaagccagcacccatcctttcttggcactctgtatctcagtacacattctaccttcaaaaacagctaagtcaaacgtgtcaaaatagctatttcctcttgagtttgagcatctgcagttgcccagccccaattctttatttggaaataagtattaggagaaacatatctagcatagtgatattgatttgtaatttcctcaaatagacattcactttagatgactacaaaagctaaatagagctcaggagctcgagaccatcctgggcaacataatgaaacaccatctcttaaaaaaaaaaatacaaaagttagctgggtgtggtggtgtgcacccatagtcccagctactcaggaggctgaggtgggacaattgcttgagcctgggaggtcaaggctgcagtgagctgtgatcacaccactgcattctggcctgggtgacagagttagactgtgtctcaaaaaaaaaaaaaaaaaaaaaaaaagctaaataatatatacacatgtgaagtcctctgtgtctcttctgccttcttcagctcatagacatctatctaaatacacacctgtgggccattgtgatgtgcccagcatgtgggtggtatgatactaaggcacattttagagcaaaagaggggggccttaaagggagctgccaccccttcaaaatgcactgactctgaagcatcctaccaattgtcagtaacaccttctctcgccagggaaaaggaactggagggaaaaacaaaatccaagcaaagaagatatcctactcccaattttaataatatttattatttaatataatatttaattttaataatatgtattatttaataatatttattataatataatatttattataattattaaataattttaataattttggcttattagcaccaaagtcccggttggtagtgtaacttgattcttttctgatcttcgtgacagtgtctacacaaataactcatgcaacatgctgtatcttttgaagtaagcattttgtttatttttggttcaatactttgggtcccttcttctaaatcttacaaggccaggcccggtggctcacgcctgtaatcccagcactttgggaggccgaggcgggcggatcatgaggtcaggagttggagaccagcctggccagcttggcaaaaccccatctctactaaaatacaaaaattagctgggcatggtggcatgtgcctgtaatcccagctgctcgggaggctgaggtaggagaatcacttgatcccaggaggtggaggtggcagtgagccgagattgtgctgctgcactccagcccgggtgacagtgcaagactgggtctcaaaaaaaaaaaaaaaaaaaaaaaaaaaactaacccacagtttccaaaggcaacttgcttttgtgcagaatgttttagtttaagttgttatttggtcattgtaaattatcttctgtagctattggattcatgtttttcaaatagttaaaagtttgaaagctagctgactaggtcgctaaacttaaggaactgaaccatccttttagacgtatgtggttcattaagcagtgaagttcagaaaagggctcagggctgttcctgccaagaggttggtgaagacacgtggcaagtggcacgctcaagaggttgtctttgtaatgttgcagaatcgcctaccagaggaatgacgatgatgaagaggaggcagcccgggaacggcgccgccgagcccgacaggaacggctgcggcagaagcaggaggaagaatccttgggacaggtgaccgaccaggtggaggtgaatgcccagaacaggtactgtcctctttgggacggggagtttctaacttgcgtcttagcctgtccgttgaatggaatttgttgagcagagcattcctttctcagcccaactcaaccctttttcaatctaactggtttaattattttgcagtcattttaggcaactaatctgattagacaggcaatctgatttagacactaggacacactattctatttctctccaccccgttcccatctcataaacataccccagttgaaggcttttatttcatttcacaatctagcatttgtttaatttaataagtatggtgtgctatatcttaaaaataagtatggtctattttttctgtttaattctttctttaaatttcaatagttttgggggaacaggtggggttttggttacacagataagttctttaatggtgatttctgatattttggtgcactcgtcacccgagcagtacacaccacgcccaatgcgcagtattttccccctcacaccctcctacctttctccccgagtccccagtgtccattatatcacttttctacctttgcatcctcatagcttagctcccacttgtaagtgagaacatttgatatttggttttccattcctgagttacttcacttcaaataatggtctccaactccatccaggttgcggtgaattccattattgtgttcctttttatggctgaatagtattccatggtgtgtgtatatatacgtgtgtgtgtgtgtgtgtgtgtgtgtatatatatatatatatatatatacaccacattttctttacccactgcttggttgatgggcatttaagctgcttccatatttttgcaattgcaaattgtgcttctataaacatgcgtgtaccagtatattttgcatataatgacttcttttcccctgggtagatacccagtagtgggactgctggatcaaatgttagttctacttttagttctttaaggaatctatactgttttctggtaggttatatctttaaataaggaaaagtatttacatttattctgtagggtgttgctatctgttttgaactgaagatatgttagtttagtagagtcctccatggctaccattaataggtaacacgtgaatttttaaagtgggcatgaattgcagatgtcttcttttttctaatatacagcctgaatcaatagtctctgatcattataatattcaacaagatacagaattccgcttaatttaatgtgattattcaaacacacttaatgagtttgctattacgtattttctcactcgggccctggttgaaatcagggaacttgagaatgcctaataggttcaacttcttcaaagagggcttttgcagcagaaataaggtcacatggttcattatgctaatggttagtatatgtcatttatattgtcatttatgtgccccaaggtctaaaaaagatgaggatatttgaggaggaaaatggagaaaataattttaatttaaaaccatggactgattataatggttacactatataagatctcacatgtggttttggttttagtttgttttgtttaattcagtctatttagaaaattctaaagggaatgggtcctggcctccttaacccaagtttgagaggctgtattagaaggtttcagaaagcagtcttgaaaatgttggccggtagcacaatattgtttaccctttccctcaataagtagcttctaattggggagtaggtatagcaaaggggaaataggtataatttctagggttcactaattgactttgactcccaatttgacctttcactaactgtatttcttcagttaaatggaaataaaaattatacctttctccaaaaaatgctgctaaacttaaactatgtaacaatacatgtaaaatgcagtgtcttacacatagtaagcactcaataaattttcactgttaccagattcttaacacgggagggcaacgtagtcattcactgccttttccattttcaagctgagagagaaataatagaaagagttttaaaaatggcattttgatgcctttcctgaatcttgttattaatgagtggtcaacaggagctttaaaaattactggtgatctgtagttttcttgcttttaaaatcttgcttttccttgtgcttctcttcggatatttggctgttattcattatttcatgctattaattgaaatcaaattctttttttttttagaaaatcatattgaggtctgagaatgtgtgatttatctctgacatattagttagccacaagaagaataagtcttcttggggctaaacaactctaactggcatttgatatctactgataattgtggtcatgatttataaataggcaaagaaatgttcaatacagtttgttggtttcttagcataagagtactttaatctggctagcactttggaattttggtgccttttaaaaattattagaattcaattgatccaaatggcccctctatagacttccccttaaattataaattttttgcatttgtagggacatttaatccttatatgtctaatttcatggaggcaatatcctgaagcaaaagtaaaggccaagaaagttttaaagctagtttttactctgccattttcattgttaaatatgaaatgtgttttttccaaaattaagtgaatttgaacgttgaaagggccaagtttggtctgaactatgaaatttgatggagtttctaaacattgcaagacaaattcttccaactctggtcacagttctggtatcacatgactggttgtttcctgcaaatagaaaccaacaccctggcttggacagtgtccagcatcctgcagtagtgagggaggtgatggacaacagtttaacttttggagattttctttcctttttaaaataaatgtcaaatttaactgccctttttccactgtagaaaagatggacaagaaaccctttattcatggaaatcttgacaaagaaggtagattgtgtatacattagttagggtaacgctggctgctataacgattagtgcccccaaattttaagtttagtgcagtaacacttaccattatgcatatttctgtctagttggtagaaccagccacctgtcttcttttctcttgtgactctcaatccctagggcttggtgctccctgatctaccaacagacagagatagagaagacagggagtgcacctctgtttgttcattgccttggttggacacttctgtttacatttcattggcagttattggtcacatggcccgcctaggtgcaaagaagggagagggtgcaaatttaatccttgagtggtgatcactccccccaactatggaaggaggagcaggaattgtaagggacacttagatgtctcttccattggggtcactggcgtgagtgtggaatctcaacactgtaatgtacattttcttcctctcaaagtaccttgggagcctccaatccagatcaggaattctagatgacttgatgacatgggagaatactacatgacatggaaggaattcacttattatttcagtttgatccttaagtttgaattccccaagaagcaagtccagaaacaacgatttgactgcaagtcgtttatttgtaaggtgatgctaggaaacactggtggaggtgtgggaaggtaagacagaaaagggaaggccaccaaataaacgttgcatgaccaagcacatcaccactgtgggtatctggagcttcactccactgggaaactctgagatccagtgtggaatacacacctcggagttatcccactcaaaaagtgaggggtgctgaggtatctaaacactcaggctatcaatttttgtttgaaaactgctcccaggggacattaataccgaaagcacttctggcatgttgagtagactccagtccccagagaaaggcttgcaaatgctgtcagctgaaagccaggcaggcgtgtactaaaatggtaacgtactggggatatgggcaagcttggcactactggcatctgctgtagtcctgggtagcacaggctgtatgaatgctgctgactgatgaatgagcaagctgtctttggtgttgttctttctgttgtacagtgtgcctgacgaggaggccaagacaaccaccacaaacactcaagtggaaggggatgatgaggccgcattcctggagcgcctggctcggcgtgaggaaagacgccaaaaacgccttcaggaggctctggagcggcagaaggagttcgacccaacaataacagatgcaagtctgtcgctcccaagcagaagaatgcaaaatgacacagcagaaaatgaaactaccgagaaggaagaaaaaagtgaaagtcgccaagaaagatacgagatagaggaaacagaaacagtcaccaagtcctaccagaagaatgattggagggatgctgaagaaaacaagaaagaagacaaggaaaaggaggaggaggaagaggagaagccaaagcgagggagcattggagaaaatcaggtagaggtgatggtggaagagaaaacaactgaaagccaggaggaaacagtggtaatgtcattaaaaaatgggcagatcagttcagaagagcctaaacaagaggaggagagggaacaaggttcagatgagatttcccatcatgaaaagatggaagaggaagacaaggaaagagctgaggcagagagggcaaggttggaagcagaagaaagagaaagaattaaagccgagcaagacaaaaagatagcagatgaacgagcaagaattgaagcagaagaaaaagcagctgcccaagaaagagaaaggagagaggcagaagagagggaaaggatgagggaggaagagaaaagggcagcagaggagaggcagaggataaaggaggaagagaaaagggcagcagaggagaggcagaggataaaggaggaagagaaaagggcagcagaggagaggcagaggataaaagaggaagagaaaagggcagcagaggagaggcaaagggccagggcagaggaggaagagaaggctaaggtagaagagcagaaacgtaacaagcagctagaagagaaaaaacatgccatgcaagagacaaagataaaaggggaaaaggtagaacagaaaatagaagggaaatgggtaaatgaaaagaaagcacaagaagataaacttcagacagctgtcctaaagaaacaggtacagtaaacattttgcaccaaatgtgtgatgcctgtgacttgtgagaaatgtaatgcacatctgatttgggactgaggccacatgcatatagctcacatgcttgatcatttggcaagctgttcattttttcaggccatagcgatacacaagcatgcagcaattgattgatggctgaatattcaatcaaccaaatttactgggacagccagtaaatttggctgtccagaagacagagagaaattaattgctctgtgcttgattgttatgaatacccaaaaaaagaattaatccaaagatgataaatgtggtggtggtgtgttggcttctgattctgtgcttgcatctaaactcgttcttttaattatctttcctctatccataggtctgcatgaggcaagaggcccataactccttacctcactcatgggtttgacgttgaattaaaaaaatgataaaagctggggtgggaaagagacatgaagaataatggtcagacatttcatcttaagaaggcaaaaacaggctgggtacagtggctcacacctgtaatcccagcactttgggaggctgaggtgggtggatcacaaggtcaggagatcgagaccatcctggccaacatggtgaaaccccatctctactaaaaatacaaaattagctgggtgtaccggcacatgtctgtaatcccagctactcaggaggctgaggcaggagaatcacttgaacctgggaggcagaggttgcaatgagctgagattgtgccactgcactccactgggcaacagggagagactccatctcaacaacaaaaacaacaacaacaacaaaaaggcaaaaacaaacccctggaaattaactggtaataaagagggggaaaggaactggttggaaactttccttaaaaaaaaaagtcaaaaccctgatttgccaacatgtagacctcagcttaatgtagacttgcagaaagccattaatttagggtagtattgatttatatttgactggtaattaagagcatacatgctgcttctttattatctgggtgacacaaattcatgtggcctgaggaagggtggaaatagtaggggggaaatgtttgtaagctttgagaaagattttttttctgtctgcaagactgcattgaaagcactgtacctaatcaccaccacaccaccaccaccactcctaaaaaaagaaaaaaagagatgctttcacattcacctttccagagcaaattctctgtcactaagcctgcattgcactgaaggtatctttaactcctgcttctgtacaagaggctcatgaacacagctaaaattgagaccatgagcaaagtgcaccaaaccacacacgaggtttgtaaacacacgaggagtgccacatcatgctagatttcagtgagcgcaatggcaggcacacgagaagatgttggggtgggaagaaaatatcccaccttgctgtttagaaccactgtgctgtgagcgctgagacggcagaagagaagccatcccacgcagcacttgcaaggcgatccgagcaccctgtcactcttgtaaactagaaagggcttcttttacttgtgtgaccttaccattcttgaaaataaaaagggagaagagaagggaactaaagtgcaagctaaaagagaaaagctccaagaagacaagcctaccttcaaaaaagaagaggtaaatatgattgaaaagtaatgatcgtaaagcaacagaaaaagcagtcagtgttccaagatatctcaggtctgatgatctcaaaattgtaacctcatatccagtgtatttcaagccatgactcacagtccactgaatagtgagatcagcttagagtgtctcaaaattaattaaatgtatcagtcagcattttttaaaaaatgaaatggatagaagccatcagagggcattgtaggtagtaagtattgcattgtcaggtaaattgtctttttttctgtgggacgtcatcaaaaaggcttgaaaaacactgctggaatcaatttatcctgttttctattcttctgaatgctaattttttttccttgagccattctactttcatttcaatcatgaaatatttccaactggccttgattaatgctttaacttttcaaaggaaaaacacccacacacatctcagtagaaaatatggtgaactgaagatgatatttggttttcaaaagaaaagtttggccaaatgttctgcattgcatttctgaggcacacacaggagcgggtgccagggtatttgactgtaggtaagtgaacaaggagctatacagatagaatggcacggggtttgacagtaatcagaacaccacatcagaacacttgattgcacttcaactctcatgctgtgtttgccccaaataatcttaaaaattgtgactatatcgaataagttcacaatacttattaggatgtggtgaaactgaattatttgaagtaggaagacccgaagttcttcgcctatgagactggtgaagtgatttgtagccaacatgctccaacccatctattaagaaaactatggcatctattaagaaaattcaaaatcttaaacagagaaatccatatttagaaaacatggccagattaaatagggggtgggttattttcttaaatacgttttgtcaatttcacgtgaaaaatgaaaacccctagttcatgttacatattacatttctgttaagatgtatgttcctctgtttctaatagaagttgtggtggtttggaagtgaaaattgaatgtgagcacaggccatgtaaaggaaggagaaagtgtaaatgttaataacaggaaaactgaatttagctctcatgaggcagtcaaggaaatcattcattgaacatgttgggaaatacttttcatttggtgaccaaatacctacaaattcatttacaaaaaagaaaaatgaaagttacctcagaactaaactcagaaatatgtcccacatgggttcttgtaatgtttcttggtgaatgtctttatagaaagaagtgggcatgaaatgatgactcagtaattaaacacatgggggaagggaggctgtagaaaacactggattctatatttaaaatttcattcagttcactaatttgtttttactgaccaaagctttctatacctatgtagagtgtctgagaactagaagggcccatcagttgccactcggatgatccttttgtctcttttcagataaggccccagttcaacagcgtcctctgtgtcaatcagatactcccaggaatgagtgagccctgccgttttcccaagttgcccctcagcacattccagccagttccaaaacttttggcttgtttttgacacaaggccagataagctactcaaactggtttttttaaaaaaagaaaacaaccccaatctatattccttttttaatactgtgtacataacctgctgctcgaaagactaggttttcccctttccagctagttgtgttgtttctttatgtagacagctttaaatcatgtttacatgattcagccattttaaacaacctcttcctatttttttttcctttttgtacaaaaaaaaaaaaaagaagaagaaagaaagcaactaactaaaacctttcctttcaaggatttatgcagcataggatagggcaaccacaagtaaacacaaacatcacgtgagccttcttaaagaaaacatttccagaaatcactccaatgtcttaaaaaacacacaaaataaaacctttctccactgcagtttaactgtggcaatgagttgcagacgatcaccaacactgaaacttaatttagcttttttctctcctctccaatcataaaaagtctctttttggttcttcatgcaggagctattttctttcttttctggcctctaacaggaaaacagagtttctagccgagctgctcctgaggtattaaaagtgatgttcgtgtcatgcggatcaatcctgcccaaacattagtgtgcatgcaaatcacctggcagtcttattaaatgcagaatctgattccatgaggtccatgttgtccgtggaccaaacttgcagtagtagcgaggagtctagaagacgtccatgttatagaaattgaacccaggaaaggatttggggcttatgaagctaacaaaagcacgtaaaacccagcctgagaaacagtagctacacccagctcttgttgctattctggaaccaaataatgcaaaatatgctcgagacacatctcagttcttgcttgcttgactttctgagtgtctctctggcacaagggcctgtcatttgaattcccatcccccacctcatccccatgtattattccactggatatcccaaatatctagagtttcaaaacccaaatgatcccatttggccagagccttttttatgagtatgctaatgttatctgtgtatgaagcacacaaactttttcaggatacccggctatctattaatccttcagcacggacgttctccatggtaacagtctgacctataagatctaatgcctttcccagggggctcagaatcccatgagtttgggttaaatctgccataacatctaaaaaaaaatgtaaaggctctacggaattactttatttattcatttcccagaaagagaaaataattttcagttgaactcaaatcgtcattattacattgacaaggtttctaaggttttccaaaaagaatataagcctgccatccactatagcctttgccaataaaggcagagcttgaaaaaaggggggattttttttctgttagacatgtatcatcttacaaatctattttaaacacttttgggaccagtaaatcagatataatacatttggggagaatggaaatttttctgactgcaacataggataaatgagttaaagggaatgtctccatgcgtagtgctccacagaccgtgagctcctactcggaatttatttcatggttatccctaaaatgggtttccctcacatttggagccacagatgcttcttaactagaacataaactccagtccatggtttctggggctaagtctaacaacaataggccaaaatgagaatatattttgtttcctccttcctgtccagtgaatactgatatattcttgggcaaggacagccatcagggagccacagtgaagctgtcattcaggctatgagcttgctccttttttctgtagcctctcatgacccatgaggacccaagagggaaatgacaggatgaaaaattcggaaggaatcatctggtccaaccgcattttttcacgtacttgggaccagcatcccagagcagtcaagtgatttgtccaagtaacacaactagtttgttgtcagcactggagccaaaagtcaggtttcctgatttacagacaaagctcttgcagagaatggcaaagtacagcccccattttcagtgtgtccgagggacatcctaggtatataccccatggtgaaagattgaagtcttaactaattagggcagcatagaagtgaatccctagtaattaatcagataatacccaaagaagacaatcaaatgacttaaaacttatcaataaagagcaaaaaactgtgctctgctttgtaaaacatgcactttaggccaggtgcagtggctcacacctgtaatcccagcactttgggaggccgaggtgggcagatcacttgaggtcaggagtttgagaccagcctggccaacaaggtgaaacccattctctactaaaaaatacaaaaattatctgggtgtggtgttgcatgcctgtaatcccagctactcaggatgctaaggcgggagaatcccttgaacccgggaggtggaagctgcagtgagctgagatcgcaccactgcactccagcctgggcaacagagcaagactctgtctcttaaaaaaaaaaatgcactttaggagtaaatcttcacagagtatctgaagaataggtgagaagaggtgagtgatcaggtcaggatagaacctcctaggccacaacacctaaagtcctgagttcttatggcctacctttcctctggatttctttagaatgctcatggtttgtaactgtcttgaaaagaaccatcgtgaatgcacctcacctgttttcacactcatcttttaagaatggatgagatgatataagtgaagtgatttgaattcctttaccccctcccccacaaaaagctatgtaaattcagtatacttttaaataatctgtctcacttactgaaagaaacacaaaacgcacaaaatatgaaagctaacacctgccctccatatatcatcttcctatgtctcccaccacaaccacaaaactacttccagagaactaaatttttattgacaatggaaatcaaggtaaaccctggaatttttcctattccattctaactttaatggtttagatgactacagacatgttctcacagaccccacatatctttggatcctcctactaaaggtagggttagtaaatgtcccatccttgggacataatttactcagttgattaaaatactggtcttcgccagagttggtttggcagatctagctaaactgataggtttccttttctttctttcccatttgtgtctctctcacagattctctcaccatccaggaagaaacctgtctaagcaacgtggtcattcttccatcaaagccatcctaataattgctcttcccagtgggaactgcaaacagctacttttacatgaagttcccagaacttagtggtttccaaacaatagtactaccactgctcttgaaaataaaaacctcagtgagatcagggatgatcttaccttcttaaaattgtggtaaaggtgtttgttcacaggctaaaggaccatagctcattctctaagaatttcacctgattccaactctaccacatctgagtggtttctttctgagttttctgccttcctaacaattttgggtcttacttgatgataccaaccaaaacctaataagatttttcttgttctgtttcttcctgatatgtactgttggttagatcaaagatgaaaagattaaaaaggacaaagaacccaaagaagaagttaagagcttcatggatcgaaagaagggatttacagaagttaagtcgcagaatggagaattcatgacccacaaacttaaacatactgagaatactttcaggtaagaagtagcaactagttaatagaaactgtgttcacatgcaaagaaaaaaaaaaaaaagtcagtcttcccatcctgtgcttccagacagaaacgtgctaagcaggcagcatgcttttgttgtgaggtcattagccattgtcttagagatactcagtcagcaggtccagttcttatatcactaacagaagaccagcagtcatcgctcagacagggcttagtctgcttttcccattattttgaaaggcagatcatgcttggcatccatgtttttgttcactgaccttttgtgagattagtgtattagaaaacattataactgggattcatgtcattcaatgattctctatatggtctgaccaccttcctaagagacctttctcagtaccattttcaagaatgcattttctaaaggttgtaaataaatattgcataagactaagattgttttgtggcgaaatacttgggaaacactggattaagctaaattcctcagatttctttaccacatgactttgagagcccttcatgttcattttcattggaagtctctaagagggagtgagaggtatggacctactgctctattttatacagtttggaaaaactctcttgtatagcttgagctttcccctcaacataatcccttaccccatcaaactgaaaatctgggcaactgattatcagacagacgagaccagtatattcaggtaaatcctcatttctaaatacagtcgaatcctgagagctctctaccaattttgtagaagaacttgaggtgcagacactgggctggctacgtgattcctgtgctccttccccacaaaacactctctccaaccactggggccaaattccaacctctgttttgtcactggttgctgtgccagatgtgccggagaggagtcttgggtccctgcaatgtggatttccccgggcttgttccttggctgcaggcttgcctagtgaccctgtttttctgaacacttcaaataagaaagtcatcaagcaggtttgagggagaaatctgacatgctcctcacaccaaagcctttgtaatattcaaaagcaggcggagctactagggatggatatttcagtctcatccaagaggctaagatggataaatacggttgccccaaaacaatttttttgtacgtaaatttaagcagaaacctattcatatttatccaaaggagaacctaaagctcacagaagaaaaggtgtacataaaagatctaaataaaatgatgaaggtgtaagaaaggtagaatctatagatattacttgggattgccaagagaatagatgtgaaaattaagtttattgaacattcatagaaaatctacaaagcgagttgattcaggttggtaagttgagtctaaaacttgctgaagtgtctgtagtttaatgttttaaagccctagaatagtgttaggttcatgaaaagtgttcaatgaatattacctaatattactattttttaatagtttaaaagatgtcttgtaaacataaggttcttttaaggtataagttttttgttaagagaaataacgtttaagaaaatctgtcagtagaaaaaagtctgtttaacaattagcaaacttgccaacaagcttcaaagctcaaattaataattaacatgcctattgtgtagaaatccaaaaagctgggtaattcgaagaaaggaatagtcacaagagatggtgacaagttaagtgctaagaacacttacgtgtgactctggccttaatttttctattttgggcaggaaaaaaaaatacaggaacaagctgctaccatattatttatttttgtttagccaccaacgtatgtgagttttagtttcaattagaagttcacgctgattgaagtagagaagtatagttttgctccatatacatataaaatgaggagagaggaagagagtatccgcctagcctctatttaggtaagtttagtacctaccagcttcactgaaaacaagctgtgttcttaatggtcaaaggcctgatactcatcttgacttacacctaaggaagccaaggacgggggtagggtggtgggggtggggtgcggggagaaagaactttatggaacgatttccacattaagtggcaccctaatgctgaggtcatgcacataggcagaggtggtgtgaacaaaacttttgctcctgttttgagcatagctgcttatgtgtgatttaattactgttccctttgatatctgcattttcttgtaactcgttttctctaaaacatgacataaaaatctcaattcaatgagcaagatatagcgatgcaaattataccaagggttttatagaaagtgcaaaatggttttttgattttttatttttgaaggtagaaattaaaagattttttccgattatagaaaaaaatactcattataaaaacgctcagaaaatagaagaataaaaataagcacccaccacccaaagataactagcagtaacactttttccagatatttatctatgtatataatattcaagataaatgcacacacgtgtgtatatttatatgtagtatatacgtgtgtgagtatacttataattttacattgattcttgcactgtgcataagaatgtgtcatagcttgctttctatgccaataaatataagcctataattaatgatattagattctactggatggatgtattaggacttatttagccagtccctaatgacggacattttgattgtccaaaatgaagactgagtgacacctagtggaatccatagatgtttctataggcatgtgttttgccggtccagttcctgtacagtaatatgatgaacacaaagagagagcaaactcatttttggaaggaaagaccctaaattgactgagagaggagtcacaggcctgtgaacctagaagaccctgaaagagcctttgacagcaaggttttgagggaccctttaaccttgtttgagttcaaaataaaagtttacctgtaactggcatgagcctagaccaatagttctaaattttttaacctaagcccttagtaagaaataaattttacataatgacccagtacacacctgtatatatttttataactgaaacaagtgtgtcaagaaatggtactttgttttgctctatgcagtgcactctgatattttctgttttttttttttttaaatgttgattacaatctactaaattgattttctggtctgcagcttgaaaattattgttctggaggacacaggatattcagaactacttcagtgtttaaaaagcatgatatataatatacatatatatattataaaatcaatattgcacagtgtatttcttgagcccatttcttgttttattcttcctcttgtttcacagctagaaacactgtaccattctttacatgtagtaaatgatgttagggtgtgataattcctttgttccttagacaaaagtgtcaggaataggatatctacgttgacatctagttaagaatgaccttactacttgctaataagtatttaaatggcaaagctgtatctctgtctcttaaagactacttataacaagggcttcaagcctaaattaagccactaaattctgcttagtgaagtcccaggcaaatccaacttaggtgaactctgtgttagtgaaaactctgcattctactgaagttctactttgagtatcgacatgttttaaaattatcagtgttctaactgtatcatacagtaaatttattaaagaaactcaggggtcacagtaggtgctaatgatatgtcttcatctttttatagttgtgtaaaatactaaaaataccagttccaaaataaaattttaccataaggactcttgggatagcattctgtctgaagtcttaatatgttcccaattctgcaatgaaatccctgtgtatcctccttaatcacaaaagaaaattcaacataatttcaattttagttcttacttacataaaaacgtacccatttcttcctgttttataagctgttctacctgatgaagcttctgcttcatctcaggcacggaaggtagctagacctagactgtagaaactctagagacagaggtaggaaacgcttctctcagactctatcctgaaggtttgaggtaagaggtggagagatggaataacatgttctatttcagtttattcattgtttcataacaaaacgtatttaatttcaggtataattatagttacaagaagagtacaactaatagataagcattagaatctgatcatggctcgactgctttctagcttccaaaagtttgagtatattattctctgtcttacctgtggtttccttgtttgtaagatggggataataaacctaacctgacatcttcccagttattgtgactgttaaatgaagtagtggatatgaaaagggtttagagagcataaagaatgacatgtaagtaataaccttaaccacatcataccaagctaatttcataattttaagtctgtataaggagtattccagttgtattggggtcaaagagcatagaaaattcacaaattgaagccataggttaatgcagtcattaaggactttcctggagcagctctgtaagaatagacataaatcactgtgtttagctcttaatcaagaggcaatgggtaatttcgtctgccagagatcagctgctagagtcaagctcaaggcacagttgtggacagatggatttacttcaatgcctacccttagttacagccactttttcccattcccagcgcctgaacctttctgtcttccctcctgatccattactccaggcagacccaagttaaccagtaacttacgggaaaggactagtaaggccactacaagacttttgaactcattcacaagtaaccttttggactacatgcctccctttctaataacaactaatatttatactgtagatgatatagaaattatagtatatcagtatgatatcagtatgatatcatactgatataatacataagcccatgcaacccactgaggtaaatagaataaatagtatttacccatttttccatgttgtagcatgtatcttcttaaaaattgtggtaaaaacaaacatcacctaaaatttaccatcttaagcatttttaaaagtacagttaagtagtgtgaggcatattcatattgttgtgcaacagatctccaaaactcttttcatcttgcaagactgaaagactacacccattaaacagcaactctttatttcctgctaccgcccaccctctgcctctggtaactacagttctatttctgtctctatgaatttgactactttagatccctcatataagtggaatcacacaatatttgtatgatttccgtgattggcttatttcacttagcatagtatcttcaaggtttatccatgttgtaacaggtaacaagatctccttccttttttttttttttctctttttttcttacagacagagtctcgctttgttgcccaggctggagtgcagtggcacaatctcggctcactgcaacccctgcctcctgggctcaagcaattctcctgcctcagcctccagagtagctgggaccacaggcacacgccgccacgcccggctaatttttttttttttgtattttagtagagacagggtttcactgtgttgcccaggctgtcttaaactcctgagctcaggcaatccgcccgcctcggcctcccaaagtgctaggattacaggcgtgagccactgcacccggcctctccttcctttttaaggctgaataatattccatggtatggctagaccaccttttatttatccattcctgctatgatggacacttgggttgcgtccatctcttggtccttgtaaataatgctgctatgaacacgggtatacaaatgtctcttcaagaccttgctttccattcttttagaagtgtatcagaagtgggattgctggatcacgtggtagttctcttgttgattttttgaggaacctccatactgtttccatagcagctgcacaactttacaatcccattttacagtgcatatttgtcccattttacagctgaggaaacgaagcacaagtggaagagcagaggctcctggactctgtgattccgggcagaccccttccccagcctaccccctgggctaatgagaggcagtgggtatttagtcggggatgcagaagccgcagaccgacctccccttcctccagggagactacaggcaaaagcatgtaaacccctttccattgccccccaaccacagccgccctggagggagggccagcgtggacaccaaggaggctgagggcgccccccaggtggaagccggcaaaaggctggaggagcttcgtcgtcgtcgcggggagaccgagagcgaagagttcgagaagctcaaacagaagcagcaggaggcggctttggagctggaggaactcaagaaaaagagggaggagagaaggaaggtcctggaggaggaagagcagaggaggaagcaggaggaagccgatcgaaaactcagagaggaggtaaggcgggcgctagcccactgagaacgttgcccgggaaaattccctagtgccgtgcggctgttcttttgagcatgggctctcaaaaatatttttttaagaataataaacttaccatgtgctaggtactgttttataacttgtagatgtattaatttgtccactgcttctaagaactcgctgacctaggtactaatccccattttacagatgagaaaactgaggcacagagaggttttgtttttgtttttgtttttgtttgtaactttcccaaggtctcccttgagtctgcctgacatgcaggaggagccccatcattaaaaccctttactgcctctcaaaaaggaaaagttagaaagctgaaaaggatgaaaggtctgcaaattagttaccagaatgaagttatggttttctaatagttggagagtttttatagagaagatttttttaaatctttttttttttttaatgagcaagtaagtacattagaatataaagaggcagggacagtatctgcgttgttcattactgtatacccaggaccccataccgtgcctgacatgcaggaagagccccatcattataaacagatggatttgtttcatcttttaagacagagctaaaaacagcagatagagttacaaggaggaacattttggctcagcatatgaaataatgtttaaccaactacaacttacagtactacagtttacaaagtgcattctttcatttcatcctgaggtacatcgttctcattttatgggcaaagaaaccaggaatcaaatagtttgagtgacttatttgaagattcttgactaataaatggtagaatcagtaaggagaccccgcttttccaactcagagcccagagcttttgagatagcgatctcccatcattcaaaatatgaagaaaaaaaaagactttcaatggcattttgacaaggatcctatgcaaaattttcctgaactgtatggaaaatttggatacattattttgaggtctcttttaactccaactttcaatgagccaatgacctttggttgggaagtatgggaagtaatcaggatgatagagtttgggggttaaacacaccccaggcttttttttttttattgtttttttagacatagtcttgctctgtcacccaggctggagtgcaggaatgcagtggtgcaatctcggaacacacccagtcttctatcctaactctgtcactaacaagctggggccttgggaaaactggactactctgtgtcttcttttccttatctgtgaaataatatctactttgcaggattcttccaataatttaatagatcattgtgctcccagtgcctggcacattctaggcactcaaaaattagtaggtatcattattgccatcattgttattatgattattattcagaggaggagagtatcaggaaaggctgaagagaaatcacgaagtcttagaactggattggacctaggagattatttgggctaaactaccaaacacaggatccttctgtgacatcctctgacagatgaacatctagtctctgcttgagaacatgcagtgataatgatctcacagcttaagaactaccaaagactgcattaaatctctcagaaaatcaagttgtgcaacttgatcagagccctgatagagaagacagagtattctagactaggaatgaagacacagaggggttaatgagacagtctgtaaacatttgcaattgcactaccatggttcaacgtctagagcatttcaggtttgtcaaaccatctaaaattatatattcacttgaagcggggagcaaccataaaatcacctcttgtaccatctggcaaatatagtaccacagatttagatagcttttcacataagttattcatttgtcttcacaactctcctaggatgtaggtagaaggaatattcatatcccttttacatatacagaagtgtgaggtcattgttaatgacccacaggatggtggtgattatgtatcatcctatgggaaatcatcataatgagtgttagtctaagccaggggtgtccaatcttttggcttccctgggtcacattggaagaagaattgccttgggccacacataaaatacactaacactaatgatcgctgatgagccaaaaaaaaaaaaaatcacaaaaaggtctcataatgttttaagaaagtttacgaatttgtgttaggctacattcaaagccatcctgggcatgatgtggcccctgggccatgggttggacaagtttggtgtaagcattttacatgtgctatctcactgagccctcacgaaagccctaaaaaatgagtactattgttatccctgttttacagatgaagaaactgagccacagagcagataaataacatggccaaggtcaggcagttggaaagtagcagcaccagaatgcaaatgcaggcagctcgactccagctctcaggctaaacctctggtgaccacctagaaggggagtgtccagcctgcggcctgagtctgctgcctctccaactgtgctctctctcctacagcactcttccctttggctgtgaagctggtactgatgcctcgttatttgttctttctctcttaggaagagaagaggaggctaaaggaagagattgaaaggcgaagagcagaagctgctgagaaacgccagaagatgccagaagatggcttgtcagatgacaagaaaccattcaagtgtttcactcctaaaggttcatctctcaaggtatttttttccccagaaaacttctattagaatatgatagagactggattttagccccttgtttagttattgattatacagggcctttgttcatttatctttttgctatccttccaagttaatctgttcaggctgctataacaaaatactttagactggggccaggcacggtggctcatgcctgtaatcccagcactttgggaggcagatgtgggcagatcacctgaggtcaggagttcgagaccagcctggccaccgtggtgaaaccccatctctaccaaaaattcaaaaactagccggacgtggtggcacacacctgtaataatctcagctacttgggaggcttaggcaggagaatcacttgaacccaggaggcagaggttgcagtgagctaagataatgccactgcactctagcctgggcaacagagcaagattccatctcaaaatttatcactcacagttttggaggctggaaagtcaaagatcaaggtgccagcagatgtggtgtctagtgagggcctattcctcataggtggcaccttctccctgtgtccttacatggtggaaggagaaagggagaaaacaggcttccttaggcctcttttataagggcactagtcccattcacaagggcctcaccctcatcacctagttaccacccaaaggtctcacctcttaataccaacacatcaaggactcagtttcaacatataaatgttggaccatagcacctcctttcagctgtttcacagcttctctttgtttacaacatatggaaaggagggacagtagtgaaatttttatctgttgtttattagatgctttggcatacattaaaatgacattcggtgattatctctcaattttactgatccacattctccatgtgcctcattcctttgagcaactgagaatagagacatctaaaatttataaaataggaaagtatattttaaaagtttaagctgcttttcatgctagctgttcattttttctttgtcatgattaaaagccagctggaaatggtacaggtgcaaattttaaagcaattattatgggaggaggtgaaatgtgacttggaaagggtccttttccaggatggctttggtcctatgacagccttcatggagcacagctcctatttgatgtaaaacagagtgctgccaagagaacagaaaaggagcaggaatcagctgagtcagggagatgatagaatagttgagatgtagggaaaacacagtggactcaagaaagtagcatccttgatttataatcagtccaccattattgccagtggcagtttctttgagaattaacatcattgagcatctagcacagtgccttacatcatattgaagatacttaataaaaatttgttaaatgatgaataaaggaatgaatcttcagagattgggacttttaacatttcattttccatcaacctagctaggttataaagcatcaacaatggacaaagccatgagagaattatacccaggtctggccgggcacagtggctcacacctgtgatcccagcattttgggaggccgaggtggatggatcacctgaggtcaggagttctagaccttcctggccaatctggtgaaaccccatccctactaaaaatacaaaaattagccaggtgtgatggcgcacacctgtaatcccaggtatttgggaggctgaggcaggagaaccacttgaacttgggaggcagaggttacagtgagccgagatcgtgccactgcactccagcctgtgtgacagaatgagaccctatcccaaaaaaaagaaaaaaagaatcatagcgaggtctggatggttaattatgtacatatgtgtacggttatatcaagtggcacaccaaaatgaccaaaaactgcttacattttacagttattacttgttccacatgaaaatcagaattttttaatccccaaataacttcccttagtctttttttttttttttgagatagagtctcgctgtgttgcccaggctggagtgcagtggcaccatcttggctcactgcaacttccgcctcccaggttcaagcgattcttctgcctcagcctctcgagtagctgggactacaggtgcacgccaccatgcccagctaatttttgtatttttagtagagacagggtttcaccatattggccaggctggtctcgaactcctcacctcatgatccgcccaccttggtctcccaaagtgctgggattacacgcatgagccaccatgcccggctcacttagtctttatgatggtctaggtcccagtcatatttctgatacctcccaaataaattatttgtacttgaacccttgtctcaaggtctgcttcagggaaaatttaaactaagccacagagggattatacatttaatatctgattatttatgaaatacttaatgcatgctatgtcctatgagggaaagaacaaagcaaggtggctgccctgatggctctaatgactgcctcaaagaaacaattcaagaattacaaaagtgagcagagcaaaatgagtagagaaaggccttgtggagtaggcaagctttatttataaactctgaaatttgaattttatgtaattttattgtgcttttctaatgtcatgaaatattattcttcttttgatttttttttaaccgtttaacagtgtgaaaaccattctcaaggccaggtgcggtggctcacacctgtaatgccagcacgttgggaggctgaggcaggtgtatcacctgaggtcaggagtttgaaaccaacctggccaacatggtgaaacctcgtctctactaaaaatacaaaaattagccaggcaaagtggcaggtgcctgtaatccctactcaggagcctgagacaggagaatcacttgaacctgggaggcagaggttagctgggcgcagtggcgcatgcctgtaatcccagctacttgagaggctgaggcagaagaactgcttgaacctgggaggcagcaacaaaagcaaaactccgtctcaaaaaaaaaaaaagaaaagaaaaagaaaaccatgttctctctttctaccttctttaaaatcccacccaagccttccttgaacagtcttggtaacatgaagaaaatagtagtcatctagacttccaaattctactgtggttttttttttttgtttttttttttcaggagaaactacaacctaccctaccctcctctaattatttcttctctaccaaatttctcaacgtacctatttctctggtctttccctcagccagatgctggcttcccatttcatctagtacccccaggaagccatttatctactccctctgatggagaggcatttgtctgcaattgattaaagtagatgtataaaaaaggtctaggttattttaaatttctatgtaagagagacacatattcaggggcagacagtctatgcttccctccatgtatgtgccttgaagaacttgctgtgactctgattttcaagctcaatttcatattctacaatgtaattgggatagctattgatacccttggccctgcaacttttataagtggtcacaagttagcattgtagaataccaatgggaggaaaaatatttgctatttgacatcaaaatactaccaactactgtatttttaaaaaatatctcatgatttctattccttgtttgggaaagtctgtacctagtttttcatcattaaattatgttagcagtgactgattttcatatgcaataaagaatagattttaagtaaattaaattcaaagattttttaatttctattgcctttattggttggggcagggtgtggagtaacgagagcaccaattttctaaaacgaatggtgtgcttttattccaagttttatcgagacaatactgccacctcttggtcttcagaagaaccaatttcccttgttaaattccttaaacagaacatttaatatacaaattcagtacaaattgtttagagccactaagttaggatattttctagcaggagtgcatcagtaaacggacagtgcatcctgacaaaatgtgcgaaatgcaatgatgaagtcaggctatgttagctatgatagaagcaaaaggaggagtaggaatctgagaatctcggtgatttgaataaatgccatggccaaggttagaaagatgatccctgagtcataaagatgctgcaggtgggacaaagaacagttctcacctccgctatccccttctgcagtgcctctatcctcccaccacactgaatttttctttatccccagtctcaccacgctgcgtgccttgtggctctccaaatctttgtacatgtgcttgctttgccagaaatgccctttcctggctaagccatgcacttccttcctcactttcataaactcatttctgaaaccatgtaaaccagaaactactaatctcagctcaaatatcaacactactgaaaagccttctccacctcccccagatagttacttcttatacacacagcatttttttctttaatattgtacctactgttaatttttaaatattttattttatatactttactagtcttccctactaaattctgtgttccttaaagaataagaccttgtcagtcaggcacagtggttcacacctgtaatcccagcactttgggagtccaaggtgggcgaatcatgaggtcaagagatcgaggccatcctggccaacatggtgaaatcccatctctactgaaaatacaaaaattagctgggcatggtggcgcgcatctgtagtcccagctactcgacgctgaggcagaagaatcacttgaacccgggaggtggagattgcagtgagccgagattccaccactgcactccatcctggcaacagagtgagactctgtctcaaaaaagaaaaagaaaaagaccttgtctatcttagcttgcttaggttgccataacaaaataccatagactggatggattaaacaatagaaatgtatttctcacagtcctggaggctggaagtccaaaatcaaggtgcaagcagattcagtttctggtgagagccctcttcatggcttgcagatggctgccttcttactgtgtcttcacatggaggaaagagagcaagtgagctctctagtgtgtcttcctgtagggataacaatcctgtaggatcagggttccaccgctctgatctcatttaaccttaattacttccttagaggccccatttccaagtacaatcacattgggggttagggcctcaacacatgcattttagggggacacagttcgatcaatagcactattttatttattagtattcaattttatatagaaggtactgagtatattatttattggctaattgtttggctgacaggctggcagggataaaaataggatagatggatggatagatggatggatggatggacggacggacggatgggtaatatttattaaaagtgccagtgcattgcatagttctaaactgtttcaccttactcacctgggaattttttctacagaaatatacttctaagtttataattaaaatcagaaaaataagagttactttacagatgttttatatatcccataaagtcagcactacttatagtacttttttgcatagttttttaagtaagagtttgcttttgtctttgtaggaaatcatcagaaagaatgaaatgctcttactagtatctataaaactgttattcaactgatattagagaggaagcatgttttcaaaaaaaaaaaactctgtggtatttattaattgctcatgaatcccagaccagtctgggtcagaaagaacccctcacatcttggagaattgtgtgtatcccctcaaaattcatatgttgaaatcctaatctgcaatatgatggtattaggaggtgggatctttggaagacaattaggtcatgagggtggaggcccccttaatgggattagtgcccttgtaagaagagacacagaaccttatttgctccctctctattctgcactatatgaggacacagcaggaaggtggccatctgcaaaccatgaagagaggtctcaccagaccccaaccatgctggcaacctaatcttagacttcccagtctccggaactgtgagaaatgtttgttgttttaaggcacccagtctatggtaatttctcacattaaccaagactcactgagacaaggggccactcaaacatactagcctagggcaactaaaatccagtagatttcttgactgtcctgaacagggaagaaaatggaacttttcagcgtgcatgtgctttggcacatgcagtcataagcaaagaaggtatttgctcatggtattgataggtgatgggtggtagaggatatttctagcctggagttgggtgtggcatggattcaacaaatatttgcttattgctaacatctaaatttaagtgttacagtttcagtaaaatataatgtttgatttagcagcttcagttgtagcaaaaaagttcctagctttaaaaaaaaaagaactcatcaaagactactaactgctgattttttctatgtccaaccctgtttctctgggctcatttcctcatttcacacttgggctaagaggggcttcatgggaagcctcagccattacagatgagctgtgccccatcctcattctacctgtatcccgccttttacgttccaaggctaattaagttcagcaataggcttgatcattgacccttgtcaagttaggaaatcaggttaagcaataagggactagttcacatttcctagttattcaatcctgttacataccaaatacatagttaaaacattatgggaaaattttgttactcgaatagcatggtatgtctctagtaaatacatcctaaagggtaacagtgtgtgtttttgaaaaaattatttgtttgttgttgttgcattttgtttgtttgttttgagacagatgctcactctgtcacccaggctggagtgcagtggcacaatcttggctcactgcaatctctccctcccaggttcaagcaattctcccacctcagccttccaagtagctggggctacaggcgcgtgtcaccacacccagctactttttgtattttttagtagagatagggtttcaccatgttggccaggctggtcttgaactcctgacctcaagtgatttgcctgcctcggcctctcaaagtgctaggattataggtgtgagcctcagcgctcagccaattatgttagtcttaaactttaattattttgccactgatttatattgttttagaggcatttttattccatttctgtctggtctttattttgccttgaaaacttgatttttttttttttacacgttttctctatcctgtatcaatcctaccttcattcccccaaatctcactatcaaataccttatatgtagttttgctttctagcagagctacgcacagtaactcaaatacccttatatgctcttcggtgtgtttaacaggttcagggatgatattggcctgggctgagaaacactgtttataagcttgaaatattaattgggtttattttcttttgtaattcctagatagaagagcgagcagaatttttgaataagtctgtgcagaaaaggtaaatatgcttgatggttcaattgagctaatcagctagcatatgtatgagaagattctctctcatatttttatatgtatgtgtttacttttttagcagtggtgtcaaatcgacccatcaagcagcaatagtctccaagattgacagcagactggagcagtataccagtgcaattgaggtgagaattgtcctcagcgttatggtcctgctgaacagaaatagattctgactacatagaagagcataaaaacacttaggacaataatcaagtccaatagccccaggagtgttagaatttttttttttttttttttttgagacggagtctcactctgttgcccaggctggagtgcaatggcaatctcagctcactgcaacgtctgcctcctggggtcaagcaattctgcctcaacctcccgagtagctgggattacaggggcccaccaccacacttggctaatttttgtatttttagtagagacggagtttcaccctgttggccaggcaggtctcgaattcctgacctcaagtgatccacccgccttggcctcccaaagccgaatgtgagccaccacacctggcccccaatagtgtcagaatattaatgatgctttattacactttgaaattctaagttctaagaaatacaataataaagataaattttaggagagttttaaataaattattttctactttcagcgtgaatattgtttaatgaaaaggtttttttgtaacgaatgggtttactggtatttaaatatatatatatatatatatatatatatatatatatatttaactatatatatatttaagtcttctttcaagtattctgtcaaatctgggtttaaatgtcacttcctcagagtagccttctttgcacccccaaactaagtactgccccccaattgtgtgccatgctttatggcacatcattatttttcatagcacttagcacaatgtgaaataaatacttgtataactagttactatctttcctttctattaaaatataagcccactgcagctgactgtcttgttttttgtttgtttttttgttttttatttttatttttatttttgagatggagtttcgctcttgttgcccaagctagagtgcaatggtgcaatctcggctcactgcaacctctgcattccaggttcaagcgattctcctgcctcagcctcccaaccgtcttgttttgagcacgactgtatccccagagcctagcaaagtgcccttcatacagtaggcatttaagaagtattgttgaggccaagtgtggtgactcatgcctgtcgtcacagcacttcaggaggccgaggcaggaggatcccttgagcccaggaatttgaaaccagcctgggcaacatagggactatgcctggctaattttttcatttttttctctacaaaatagagagaggcctatggttccagctactcgggaagctgaagtgggaggatcacttgagccctggaggtcgtggctgtagtgagccttgattgtgccactgcactccagcctgggtgacagagcaagaccctgtctcaaaaaaaaacaaaaaagtatctgttgaagaaacgaagtagaatatcaatttcacaacaaatggtgtcccaacaaaaagcatatttcatttttgaaagatcctctgatctagctgtgatggtttattttgagggacatatgtcatcagcatacagttttacaacagaaattatcactctcatttttggtggaggtgtttacacaatgaatttttaagatgataatgttgaggaagacaaactcactataattttatgagaacaaacttcccagcaccaatcctaaaaataactcacaaatttcagggaacaaaaagcgcaaaacctacaaagccggcagcctcggatcttcctgttcctgctgaaggtgtacgcaacatcaagagtatgtgggagaaagggaatgtgttttcatcccccactgcagcaggcacaccaaataaggtgagcatctgatttttgtctcttaagtgtagaggggcatatttttttgcatgtcgattttgatttaggaatcacactagtaaataataaaagcagtgaagaaggtgcaatttgtactttgttttgcaatgaccacaaaagcaagctcagagagaatgtgtttgtgaggttgcatgaggtactaagcccgggccatcttactccaaataaagtgcctgggctgaaatgtccacccttggagttggagtggggtgagttaccagggaaagaaaaccagataacatattctgtaaatatcaagtgttaaggtttatggttatgtgaaatcatacttaatgatattttgaatttgctttgaaaattccttcccaggtaaagtttacttcattctttaatattttggatgattgcccctttgtaggaaactgctggcttgaaggtaggggtttctagccgcatcaatgaatggctaactaaaaccccagatggaaacaagtcacctgctcccaaaccttctgtaagtacctttaggtttttctgagtttctttgatctcccagcttctaccagcagaagaaaacaagcagttggtctgtttacctaggaatggcagtgcccctgttctttgctttccctgatgaatagcaaacaggaaagtgttcagatttacaacagttctaagaagctgcatctcagttactcagagggtaaaatggaaccaaataatcacctctacaccctaactgagaggaggaatcagctagaatactgaggcagttcaaatttagatcctttactcgtctatttgtttagcttctattctataaattctggatagaaatttgaaaatgaaaggtcacatcattttggctacttctttgtcaagagcacccctaaacttattcccaaaagaatatgtatgttgcctattgggaacccatatgttccaatttgcctcatttttataacttggcacaaaaatgcagttattgggtagctgttgaaataattggtctaattgtgttgtcagcacctcctgaggaaagtcataaaactggaaactagaaaaactggttatgaatgatgtttttgagaatctaaaattttcttaatttattaagtgcagctatcttactaaaaagtacatttcttttcacctttttgttgaatgtatacgacaattgcttgcatttgtcattataataagaaaacgtatcaagctccccactgtatattgctgagctttccctgttaagtttgcttttatagctttgttggtgcccaagggagctgagagtccactgtcataatcctacattctagaggaagaagaaaaagtttccaatcctaggcctctgtgcatttaattgcatccattggctccatgccatttaattgcatttgttggctccatatataatctccaaagtcattaaattttgtcactttccaatttaaaaaggaagaaatggaaatgttcacaaatccttcttgggcacaactccttgaaccgtttaattaatctacaccccgagattctttgcataaaggctcacaggaggtatacactaatgtcaacccaatttacaattggaaaatctttatacattgaaaaaagcaacttttcctccccctctcaataggtacaagaatgcgggtttataaaaggacacagttgaggcaagagaccggacccaaaagttatgtgctctttagtgcctcaagttttccaagcatctctggtaacataaggagtagaaattattttcaaaaacaaaataatcactggttccagaccagtgattattaaccctttttgaattatgaacccctttaaaacctaatgaaatttaaggaccctctcccccaaaatatacatataaaaaaacaaggcagtctatggacctactgagtaactctcaagatagtaagtaaggagagaaagatctatgtttccctctttgataagtatgaaatatttggaggagatgctaatttttgcacgtttatgatatttgcaatctttcatttttgtagcagattatactcaaaaatttgatccagaacttggcccctattcttttatcagcactttaacttgtaaactgaaaagtttaccatcatctgtatgacatcctaatgaggttaaaaagataaaatgcagttatgattatgataggtataactgtatccaggtttccacagcaaaaacaaaacaaaacatacaccatgttctggggttattgacagcctcctaaaaaaaaaaaaaaaaaaaaaaaggcattgcagagaaattacaaaatcattgcctgctttacctactaattagtatgtgacttgctagatcaccccctagagggtgaagaaaaggaaagaagaacatggcagttagtatagattttagtgagatccttcttcccattagattttgtagactagtgtggcttcctgaatgagaaccagatggaagaaagttctatgaaatcaatgttgtaaatacaccagattgctactgggatgtcccttgctatttgtgggtagaatttataggatttcagtgtaactttgtaactgcaattcaattctgagtatgtctgtttgagctggtttgtctattctttgtgtctaaactaatgttacacagaaattaaaaagctaatttgtctttctttttgtttaaaaaaaaacaaccaacaatgtctttctcagctgaccttctgttcctcactctttggtctctggttgattggaaacctgcttctcctgccttcatttctccctcttcttccggagtgggtctttctctaaaatgtagtctggtcaggtaattccatttatatttcccctttgatttaaaatgccaacttataactcagatgttcatattttcttaaaaggactctttaaactctttaagtgatcttgaaagattcatcggcaggatttatgggaagtgcaatccattttcttaggtagaagaacgtgcatgagaaggaaaaatatttgtctcatatgaatcaaataaacaaagcgataatagctgctttccagagcttccctcagcatgttcctaattatagtttccaaaattttaaaacagtcttccagacagtttggcagcttccacctacgctggcaaatgtagtggaattctacaaaaataatctgatttgttgcttaatggctccaagttaaataggtgtaactctctaatagaatatcaggaattcatgccacagaggaaatccagaaactcagtaaagtttaggcaaatctgaaatgcttcacaggtatcatttaactgtgcattttcagtgttacaatctcaatactatctatcagaaatatgtccatttagatcagtgtccacgggtaaatgcaattgctgttagctttgccttcctcctgagaaaagggtttgccaagataagcattactatttcagtaaaacacatttattttctacaaactaccttttgccaagtactaatataagcaaatgctggaagaaaagtaaattgaaacagaaatttggatccttatccaaatgaaattaattaggaggtagtaaataaagactctaagctgtataactgttatcgatcatattttagtgtttccatcccaagatttccacatgttcttacacatgtcatcaactgtcaacttctcgcatgggttcaatttgtgatgaatgtttatatttgctaggttctactgatccacttctgaattacccacttgcccctcgggagacacataatgattttagggtgaggaaaatgctgctagaaaagggactttgtggctgggcgcggtggctcacgcctgtaatcccagcactttgagaggctgaggcgggcagattatgaggtcaggagatcgagaccatcctggctaacatggtgaaaccccatctctactaaaaatacaaaaattagctgagcgtggtggcttgtgcctgtaatctcagctacttgggaggctgaggcaggagaatcgcttgaacccgggagtcggaggttgcagtgagccgagattgcgccactgcactccagcctgggcgacagagcaagactgtctcacaacagaaaaagaagaaagaaaagtgactttgtttgggctgcccggcaacggatcccaagatagtgattccagagcaagttgtttacgtggaggtgaagaaaaccctacaggggctgaggttgggagaagaaggcagtcctcacagaaggtgttattaagcaagtccccacatggactgttaaactttcatcccatggaggaaatcctggaagccaccaaagaacacatacttcagagttacccaagctgaggcgagagtgagcctgaaaataatattgcaccaacattcaccagtcagccattgaggactgctcctggggatgttataataactctctcaactttccagcctgcccctgggcaggcaaatcaggcatctgtacccagagaaagtccctaggcagagaagcgctgtgtgggcagttggcagtcaggctggtgtgcactaaagtagtaagggctggggggaaagaggtgagtacaaattgagttcatctgtgaggcaggaaatgcttatcaaaccccaaattaatcatttttaaataacccatgatctattgacttgtaagagtgcagaaatttaaaatgaggctacattattttaaacatgctcctgtttcacttttactgatcaataaacagtaagtccttaggaaagggcaaggaccccgaggctatagttccagcccattctcatatcataagacatgtcacggtctatataaaatcaaacaacagctaaccccatctctactacacatacaaaaaaattagccaggcatggtggcacacgcctgtaatcccagctactcgagaggctgagacaggagaatcacttgaaatcagtagatggaggtcgcagtgagccaagatcacgccactacactccagcttgggctacagagtgagactctgtctcaaaaaaaataaaaaaataaaaaaatcaaacaacagctgatggtcctttcaattccatttcagatcactggggtaaagtgtattaaacaacaaactgattcaaataaacaatagatgtggccatttatttagagctggctagaaaatataaatggccacctatcgatgtttttctgcttcctttttatcaggacttgagaccaggagacgtatccagcaagcggaacctctgggaaaagcaatctgtggataaggtcacttcccccactaaggtaatctattgggaagactagtatttcagaggtttgttttcctgatgtatggtgtagtataatgtcctggagtcagatgagaaatatcactgacctacagatctttgcctgcacacccatcagtgtctaaaagaccagtacataacacagtgaaatgaaaagcgcattgcaagtttgtcagtcatacaacataaacggcccaaatccatggaatggttctcagtaggacattctcaatacaccacagtggtaggaacattggcagcagaaggccgtatgggataccatggtctacgtttccttacaaggtcccagcttagtgccacagtcatttaaaaatcacttggggaaaacatctgtctccctgagtgtttccaaaactgctttctggaaccattttagattacattgccactgccagcagcctaagactcagggttgctatggccaaaaaaaaaaaaaaaaatattcaaaagtaaggcaaccatttaccaccctgtgaaaatgaatgattaagaatgattgggttcctcttacttttagtcttctggtcaaaggatatggtcattcttcagaaaggaggctctgaagaacatctaaatgatgcttacactgcaaatgggaccctttgtggtacaatgagctcattcaactcccaactgtagcctttccccatttcaagtaatagacctcgtgttctccttcaataaaaagaaaattaaaaagggagaaactggagaccaacaataagcaaggttagaacaggctgcttatgggttgatttaaacagaagcacttcgtaagcaaactcaggactaaagagcacatcaacggcaactagagaatcactacaattcactgcagtgagagaattaccttccctttcccactttctcatgctcttagttctggtgcagctacctaaacatattaccccaccttcactattagctacgtattgcgcttttattccattaaaatccactagcctttctaagtcattgctaaacatatgaaaagtacctgctggtaattatcacattgctaactactagcgctacaagtgagcaccccactatatgccagacactattctaccttcttaccctccattatttcatttgatcctccagtcaccatgtgaggtaagtagtttatcattctcattttgcagctgagaaaaatgaggcattgagagatgaagtaactttcccaaagtcacacagtgaataagtagcatagcctgcattgatactccagcacctgatccgagcctgcatttttaaccattatacatggtactttcttttaggatgcatattcaggagaaaatgtatagttattcaattccttgtataattttctctcggtggcaggggagaaaagaactttctttgttattttttaaacaaagaatgagcttgttgacctaagcttttatgacctctctagcctatgctattagcgcattgcaggtttgtcagccatgcaatgtaaatagcccaaacccatggaatggttcccaggaagacattctccacacaccactgtgggaggaacattgacagcagaaggctctcctctcagacctctgagaggtatctgacttctcagaatggcagtcccagtgtttatataggttcctgtctgaaaagcagatgtcagctggccatagaccatcatcaccagtataacggagtctctctggataacattcctcctagccagagctctggaaagtggaacaaagatgatgtggaatggtcagactcagagaacaccactcacatacaaacatgaatggtactccctggagttatgtagcaccagggcagtacaaggtaggagggtgacagtgtgagttttcatgtgccactaacttctttctacagtagtaataatataaccaccagaccgagaactgagtttatgaggtagcagattaggtacctcttttgctccaaactgtcaaactcatttcttgttactcagtcattccttagaaatgaatacaatgaacacccttgaaaattggaattcacaacactttaagatttcttaatagcttggcaaaaatttttagcaactagctgagggggagagaatggtgtaagaataggactataggtcagataagtctcgtggggtaggggtgtaagaataggagggagaaaatagagattgctagattaaaaatgggagaaaactaaagataaacatcctccttcaccatcatacattgatgtggccctcactgagctattcagtcgcatgtgcctgttctggaatacacactgtagatttttggctcttacagtggggcttaaaaatgaaaaaaacaaagcaacttacttgactctaaatgctataagcaaggccaaaagttaagacaggaaaagagaacatcaaggagaaagacaggaagagggaagtgaaaaaaatcagcagaaggaaggctaaaataaaataagatccagccaggcgcagtggctcacacctgtaattccaacactttgggaggccgaggcaggcagatcactggaggtcaggagtttgagatcagcctggccaacatatagggaaaccccgtctctaccaaaaatacaaaaattagccgggcgtggtggtgtatgcccgtaatccccagctactcaggaggctgagatgggagaatcacttgaatctgggaggcagaggttgcagtgagctgagatcacaccactgcactccagcctgggtgacagagcaagattccatctcaaaaaaataaaaagtaaaataaaagatcatatttgaatggaatgccgataataatcctccctttcataaatatttattcctgccatactattattcatttttcttctgactataaaaaccatctgcctgaaacactgcaggctgtcagtttcacactacaggctgtcaatttcaagttctcttctcttggcaggtttgagacagttccagaaagaacccaagctcaagacgcaggacgagctcagttgtagagggctaattcgctctgttttgtatttatgttgatttactaaattgggttcattatcttttatttttcaatatcccagtaaacccatgtatattatcactatatttaataatcacagtctagagatgttcatggtaaaagtactgcctttgcacaggagcctgtttctaaagaaacccatgctgtgaaatagagacttttctactgatcatcataactctgtatctgagcagtgataccaaccacatctgaagtcaacagaagatccaagtttaaaattgcctgcggaatgtgtgcagtatctagaaaaatgaaccgtagtttttgtttttttaaatacagaagtcatgttgtttctgcactttataataaagcatggaagaaattatcttagtaggcaattgtaacactttttgaaagtaacccatttcagatttgaaatactgcaataatggttgtctttaaaaaaaaaaaagaaatgtactgttaaggtattactttttttcatgctgatgattcatatctaaattacattattatgttagctgacagtggtactgattttttaggttggttgttttgtggatttctttagtagtgatagtagcctgaaccacattttagataactcaattatgtatgtatgtgcatacacatatacaaacacactaatggtagaatgcttttttatgtgctagactattatatttagtagtatgtcattgtaactagccaatatcacagcttttgaaaaattaaaaaatcacactatattaatattttatatttgccaacagaaacatggcagataggtatcaatatgttttcaatgcctgatgacctataagaagaaagtattgaaaagaagagagattagaactgttagaaggagttgaaattttctaaaagacatagtatttagtttataattaaatgcattcttgaagtccagtgtgaattttattaatgctatcatctcgaccaagctcaaagcctacttattagaaacaatgaagttcacaataggtcataaggtctcttccttttctaaaattgaaagacaagaaatttagtgccaatattgtacagacagaaattccatgtatgagtctcaacaaagactacctttggctaaatgtctagaagcagagaagtaaagtgagcaaaatccagtgttgaggagtcatgacagtactttgatctttatatactctgaagcatttcttcaaacttttctacttttatttgtcattgatacctgtagtaagttgacaatgtggtgaaatttcaaaattatatgtaacttctactagttttactttctcccccaagtcttttttaactcatgatttttacacacacaatccagaacttattatatagcctctaagtctttattcttcacagtagataatgaaagagtcctccagtgtcttggcaaaatgttctagtatagctggatacatacagtggagttctataaactcatacctcagtggacttaaccaaaattgtgttagtctcaattcctaccacactgagggagcctcccaaataactattttcttatctgcagtattcctccagaagagctaaccagggcagggctggcatgagaagtgacatctgcgttacaaagtctatcttcctcataagtctgtaaagagcaattgaatcttctagctttagcaaacctaagccaaaggaaggaaagccatgaagaatgcagaagtcaaaccctcatgacaaagtaggcacaagtctacaataagctaaatcagaatttacaaatacaagtgtcccaggtagcattgactcccgtcattggagtgaaatggatcaaagtttgaattaaggcctatggtaaggtaacattgctttgttgtacttttgaacaagagctcctcctgatcactattacatatttttctagaaaatctaaagttcagaagagaatgtatcactgctgacttttattccaatatttggatggagtaagttttagggtagaattttgttcagtttggatttaatcttttgaaaagtaaattccttgtttactggtttgactataattctctgttatctttacgaggtaaaactgcaagctgactagcatgttctgtgaatctgccattcctaaaaattttataaacacttgatacttttcactgataatggatcgctccaataaacatatattgtgaaaatgcatccacaataaatggaattccttcctgcaaaatgtctttttctcacttatttttatgtacaatattgatagtgagaggtatgtctattataataaagattatggcacagtaaaacctgt

SEQ ID NO: 67 - DNA, 16696 bp, Homo sapiens
atttaaacgggagacggcgcgatgcctggcactcggtgcgccttccgcggaccgggcgacccagtgcacggccgccgcgtcactctcggtcccgctgaccccgcgccgagccccggcggctctggccgcggccgcactcagcgccacgcgtcgaaagcgcaggccccgaggacccgccgcactgacaggtgagcgcggacgcacccggcagggatgtgagtgggcggagggaagagggccgcaaaccaacccaggacccgctcagttccacgcgcggcagccctccgtgcgcgcaggctcgggtgcgttgttcgcgggggtgaattgtgaagaaccatcgcggggtccttcctgctgaggccgcggacaccgtgacctcgctgctctgggtctgcagggaaacgtaggaaaaaaagttgtcaggagcgggcaggatgacccccacatcccgtttccacctcccggaggcccccgaacacgctcctggtgctggtggcagcagcgcctggcagacgcgcccgcttagcgagggcgcgaagtccaggccgccagagcgcaggagcatccggacctgctagtcggccgctgactgcgcggcgagttgccttgagagggtcccatgtgcttggggcgccgcgctgggtctgggggcgtcttggggcgcccattggagtccgcgggttggagcatccggagaatccatgatgtgtgcatttgccgatccccgaggtgagatggagactggcaagggcagagccgctgtgttcagccacagcggaaaaccgaacggtgggtaatccgacagctgcggtgcggggcgcggccctggccgcggggtccagcgaacccgcagtgctcacaaggcagacaccacacgcgctcgcggaccggccacgcactcgcgggcgctcgcttctctactccagcctcttccccgccccgcgcacgcccgggctgaatggtagacgttctggcgccgggcagcggccaccggctggttcccacttccgcgcgcaccccttaaactgtgttctagaggccccagcctcgccttgcagcgcctcactagctcctgaggactagggactggcggctgaggcgggttggcggctgcaacgagctgggcgtctttcgttctctctcgctgcctggctggctccgctggcccctccacagcttgcggagcaaggccatagcaggggagtgggaggtatattggggctgtcacctccttgctggccggagttatttgtagactacagactccggaagaacagacgcgccaccgctctcgcttggcattgccttcggatcgcagctcctccttgggggtgccccagcttggcgtttatttgcctgcgccaggctctggcgacggtcaccgggccaggcggggagggacggacggcaggtgaccagcctctgctgtgaagaaattcctgcgcgcccggagctgtccctaatgcattcccgggtcgaatccgtctactgccttcccctcctcgaccgactccgaatctcggctcttatagacagaaatacagcctcagcgttaggggttaaaatccccctcttaaacggtccgagggcagagaggtgaccaccgataggtaattggatctcctgctggaaagagcaaatctgagcggtgtgcgcgtctgtttatgttccccttcgagatggtgccaggacacgaactgattaaaacaatctattgtgttaagtgggtcactagggttttaagctgtcccagggaccccagagtagtggcttccttctggctgtacacacaagttaaataaatagcgtagaagaggttaagataaccccattctagggtgaggagtcctctttcatccctagggcttccccctccccttttctctttttttggaaggagggggagcatgagagtcttgagggggggatgtacttttcaaagcaaggagggaaagatcttaagaaaactatatattctcactgccccccaagccaagtctataacagtaggtgatttgattactatctctggataaatggcactgtcaaattgttaatattaactatttcagggatttttagcagggtagtggcagtatgtgtgcgtgtgtgtgtgtgtgtctgtgtgtgtgtgtttaacctccaggtcattgtaggaattagagtcttttgtaaactttgtaatttcacaggtttcctattttcttaaaagttcatttttagtgaaatgttttggtaacccacgctctgtaggaaatccaggttggctaatgcggtctttatgtgagtagttacacagggaaggataaaaaccttttatgtcctacatctctgaatgagggctgcctaccctgtctttgaaactaagccgaagatgccttcagtctgaatggtcaagtattaaaagtgataaaatgcaaagaaatttcatgccgcagacacctcccccaagaactgcttgttgacagcaaagctgtggaacatgttccacaacagagagtaaaggacagccaggaaatataaaccttttatgtaaaggaaaggcaggtgggggacagtggttaggggaggtgactgcagcctctaaccaaaaggcaaccatcaggcaagtgctaccagcccgtgtcttcgatctgcaaggaattttctttagttttaacatatgctcttagaaattcaaagtacaacaggaattcctgggacaagagaaatctttttattcacatgtgaacatgaagatacaaaatagataattattttatttatagcactcttcaaattgtattgcattagaaaacatatccattgacccactgttaaggacagcactgggtgtcaataggacagtggttaaggacctgtgtttggggctagatagaattgggtttaaactgctggctgggctaggcacagtggctcacaccggtaatcccagcactttgggaggccaaggaggacggatcacctgaggtcgggagttcgacaccagcctgaccaacatggaaaaatcccgtctctactaaaaacacaaaattagccaggcatggtggtgcatgcctgcaatcccagctacttgggaggctgaggcaggagaattgcttgaaaccgggaggcggaggttgtggtgagcccagatagcgccattgcattccagcctgggcaacacgagtgaaaactccgtcaaaaaaacaaaacaaaacaaacaaacaaaaaaatgctggctttcccacttatgagctgtgtgaccttggacaaatttccaacttttctgagtgtagattccctgattggtaaaaggaagatgatattatctacctcatattttgttatgaaaaataaatgataaaattgggtcagaaatcagcataatgcctggcacagtaagggcttcaaaataaaaggtagctcttattattagtaatggtgttaggaaaagtagcaatgttatacagaaccaggatatatcacagggcagttctgaaattaaatcctgaatcctggccgggtgaggtggctcacgcttgtaatcctaagcactttcggagactgaggcaggcggatcacgaggtcaggagtttgagaccagcctggccaagacactgaaatcccgtctctactaaaaatacaaaaattagctgggtgtggtggcaggcgcctataatctcagctacttgggaggctgaggcaggagaatcacttgagcccaggaggcggaggttgcagtgagctgatatcgtgccagtgcactccagcctgggtgacatctcttaaaaaaaaaaatcctgaataccacactacgcagtgactaacacatctttcactacagaacagaacctgtaacttggccgtctctcagcagtgctgctcagtgaacatttaataatttattactttctaactcgtttcttgttgacctcaagaattgtacatagtcattaactttcctaagaaaatctttgacaaacatagagctcctgagatatttcacaaccaggtggtctcctccctgtcctatgcaatgttgggccccagcctgatttagccgacctggtcttcagacttgagaggctgtttagggttcttacaacacaaaggggatgagactttatcctctacctgtctgccaacaagggattcttcttatctccttggtgcaacttgtctgaaaaagaaagtcaacacaattatcttcttaaaagttaaagatcaaattaaaaataagctatagttttcccaaagatttagacctgagaaaaaggaatagatctttctaaaacctggcctgcacttagagcatttgtagtcacttccactatttcttatgctgagagaataatttgatgtcatgcctattgaatgtctttctaaagcttgattcatcaggaggaactgaccagaagtccatgcacagacatttggctttcactgtaattcctactcaaaactccctttcactgattatgagcaggttgcttagctaaaatgagaaatacagcaagaagagggatggaaagagctggcttaaactttcccaaagacatcatgaacactgggaacaggtcatacatataccatttttatttctcagtcctcagtattagaatattgtgttcctagaggctttgtgaaaattggaatacattgccatgacctgcacaggatagaggtggttaatatggcttaccttgcttgtagatgtttactcttgatccctaagggaaactggaaggaaagcatgctgtagagaggacctgctttgagagtatgtgtcctctgggacaagtggaatgaaagagaggatagaggcaaagagaaaaaaaggtggagatggggtgagacttgctggtggacagttgcaaagaaaactcatgatgagaataacatcacatttcttgaagaagctgaactgcattgatgggaagttgaggcagagtttgaaaagaagatatactgtctgcaaaaaagaatcaacggagatgtcaggtatcttgatgcaccctgagtctatgagatgcagcttaatttaatttagtgatatgagtaggccatttcataagtggtggaaattaccataaagtgtttgcagctaatgacggcgcatgaatgatgtcataggaacctaagtctggatgagctatggattgaatttttactatgggacacccttctacatgttgctgtggaaaagaattgtcctcaagaaatgtacatcttctgcatttcctctacatctctgatatttacaaagtgcacattatttggtgatactacaactgggatttcaagtgcacatcactactatttccttcactgaagaatcaagagcagtctgggggtggggagagcttgagtgattgacaaggatgtggcagagccctggttccactatgaattatagttcttaccctgcttactgtcactcatgtagagcagctagtgtgcctcagagcactgctgttctctgagaagctgaggtctcgattgacattcttgaagttggtgtttacttctctctgaataaacaaaggttggcaactcagacatcttacaataagtactaaagatttttgaagaataggtttttaaaaaatgaaaaaacatttcactttccatagctaataaatcttattttgaggaaaatgtacttttctttaaaaaaaaaaaaaaagcctgtctgtcactctagaccctttggcttagaaggtaggcacactcacatagaaacagaaagtctgtccaaattaaaactgaaaaccacagttgactaattttgaatttatagctctgctgttggcttctgcgatagtattaatttcaatggcttcaattagaaaatgaaacccatagcattccatatgagaacaggtaaaaagtcagggacatttggagttttccaagaaaaagaaagacaagtcttaggaagctctctaggatggaaggaatttgccacactgagagttagacatccaaaggatagcaattggctcttctgctcatgggcactggtgaaggcattttaaaatgcgaagaatggtacctctgtaaatcaatgaggttcataataatcatgcatttaccaaatttttataagcacctgccttgtgccaggcactgagggtaaggtgatgaataagccctcatcaactgtcagactagatatttactcaataacagatgtgaaaatgccaagaaggaaaagttgagtataaagaaagccttaagttggttcagagaaataaaattgcatttttcggatagatgtttatggaatcggccttatgaggtaaacttgtcctatgcagtgaacatacattcccagttagtctcagattggcctctgtgatgacaaactcagagggtcctggtctaggaggggtgaatttgtctggaggccattttcaggaggtatggaggaagactggggcataggcctggggccatcccatgtactcctcctctgaaatggggagcaactgaattgtgttttattttagatcttcgtccaacttgaataccagaaattcgtgaaaccttctcaaattcacactatattttgagaccaggagaaggctccttgagaaattgccacactgtcttatcctagtctctggaaaaattcagtcctgtattataactgggcgtttctcataagtgctttttttttttctttttctttttataatactttaagttctgggatacatgtgcagaatgtgcaggtttgttacataggtatacacgtgccatggtggtttgctgcacccatcaacccatcatctacattaggtatttctcctaatgctaccccttccctagccccccacccctcgacaggccccagtgtttgatgttcccctccctgtgtccatgtgttctcattgttcaactcccacttatgagtgagagcatgcggtgtttggttttctgttcctgtgttagtttgctgagaatgatggtttttggcttcatccacgtccctgcaaaggacatgaactcatcctttttatggctgcatagtattccatggtgtatatgtgccacatttgctttatccagtctatcattgatgagcacttgggttggctccaagtctttgctattatgactagtactgcgataaacatgtgtatatgtgtctttatattagaatgatttataatcctttaggtctatacccagtaataggattcctgggtcaaatggtatttctggttctagatccttgaggaattgccacactgtcttccacaacggttgaactaatttacactcccaccaacagtgtaaaagcattcctatttctccacatcctctccaacatctgttgtttcctgactctttaatgacggccattctaactggcgtgaaatggtatctcattgtggttttgatttgcatttctctaatgaccaccgatgatgagctttttctcatatgtttgctggccccataaatgtcttcttttgagaaatgtctgttcatatcctttgcccactttttgatggggttgtttgcttttttcttgtaaatttgtttgagttcctggtagattctggatattagccctttgtcagatggatagactgcaaaaattttctcccattctgtaggttgcctgttcactctgatggtagtttcttttgccatgcagaagctgtttagtttaattagatccaatttgtcagttttggcttttgttgccattgcttttggtgttttagtcatgaagtctttgcccatgcctatgtcctgaattgtattgccctggttttcttctaggatttttatggttttaggtcttacatttaagtctttaatccatcttgaattaatttttgtataaggtgtagggaaagggtccagtttcagttttctgcgtatggctagccggttttcccaacgttatttattaaatagggaatcctttccccattgcttgtttttgtcaggtttgtcaaagatcagacggttgtagatgtgtggtgttatttctgaggcctctgttctgttccattggtctgtatatctgctttgataccagtaccgtgctgttttggttactgtagccttgtagtacagtttgaagtcaggtagcgtgatgctttgttctttttgcttaggattgtcttggctatatgggctcttttttggttctatatgaaatttaaagtagttttttcatagacatctatagaactctccaccccaaatcaacagaatatacattcttctcagtatcgcatcgcacttattctaaaatgaccacataattagaagtaaaacactcctcagcaaatgcaaaaaacagaaatcctaacagtctgtcagaccccagtgcaatcaaattagaactcaggattaagaaacttactgaaaaccacacaactgcatggaaactgaacaacctgctcctgaatgactactgggtaaataacaaaattaaggcagaaataaataggttctttgaaagaaatgagaacaaagacacaatataccagaatctctgggacacagctaaagcagtgtttagagggaaattgatagcactaaatgcccacaggagaaagcgggacagatctaaaatcgacaccctaatatcacaattaaaagaactagagaaacaagagcaaacaaattcaaaagctagcagaagacaagaaataactaagatcagagcagaactgaaggagatagagacacaaaaaacccttcaaaaaatcaatgaacccaggagctgttttttttttttttttgaaaagattaatgaaatagactgctagccaaactaataaaggagaaaagagagaagaatcaaatagacaatagacacaataaaaagtgataaaggggatatcaccactgatcccacagaaatacaaactaccatcagagaatactataaacacctctacgcaaataaactagaaaattgggaagaaatggatacattcctgaacgcatacaccctcccaagactaaaccaggaagaagttgaatccctgaatagaccaatagcaagttctgaaattgaggcagtaattagtagcctaccaaccaaaaaaagcccaggaccagacagattcacagccgaagtctaccagaggtacaaagaggagctagtaccattccttctgaaactattccaaacaatagaaaaagaaggactcctccctaactcattttatgaggccagcatcatcctgataccaaaacctggcagagacacaacataaaaaaggaaattcaggccaatatccctgatgaacattgatgtgaaaatcctcaataaaatactggcagcacatcaaaaagcttacctgccatgatcaagttggcttcatccctgggatgcaaggctggttcaacatacgcaaatcaataaacgtaatcaatcacatacacagaaccaatgacaaaaaccacatgattatctcaatagatgcagaaaaggccttcgataaaattcaacaccccttcaatgctaagaactctcaataaactaggtattgatgaaacatatctcaaaataataagagttatttatgacaaacccacagccagtatcatactgaatgggcaaaagctggaagcattccctttgaaaaccgccacaaggatgacttctctcaccactcctattcaacatactattggaagttctggccagggcaagcaggcaagacaaataaataaagggtattcaaataggaagagaggaagtcaaattgtctctgtttgcagatgacatgattgtatatttagaaaaccccatcatctcagcccaaaatctccttaagctgataagcaacttcagcaaagtctcaggatacaaaatcaatgtgcaaaaatcacaagcattcctatacaccaataatagacaaacagccaaatcatgagtgaactcccattcacaagtgctacaaagaataaaatacctaggaatccaacttacaagggatgtgaaggacctcttcaaggagaactacagaccactgctcaaggtaataagagaggacacaaacaaatggaaaaacattccatgctcatggataggaagaatcaatattatgaaaatggccatactgcccaaaacaatttatagattcaatgccatccccatcaagctaccactgacttccttcacagaattagaaaaaaactactttaaatttcatatggaactgaaaaaagagccggtatagccaagacgatcctaagcaaaaagaaaaaagctggaagcatcatgctacctgacttcaaactatactacaaggctacagtaacaaaaacagcatggtatagtataagtgcttttttttaaaagacaaagtaaagtaatttttttgttgttggggtaaaacaaaagctctgcataaagagcagggatgttgtaacatacactgaccaaaggtgggaaacctacagttggagcagaagctgaatgtcacattatcagctccgaacttataatggtctaaaagtactaggttaatgttggaaagatggtgccatttaaagatatcttaaattcaatatttaattattttaatttgacattatcctagagttgaatggtgtttacttaccatgtgctgttcattagaaaatctagatcctacactgcctttgcgcaaggtagttgctctaataataccaacctgtccagttttggtgggagaaataatgttactgttaagttgcacttagtggttattatgtgtaatactggtattccaaagagagaaggaaaatgtttgctacacagctgtgttcttaggttcagaaaaccacaggagtgggacaggagaaccttcaggattcaggtccgattgttgtgatggccgcaggagggagactgtgaatttgaaactgcatccattgaaaagaaaatccctccacactttaataattctctccgtgccccatggcagcaagtgcttataggccttgctactcaaagcttaataaaaaggcagacctgctgaatcataatctgcatcttaacaatatccccagatattgtctgcactttctttttttttttctttctttctttcttcttttttttgagacagagtctcgctcagtcacccaggctggagtgcagtggcgcgatctcggctcactgcaagctctgactcccgggttcacgccattctcctgccttagactcccgagtagctggcactacaggcgcccgccactacgcccggctaatttttttgtatttttagtagagatggggtttcaccgtgttagccaggatggtctcgatctcctgacctcgtgatccgccgcccatctgggcctcccaaagtgctgggattacaggcgtgagccactgcgcccggccaattgtctgcactttcaagtctaagaagcactgtcccaggaggaaaatctttttagtctgtctgaggcttctctcttgcactctcctttttaaaaatatgctgctccttctccacctttccctcttcttccgccttttctgtctgcctttactacctcccctgaacattcaacttgtagaagagttcccctttctctgaattgcattcttcacttcattcattcttttctctctctgtctatggtttcctattttttgtcggttttccctcacctcacctccttgttattttttgccattgttcacatatcactgccctttcagacccatatctagcttctgacccatccactaatccattgccactaatttattcagcatgcccatgccatttattaatgtaaatatttgcacatacttgttctatcatgcccatttttctaccttttaaattgtatatacacagacacatgtgaatgacatatttcactatttaaaaggtagaaaaatgtatatcgtggtacaaagtgatacattgagtatctgtgcccagtttcaagatgagaataagtgagaggtgaagcctcatgagtcacgtcacctacacgctactgtctttcattccatctgcagtactgccacacatttggttagttctccaattgctgtcacattgacatcgagttggatctgaacagcgtacctggggagacgaagtattggtatctttgcttaaatggagtgatttactgagagacaaagtgacatctttaagatcagatagcaagttactgcaccaggagcgcgacctttcctgttttgttgttttccctctgtcaaatgccttctggtctccatgaatctctccttccacatatgataaaaatgcaaagtctcataagcattcacagctcaggaagcctcaggctagttggggagaaaagactgggaggtttccggaggaatgaagtcctctgagcagagaggttaattcatcttgctgtaaaacaaaatagaaaataagttcccctcaataagtgaacgtaatacaaagacaaatgtggttggtgccagaggccaggaagaagttcttgtgagaataggtgcagagaagagctaggccctggctgagtttaaaccttgacttagtcactgtgggactctgggtgagttactccatggattgatggctgggtcatggagataatagtacctaattcatacaggtactgtgagaagtaaatggaatatttcacgttaagtgtttaacggtgcgtttaaatgctaggtgctattattattaatttttaaattaactttgccatgttttgtgtcttcccctctctgtgcttcctttctttagtatgagccgcacagcctacacggtgggagccctgcttctcctcttggggaccctgctgccggctgctgaagggaaaaagaaagggtcccaaggtgccatccccccgccagacaaggcccagcacaatgactcagagcagactcagtcgccccagcagcctggctccaggaaccgggggcggggccaagggcggggcactgccatgcccggggaggaggtgctggagtccagccaagaggccctgcatgtgacggagcgcaaatacctgaagcgagactggtgcaaaacccagccgcttaagcagaccatccacgaggaaggctgcaacagtcgcaccatcatcaaccgcttctgttacggccagtgcaactctttctacatccccaggcacatccggaaggaggaaggttcctttcagtcctgctccttctgcaagcccaagaaattcactaccatgatggtcacactcaactgccctgaactacagccacctaccaagaagaagagagtcacacgtgtgaagcagtgtcgttgcatatccatcgatttggattaagccaaatccaggtgcacccagcatgtcctaggaatgcagccccaggaagtcccagacctaaaacaaccagattcttacttggcttaaacctagaggccagaagaacccccagctgcctcctggcaggagcctgcttgtgcgtagttcgtgtgcatgagtgtggatgggtgcctgtgggtgtttttagacaccagagaaaacacagtctctgctagagagcactccctattttgtaaacatatctgctttaatggggatgtaccagaaacccacctcaccccggctcacatctaaaggggcggggccgtggtctggttctgactttgtgtttttgtgccctcctggggaccagaatctcctttcggaatgaatgttcatggaagaggctcctctgagggcaagagacctgttttagtgctgcattcgacatggaaaagtccttttaacctgtgcttgcatcctcctttcctcctcctcctcacaatccatctcttcttaagttgatagtgactatgtcagtctaatctcttgtttgccaaggttcctaaattaattcacttaaccatgatgcaaatgtttttcattttgtgaagaccctccagactctgggagaggctggtgtgggcaaggacaagcaggatagtggagtgagaaagggagggtggagggtgaggccaaatcaggtccagcaaaagtcagtagggacattgcagaagcttgaaaggccaataccagaacacaggctgatgcttctgagaaagtcttttcctagtatttaacagaacccaagtgaacagaggagaaatgagattgccagaaagtgattaactttggccgttgcaatctgctcaaacctaacaccaaactgaaaacataaatactgaccactcctatgttcggacccaagcaagttagctaaaccaaaccaactcctctgctttgtccctcaggtggaaaagagaggtagtttagaactctctgcataggggtgggaattaatcaaaaacctcagaggctgaaattcctaatacctttcctttatcgtggttatagtcagctcatttccattccactatttcccataatgcttctgagagccactaacttgattgataaagatcctgcctctgctgagtgtacctgacagtagtctaagatgagagagtttagggactactctgttttagcaagagatattttgggggtctttttgttttaactattgtcaggagattgggctaaagagaagacgacgagagtaaggaaataaagggaattgcctctggctagagagtagttaggtgttaatacctggtagagatgtaagggatatgacctccctttctttatgtgctcactgaggatctgaggggaccctgttaggagagcatagcatcatgatgtattagctgttcatctgctactggttggatggacataactattgtaactattcagtatttactggtaggcactgtcctctgattaaacttggcctactggcaatggctacttaggattgatctaagggccaaagtgcagggtgggtgaactttattgtactttggatttggttaacctgttttcttcaagcctgaggttttatatacaaactccctgaatactctttttgccttgtatcttctcagcctcctagccaagtcctatgtaatatggaaaacaaacactgcagacttgagattcagttgccgatcaaggctctggcattcagagaacccttgcaactcgagaagctgtttttatttcgtttttgttttgatccagtgctctcccatctaacaactaaacaggagccatttcaaggcgggagatattttaaacacccaaaatgttgggtctgattttcaaacttttaaactcactactgatgattctcacgctaggcgaatttgtccaaacacatagtgtgtgtgttttgtatacactgtatgaccccaccccaaatctttgtattgtccacattctccaacaataaagcacagagtggatttaattaagcacacaaatgctaaggcagaattttgagggtgggagagaagaaaagggaaagaagctgaaaatgtaaaaccacaccagggaggaaaaatgacattcagaaccagcaaacactgaatttctcttgttgttttaactctgccacaagaatgcaatttcgttaacggagatgacttaagttggcagcagtaatcttcttttaggagcttgtaccacagtcttgcacataagtgcagatttggctcaagtaaagagaatttcctcaacactaacttcactgggataatcagcagcgtaactaccctaaaagcatatcactagccaaagagggaaatatctgttcttcttactgtgcctatattaagactagtacaaatgtggtgtgtcttccaactttcattgaaaatgccatatctataccatattttattcgagtcactgatgatgtaatgatatattttttcattattatagtagaatatttttatggcaagatatttgtggtcttgatcatacctattaaaataatgccaaacaccaaatatgaattttatgatgtacactttgtgcttggcattaaaagaaaaaaacacacatcctggaagtctgtaagttgttttttgttactgtaggtcttcaaagttaagagtgtaagtgaaaaatctggaggagaggataatttccactgtgtggaatgtgaatagttaaatgaaaagttatggttatttaatgtaattattacttcaaatcctttggtcactgtgatttcaagcatgttttctttttctcctttatatgactttctctgagttgggcaaagaagaagctgacacaccgtatgttgttagagtcttttatctggtcaggggaaacaaaatcttgacccagctgaacatgtcttcctgagtcagtgcctgaatctttattttttaaattgaatgttccttaaaggttaacatttctaaagcaatattaagaaagactttaaatgttattttggaagacttacgatgcatgtatacaaacgaatagcagataatgatgactagttcacacataaagtccttttaaggagaaaatctaaaatgaaaagtggataaacagaacatttataagtgatcagttaatgcctaagagtgaaagtagttctattgacattcctcaagatatttaatatcaactgcattatgtattatgtctgcttaaatcatttaaaaacggcaaagaattatatagactatgaggtaccttgctgtgtaggaggatgaaaggggagttgatagtctcataaaactaatttggcttcaagtttcatgaatctgtaactagaatttaattttcaccccaataatgttctatatagcctttgctaaagagcaactaataaattaaacctattctttctgtg

SEQ ID NO: 68 - DNA, 203067 bp, Homo sapiens
ggaaaaaagtgctccgcgccgaaggcgaggtccgcactctccgtccccgcggctggcgcaggacctcactcgagcggagcgcccacggggagcgggtcgcggggcggcggcggcgaggaggaggcgagaaggagttggaggaggaggaggaggaggcgagggcgagctagcccagcggggtcccggccgccccgcgggccaaagtcgagccctcccgcccgtgggcgagcgcgccagccgccccttccagaacagccgccgccacaaagaagaacggggggtgccgaggtccccatgacctcctaaagtggtgcggtccctgctgagtgcgctgcccgggccgtgacccgcgcccctgtgcgtccccgcgcgcctccgagcgcccctgtgcgccccggcccgcgccccgccggcatggacgtccatacccgctggaaagcgcgcagcgcgctccgcccgggcgccccgctgctgcccccgctgctgctgctgctgctgtgggcgccgcctccgagccgcgcaggtaagggcgccccggggcgcggggctgcgggatggggcgcgcgcagcccgggcgccgctgtcatccccgggcgccttcgcccgcagaacttttcttccttggcctgtggaatgcacgggccaagaccacgaatgccatttgctgggggcccccccgagatgacgacacgcagacacaatgcccgcgggcgcgccgccgccccctccccagacgggcgggtcgggtggggctgtcgcgcgagccgaggaaggaccgagggctggatcagcaggaggggttgtccacgaggcgggcaaacttttgtcccaaaaaccttccttctctgtcccacatcacaggcgcccagcttgggccctcacagccctacagcagaacttcctctgctccaaaccgggcagggccgccccctagagttacagcccttcaaatcccgggactcctggggatggggggaatcccagaagcctgggcccccagcactgaacttcccccaggcactgtcactctaggctgagctggcgccctgctttccccagggacagcgtttcctgcagccttggtcacctaagtgttcgggggcactggggacccctgcagggtggtagacagccctgctcctaatcccacccccaaacttcttgatccctggaaggcagcttttcctggattcgctgctgagagatgggatgcgtggagcaaagccagagatgggcttgcaggcggggctgtgagtggttgggatgatatgcagatgtgggattccttctgccaagggtcagcccttagaaggaggcttgcttcccggggagggcgcttcaaggcggggactgtctgcgtccctgcctgggttctcgagggttcaactctccctggcgcagcttcctgacgggggagtttttctaggcatcgctcttggtagttagtggcggggtgggttttcacagactctcgaacatcagagcccccagccctggaaggtcccccgaatccttattgacaggcggggagatggaggctcagagctgtgtgctgccaggtcaggagaagtggcgggcagagcgatgggacggtgggctcagcgaacgtctggaccagcccgccgcctgccagcaagaatgcttctctctgcttcacgattggaagacaagtgggaagaatcattgtccgtgttccgcttgtcaattaaaacactcttttcctttttccctggcacgatcagtgcttgttgggctaactggatgagctggagtctgggtgtgggggctgccctggggctctgggggaggagccaggagcctggcctggctcccaggacctgggatctcatccctgggccgccaccaactctctcctgaccctgggctaactgggcttgtgtttctccaggggttagctgaaggtgggggacaacagaggtccccagaaaagtggagaggagaaggaaggtgtggtcagggactgtgccattgccgggggactaggccctgtctcagcgcctctggggacttttccccagaaactcaggagggagtccttcaggggaatcgtcaccctagacagctggggcagggcactgcctggggaccatgcaccggactgggcttggggttccatttccctccctgcccatctccccacctccacactgtctttttccctctctggttgccctcgctaatcgaagtgcggctcgttggaagtgggagtgaggatggcccagagcagcaggctatggagttggacattttgcttttgtcagaacagacttttagaagcatgtggagagaccacttttcttagtgagttttgccaacgtctctccacctcccagggtgggacctatttggaagtcatccttcgagcatggccagagggggcggctgtccactggagatgcaggcgctggggggagggggcggctgtccactggagatgcaggcgtggcggggagggggcggctgtccactggagatgcaggcgctggggggagggggcggctgtccactggagatgcaggcactgggggaagggggcggctgtccactggagatgcaggcgctggggggagggggcggctgtccactggagatgcaggcgctggggggagggggcggctgtccactggagatgcaggcgctggggggagggggcggctgtccactggagatgcaggcgtggcggggagggggcggctgtccactggagatgcaggcgctggggggagggggcggctgtccactggaaatgcaggcgtggcggggagggggcggctgtccactggagaggcaggcgcgggggggagccaccagcaagtgcctgctgtcttctccatcttcggatctgccagatgttttctgagggttttctgaacacagttcttttgcctgctttcttttggccaagtgtgtgaaggaatgaaaagtaagattgcatttggggctgctgaacagtgtaacggggaaggagagtatgggaaatgaaacatgaccccaatatttggaaattgaggtcatctcctctacacgccattggttgactccagtcacgtgattgctttttgcaataatttgtggggagagtcggccaagttttgtgagacttgacaggtatcaaatggttaaatttcctctgactcaatcaagttggctggaaagacatccttttccatcctctgccccctccctccctctccccataaaagagcagtgagtgggaggagctcagaagccccaagaattccccaagccctctccctgctgtggtccagatttgccggaggggttggagttttggttgctacccagggctgtgcccacccagcagtgcggcagccccaggcaggggcgtgctcccagtgccaggctcacagtggtttctccagtgatgttactcctgggctgctcctgcggggctggccagagcctgctcttcaccccgccctgcagatatttctggactccccaccgccacgcctcagccgaacacagctggtgctgcccgtcccgccctgccttctcgctgcctggcctgtctgcctgccctgcctcctccctggaccgccccatcccacctcctgggagatagaccttgataggtggagtaggggctgtgcagagcagtgagctgccccgctggagggcgaggatgagtccccaacacttcccgagggcacccacataggagcctgagccaagctgcatctggaacagtgcaggacctgtccctgctcggtcacgtgacgtggctctgggaatggccttgggagacaatcacacatgggaatggaggggctggcacttgcctggcctgtggtgagcatcagctgcaccatctcactgcaccctcacccgggcctgagaagggacagagcctaggagtcagggggcagggatgccaggcagatgtcttccattcctgctgtggggccctaagccagcaacggcccttcgcctggcatggtcactctttgacttgtcacagttccctcttctcacttcccatcggtttatcagctctccccggggagaaggccagggccctgagctatagtcctggcctgggggcccagtccaaacagggtcctgggagcagagccattccatttggccaacacagcttttaagttcctttctttctccttccccctccatccttccctccttccttctttcctccctctcttcctccctccctctctcccatccccttccttccttccctttgtccctccatcccttctctttttactccagtgccttcaagagggatgcagcagccacagtctccaccacttcccaggcctctctgcacatcagcataacctgcctggaccctgaaggcttttgccttttcacctgggtcgggcctatcttggggagaccgaggcaaatgggatgggacccctcgtttccttccaggagctcacagtctgacaggcagaccattgtgaattttactcagggccctccatgggatgtgctgggtcttgcatccgacagtctgggagggttaattgcactggggagagctggggagcttcctggaggaggtgatgtgaaactggccttccctccttctcttctccttccttttattgcagaaatgaccctccttcgtggggtcctcctccacctctggctttaatcttgctctcttccctccttctgacaggacattccacaccgtgtcccagagctctcctgggcggctcccttggctggaaagcccctcattcacgggcttggcaggtgctcccagtatctgtttgccaggagaatacaagtgcccctaagggaagtggcagatcctggcagcttccttaaccctttctctgcccccgttcctcctgtttccctttgacgagccctgctggcctggcacagtgagcccagtctgcacagctctgcagacagctccacagctgtggattaggatgtgggggcctctgggggtgattttgggtacctgtgctgggtgacaggtggtcggatgtgggaggggacattccttggcaatcagattactgaactccaggccagcaaggtcggtgtgaggctggagctgagtttccctgcctctgaggggctgtcggatgggctgggcgaggacaagtcactgcacctcagcttcccctcgtgaacatggggagaaccacatttcttgctttgaggcatggttgtgaagatcgattgaggccacacctgtgagaagctttgcaggctgcctgacctgtactcggcactggctgtgtggggacgttaccatcgcccccatcttcagtggtggttttgcaggaggaaagagcagtgttcccacagccctctttagctcccagaagcacaggcgagggaggtgtgcctgtgtggggcctggccctgctgagacccctggggctctgctgttgcccgcttagccggtctctgctgcccctttgccttccttggcctcggttctttgctttcccacggaacctcatggggtcattgtccaggccgtggggtgtgatgcatgtgaaaagctttagaagccaattccagggtttgcactcatgtgtgcgtttgtgtgtatgtgtgtcatgtgtgcgtgtgtgtgtgtgtgtgtcaggccgtgtgcacgtgtggacaatgtgtatatctccccgcgatctgcctgcacacatgtgtttgtgggtatacatgtgtgtttgagtgtgcacgcatgcgcatccttgcacatgtacctgcgttcacatgggtgtccctggctgactccacgtgcagggcctggtgtgtttgaggagctcgtggcagggcgacgtttctctccttaccgtgacccggccccagctggacgggagaggaggagatggcacgtggaacctgccggttgagcgtgaggctgtgggttctgccgcagggcaagccgggtccagctggatccgacaatttcatgtctttttaaactcccgggagggcgatgttacattatggctcccgcttctcctctatttacattctcccatataattgactcgtctgctctctctcagtgctttgccaagtgtcggttttaaagtttctggcctggctggtggatgtgcctcgatcctgcaggcggagcccacagcggcccttgtggtggttactactgagtgtcaatttgattggattgaaggatacaagtattaatcctgcgtgtgtctatgagagtgttgccaaaggagattaacatttgaatcagtgggctggggaaggcagacccaccgttaatcgggagggcacaatctaatcagccgctagcaggtgtagagcaggcagaaaaacatgaagagacgagactggcccagcctcccagcctacatctttctcctgtgctggacgcttcctgccctcgaacatcggactccaagttcttcaggtttgggactcggacttgctctccttgctgctcagcttgcagacagcctattgtggtgggaccttgtgattgtgtaagtcagtacttaataaactcctatatatatatatataatatatatatatatatttctattatttctattcctattagttctgtccctctaagggaaccctgactaatacagctctgctcataggcaggactgcaggactgcagccaccaggacatggcatagggaccagggtggcctgctggcaaaggacaggcagccggcaagactcctggattcctatcctggctccagtgtctaccagcagtgcattttcccaccctgtgcctcactttccccatctgtaagaagggggtggtgactgtaactacagtagggttttagtgatgtctaatgtattactcatataaagcacagagtaagaccccattactgcccttgccaccaggggccccagtgcagcaggaggctgtgaggtggtttggggccctctactcgctggcctgtgcgtgctcccttgccatcctgtgtggtgtcacactgctgcttccctcactgggtacgcaggagaaaaggtaaggcagtaagcaccagtggtcagttcagcggatcgctcgctgctcgctgcctctgaggctctgagcctgagccaggaaggtgcatccttgggcagtcgcgggccaggccaagttcagcccgcagagtggccctcccctgcctcctctggccacttgctctttacaaggaacggaggtccaggaggtggatggacctgtgcacctcccagctgcaggcctctgttctgtctctgtgatgtgatggcggtgagtggtggctgatcactgaaaggaggtgttccaggcaggggtgggtgaagttggtgcgggcggggtgtggggggggctttgccatctcagatgttgtttttgtgccagcccagccccaggccactggagagaagaccgtggaatgaatgaattggtggctggatgctcagtggaggggtgcgggtcactttgagttatccatgtcagatagtccgagccgtcacaccctcagcttcctatcagcagaggagtttttctggaggaatctcaaactaggtaataacctcatattagcagtaaatgtcaccatcctttgatgactcagacctaagaaatggaaccacagcctgacccacttttctcaaaatttaattactcagagctctggggacatgggctcagcctatttgccgagatgtctctgcccatgaaatggaagcttcctttattttctgtttcctagacccgtgttcttgtagggaaattagctcttctgtccttttcttccttgccaggacctcggcaatagggtttctggtggcctcttttttttctgtaaataaatgccacaaaatgacataaaaacagtgtggtgattcctcaaggatctagaaccagaaataccatttgacctggtgatcccattactgggtatatacccaaaggattataaatcatcctactataaagagaaatgcacacgtatgtttattgcggcactgttcacaatagcaaagacttgcaaccaacccaaatgcccatcaatgatagattggataaagaaaatatggcacatatacatcatggaatactatgcagccataaaaaaaggatagttcatgtcctttgcagggacatggatgaagctggaaatcatcattctcagcaaactaacacaagaacagaaaaccacaaacaccacatgttctcactcataagtgggagttgaacaatgagaacacacggacacagggaggggaacatcatgcaccagggcctgttggggggtggggggctaggggagggagagcattaggagaaatacctaatgtagatgacaggttaatgggtgcagcaaaccaccatggcatgtgtatacctgtgtaacaaacctgtgcgttctgtacatgtatcccagaacttaaagtataataaaaaaaatttttttaaatgtgtgtatgtagcaggagtgacttaagttgaaaaactctgacccttgcattgggaaacagtgatctcccagtgagaacacatgagcatcgtaaccgtcttccattggaagcgaccgtcttccattctgctggcgggtggcctgggggaccagcactctttcccgtgtgtgggtacagagggaacagatggggtccatatgcaaagacattgggtgtgtcagcaggtttgcttggcagcatttatggacccctaacatgagacggacctgtgcggggggcacaggtgagcgataggcgagccgtctgtgccctactgggtcttccgctgcggcgggggagtcagccatctgaacaggtggttttacccagtgaggtgcagtagaagtgggagtagggtgtggccaaggccagtctagggaggcacctgccagccccatggggcggtggccagtcagagaccagcctgcttctccagggccagccctttgggatgcatgcgcctgaaggcaggctcccattggtggatgcagagggcacgttcccgtgcatgttcttcctctggctcttgttcatattttcatatttacactggaccctgctctgagggtgctcccgtcagcacctgtgatcctcaaacccgcccttcgtgccaggtgggatcggcccattctgcagatgtgccagtctagctccttgagtccagctggcacaaggggatgaaaaccaccctccacgtcccagtggtcacacggcctgcatgttggtgcaggtccgtacagtcacatgcatggacgcaagcagcctctgtccattctcaaggccaggtgagggcggcgtggctccgctccctcctgtttgtttgctggcgccagcctccatggcagctgggtcccagtgcttcagaaggggagccatggccccaggcaacagtgcgtacctgaagcctctgcctcggtttcttcttcttcctttcagatgcataaaaatgcacatcaagcctgggcaccatctggtggcctctttattttttaaataaatgccataaaatgacataaaaacagtgtggcgattcctccaggatctagaaccagaaacaccatttgacccaacaataccattactgggcaccacctctacagaaatttcagaaacaattagccaggtgtggtggttcgtgcttgtggtcccagctacttgagaggctgaggtgggaggatcacttgagccagggaggctgaggctgcagtgagctgtgtttgtgccactgcactgtagcctgggtgacagagtgagaccctgtctaaaaaaaaatgaaaataaaaataaaaatgtacaccagagagcacggtggtctcagcttttccagctgtagtttcgtctttcttctggaggacagaggcccagccatctgcatcctcagcacacaattaggtcagtcactggggcctgttgtgggggtgacaggcaagcctgggtgtggggagagccggcccgttgcccatgggctctgcacagtgggtgggtgcaggtgcgatgacaggcgcgggacagaggggcccctggggggacttttctcgggtcctctgccttcccaccactgtgtccatcagggacattcccaggatctgtctttgctgctggttgtcttcccttgattttttgttttgttttctttctttggggatgatctgaaatcctcttcctgtgctatttctctgctcttcccctggggaaaggagagtgaggagaaagtgtcccgtgtccacgttcctgtggacgttccccttccttctttctaaggagggatggtgactcccagaggtattaaggaaaggagaaagtgacactgactcttctcagagcctttggctacagagtgttcccgcggtcgaggtggggtgaagggcgttctcgagggaagggtagggaacgatttctgactgcgattgtaagagctttctaggtaattattattcatgctatttagggtcataggtctcagtaatggtcgactaggtcaaaaagtactgcttgagcagtggagatactcagctgaaggttgagaacacacagggcgtccttgggccggtgtggcggtaacagtgagctggtgacagcaggcagacccagtgtaacacggctctgctgggtggggcaaggagatgccccaggtggagccatcgggagagggagagggggtgggagggcaggggagcgactgtcctgccagggatgccagtgtcatcctcctgcccctgaaacaggtggacatcatggcttctcagcccaggccatttggggacatgtggcaatgtctggagatgttttctgattgtcgcacctggggtgggggcagggctatcggcctgtagttgggggagtccgaggatgctgctctgcaccccacagtgcacgggacagcccccaccaaaaagactgacccagcccggaggctgcaggaatcgtgggatagaggaagcaaaggtgagattccgtggcctcaccccatggtcttctcatggctcattgtcagacaggagggagggcctcttcttaggccgggtccagcgtttctcctcatggtgtagaccagcagttcccaaactttaccaggccccagaatccccccgaggcctctcttaaggcacagattgtttctgactcaggaggccttgggtgggcccaggaaactgcatttctaacgaagtcagttcccagaccacgcggatgctggagcgtctgggggtgccacactttgcaaaccacgagtcgttctgcgtcctcgagcccagggtcttggatttcagcattaatggtggtcgtggggtggggagggcacctgccaggggagaagcgctggagagaagagaggagggtgtggctgttcctccacccatctcaggaacctcccgctttctttatggtggtccccgcttcacaaagcacccatggtgctgttcccctgcacacctggcagcggcactcactcatctccaaagcaaagaccccactatccggcaggtcttagggagcagggagaccctgggggtgggggtgagcttccagagaaggggtttcccatgggtttggccatgagattctgctgttgttgatgttcttattatgggaaggctcagacacagcgcagcaaaggtcgtgttctgcctggggccacagggaccagcccacagccaaccccgttccagccagaggccagcccacgcccccgcacccggtgattttgaagccagtccctgacatcagctgcgttcttcggtaactatttcggtctccgaaagaggaggacccctactccaaactcacctcagcttgctggccgtgtgccgtctgtgcgtctcccaagggcgcccccctcacccagacctcccctccatccgtactgtgctcggtccacaggaccaggctctgcagagccagggatctgtaggactgcaggtttatagggctggggatctgtagggccagggttctatagggatggtggtctgcagggctgggggtctttcaggcagggggctatagggctggggactctgcagggctgggggtgtctgcagggtcaggggtctctcaagctggggatctgtagggctgggggtgtgcagggccgggtgtctgtagggctgggagtctgtagggccaggcatctgtagggctggtgtctgtatggctgagggtgtgtagggctgggggtgtgtagggctggtgtatgtagggctggaggtgtgtagggctgagggtgtgtagggctggaagtgtatagggctggtgtgtgtagggctggaggtgtgtagggctggagttgtgtagagctggtgtgtgtagggctggaggtgtgcagggctgggtgtgtgtagggctgggggtgtgtaggactgggagtgtgtagggcttagggtgtgtagtgctgggggtgtgtagggctgggggtatgtagggctggaggtgtatagggctggaggtgtgtagggctggaggtttgtagagctggtgtgtgtagggctggaggtgtgtagggctgggggtgttttgggctgtaggtgtgtagggctggaggtgtgtagagctggtgtgtatagggctggaggagtgtagggctggggtgtgtgtagggctgggggtgtgtagggctgggagtgtgtagggctggggtgtatagtgctgagagtgtgtagggctggtgtgtgtagggctggaggtgtgtagggctggaggtgtgtagggctggtgtgtgtagggctggaggtgtgtagggctggagttgtgtagagctggtgtgtgtagggctggaggtgtgcagggctgggtgtgtgtagggctgggtgtgtgtagggctgggtgtgtgtagggctgggggtgtgtagggctgggagtgtgtagggctgagggtgtgtagggctgggggtgtgtagggctggaggtgtgtagggctggtgtgtgtagggctgtaggtgtgtagagctggtgtgtgtagggctgtaggtgtgtagggctgtagatgtgtagggctggggtgtgtgtagggctggtgtgtgtagggcttgtggtgtctagggctggggtgtgtagacctcgtgtgtgtttagggcggggtttgtagtgctggtggtgtgtggggctcgtgtgtgtagggctggaagtgtctagggctgggggtgtgtagggctgggggtgtgtagggctggtgtttgtagggctgggggtgtgtagggctgggggtgtgtagagctgggggagggtagggctggtgtgtgtagggctggaggtgtgtagggctgggggtgtgtagagctggtgtgtgtagggctgggggtgtgtagggctggtgtgtgtagggctggaggtgtgtagggctaggggtgtgtagggctggtgtgtgtagggctgggggtgtgtagggctggtgtgtgtagggctggaggtgtgtagggctggtgtgtgtataaggcaggggtttgtagggctggggttgtgttgggccgggcgtctgtagggctggtttatccgaatgcactgggtggccttgggctttagggcctgcacttttctgttttgtgcatcgatgtgggaggcagggtgagtccccacccgagggaggcggaggtggagctcagagaagcacagagccccgggaggcccccagccgggagggtggagggcggctgtgtcccatacctttagcctctcagctgggctgtgcagcgtcctcatgagcctgagctcagtgctgctaaggcagttcgtagcaccttcctgtgcctcagtttccccatctgtcaagtgggcatgagaataatacctgtctcacaggcatgctgagaggactcaggattcacatgtgtaaactgctaggaccaccacagctggctatggtcattactattactgtgtgtcccaggcatgccattggttcagaggtcacaggtggcccccatgaggtgacttgcaggagtctgctgagcccatggaattgagctgggcttgtgaaagtgccacaggagacaggaatgtgtgaccaggctggactcagcccgaaggctgtgggtgaggacccagagggtgccatgggtgctgtgcccaccaggctgtcctatggcacgtgggcttgtcagagcctctggcacctgcagcagggctcccctgtcctgccctccttgaatgtcctggcacagagggctggtaccaagacagcagctgcactgccattttgcagagggttggagttctctgggtctgtaaccctggcccggagttgcctggtgttttctgggattgactggaagcaaaggagggtgggcaggtccagcttcctgcagggtggggctttgcagggctcaccaccggatgccagaggatgccggagcttggagcctgggaccctcacagtggacaggtgcaggagccccggggccccaccttgcagcttcagattgagggtctgaggtggagcctggggcctgcggctcctcgtcctgcccgcccagtgcagcggcagtgaccagttgagggtactttgggaaactctgagcagaggagggtgggggcctgtgcctccctccagccctctgtccttctgcagagcctgtccctatcaccagctcacagtcacctcttggacttttgcaaagagagctcaggggatgaggagggaagcagtgattctcagggacaccgggagcttcggaggccgagagagcaggtttgaactcctggctgtgggatctccaacatgttacttaacctctctgatctgaggcagcttatctgcatatcagaggcaatagcaccacctacctggactggcagctgtgaggatctaaggaagcaatactggtgtggatgcaaagccctaggtgtgcccggtgtgcaggacatcgtcccgtgcagtgcaagcaccaggtgcactcgtggtattgataacgatgcctgctgcttttattgggatggtcgcagatggtatcatataattcttattagagatggctgttattttacatggctgttaatacggaggttgggaggcagtaattgtaacttttataaagtgtgaaagaaggactaaagctgctgtttgcagcttcaggcccagccagggacctcagaggatgctaaatggttggcacaaaagggccagaggttccaattggcagggcaaggggtgtacattatagataatatgggggacggggcagggggtgcactttatagataatatgggggggtgagacagggggtgcagtttatagataatatgggggacggggcagggggtgcactttatagataatatgggggggtgagacagggggtgcagtttatagataatatggggggtggggcagggggtgtagttaatagataatatgggggtcagggcgggggtgcagtttatagataatatgggggcagggtagggggtgtagtttatagataatatgggggttggggcagggggtgcagtttatagataatatgggggcagggtagggggtgtagtttatagataatataggggtcggggcagggggtgcaatttatagataatacaggggtggggtagaggggtgcagtttatagataatatgggggtggggtgtaggtgtagtttatagataatatgggggctggggtagggggtgaagtttatagataatatgggggtggggtgggggtgtagtttatagataatatgggggtggggtgggggtgtagtttatagataatatgggggtggggtgtaggtgtagtttatagataatatgggggtggggtgggagtgtagtttatagataatatgggggtggggtgggggtgtagtttatagataatatgggggtggtgtagggggtgtagtttatagataatatggagggtgggttgggggtgtagtttatagataatatggggggtggggtagggggtgcagtttatagataatatggggggtgagggctgtggaaccttcctctgtattcagttcccaggagcttctccagatgagtttcctttgcccgggggtgccaggcctgacggggaagggcagggggtgggacaggacctgcctggactcctggagaggactctgatgtcttctggggagggggcacagagtcagtggcctggcttatggcctgggggccgtttggcagatgaataagctcagacttagaaggtgtgggttcctggtgtcacaggctggtgaggagtggggagaccaggcctgggagtcctggcctgtcgggtgggcttcactgacgagggatgggccgggcacggagatgctgctggctatggcggactgcactcggagtcctgtcgctggggaaagcaaccctgcccgtctcttgccaccgtcaggggacggtgttcaaaactgggtcttttctcagcctcagtgggctggaggggtcccaggctttctaatgcaggggctttctgcccagggcaggctctgaggaccaatgttcaccctacaaccgtggtggtgggcagctcgcccctctgtgagcaggcagcacccacgctgggaggttctggaccccggcctccgcagcccataggtttcaccattaccctgaaaatctccttgctcaccagtgataaaggaaagcagctccgaagtgcagacacccgctccctctttctttccttttctggctgcccgggtctccagttctgctgggacagccctgggaggggcagcccaagccaagcctgcatgtgcccccgcccctgcacgtccccccgcccctgctgggcctgtccttgcacgccctgggccccttcacatgcatacgctcccacctccccttcctgcagctagggcctggccgattacaaacagctgcctagccctcaagcaggatttgcaggccccggagaggggctatagtccgagggcagtgtgggcctaaaggcatgtcgggggtcttaatggaagccgacgcccctcttgtaccctgcccggcttctgtcccctggagggtggcggggggtggggcaggcaccctgtggttgtgcggagagcagctgggaggctctggctccaggcctggaggggaggggctgctgggctccaggtgggctctggggtcctggccctcttcaaggtctctccggagcccggaaactgaaatgtcagttaaggtagaaattcacatgagacatacgagggaggggttcgctgagacttttctctgcaggtgaagagtaggactctctgggacttgtcttcttctgacctgaccccaagtgccttcacactgtgttttatcccgatggcctctgtgtaaggcaggaggtgtcatcccattttacaggtgagaagcaggctcagaggccctgcagctaggaagtggcagagttaggcctttaaaatagcctttgaggccgggtgtggtggctcaggcctgtaatcccagcactttgggaggctgaagcgggtggatcacaaggtcaggaatttgagactggccaatatggtgaaaccctgtctctactaaaaatacaaaaaacttagccgggcgtgatggtgcatgcctgtaatcccagctacttgggaggctgaggcaggagaattgcttgaacctgggcggcagaggttgcagtgagccgagatggcgccattgcactctagcctgagcgacagagactccatctcaaaacaataataataatcataatcataaaaaagcctttgagttgtgggcatttgattctgtccagctgcttgggaacatgcctgatatgagtccaggccttccgagagtgccaagtagccaaggaaggtggggttttggtccctatctgaaggacggttgcactttttttctttggggtcttcatccctgcagtaggcactgagagagaggagcaggaggaatgtgaagtccggtgaccccaccaacaaccctctgtcctccctgccctcctgcatcaccatggccctggtggcgggtctcaggagggagcggggccttttggatcctgtcactcagcagcctcttccaaagcccacagagccgtgggctccacaggcgccccgagtaccgtcctcgatgagatctgcggattagatctggagcctgtgcccagctgtgtgtgcactgtttgcttaagggggtgagctgccctggtctgagtcagtttttccattttagcgggaaggaaagagtgataggggaggattatcgccaggtaggtgctgcctgtttagtttcagccgacacacggccaaggagaaatggggcccagcaagccagatgctatagcagataaggcgcaggcgggccaggggtagaaatggaccagatgtttcaggaactgagctggaatagcatcacaaaacccctcctgggtcagggacctgggccacgatccacatctttaaaccatcagcatttcagaaaagaaaaatgcaaactctgagagaagcagtgccccaggcctgatttccaagtccaccctttatcctattagcagaacgatgtgttctatgtgccatgagagtcctcaggtttgccaaggaccaggctcaaaagagttttactcttggttttcacttaaaatggaccatgagtcctaaagaattgtcaaagtcctctgaagattcgctacctgggtaactcacctacgcctactgtatgccccagacagattctattaggaaaagttaggaagtttcaatttattagaaaccagtggaatagagatgctgctgcatatgtggtcttaggcatttctagtttcaggtcacctcagtagccagaattcactgtaaacagtggtaacccaaagccctagttcatgctcatgacatcaaagcctcaaacttcagtgtctagctagagaccagtggtgggagtggtgcccctggaggttaaggagggtattgcatcccagctctactagacattgtgaaaacctaggcttggcctgggttgtactagagtactcatggtgcgacctcaaaaccataactttcttctgtgcctcagtttcttcatgtgtaaaatggagctgatgatgtctctctacctcatagatttgtggtgagcatctaaggaggcacagtttagatctctatagaaacaggcaaggtctctttgagttcttcttgcatctcagagtgcctgccactgtgaggtgctcagtgaatggtcactgggttgaattgtgagtgctttgtaaactcagagggtgctgaccagcccagagaattgctatgttttgaagtagctctctgaagtggggtggagagcagatgttagaagctgtgaaccatgcacctgggttcttttaggggaggatggaaggtaccagaagagtgatctcagcttaccacacccaccactggctggcagaggtggggtatgctgggtttgctgaccccaaagaggctgggtgggagaggaagccgagagttgcctagggtggcctggggagtttggttggggaagtgtcggggacactattctcggtgctgcatccagggaagctgcccatcagccttccttggattgggatctttgggatcagggattcactaattgtcccacatctgacattaatctgggctcagccatgtgttgctgagcttcacacagctgtttgcaccaccccagatctttcaaggggtccccaagcagatgaccagtttgcagcagggcgtgtgtgtgaggtacaggagcctccagtcctgtgggcagatgctgacggatgggctgatggctcccagcaccaactgctttctgtcggtgactttcactccacccaccagtcctgtgaggtcagtacggttctcctgactctgtgaggacgtgcccagttgacttggccaatagggagcagagctgagacttggtggctctcttagacgccagtgtcccctctgtgctgcacccatacccccctccccatgcaaccctgcccagcccactgcatcttcctgagagttttcccagatgtcacccagcaccttcttagctgtaatctctccaggccctttcaacctaaatgtctttaattctgggatcaatcatctcaccctataaatgactcccaggagctcttccagctgtgctccagaattccttaagcagtgccaacctcgctgttcctccgaccgcttcttccctttccagcccttccctccagcggcttctgttctctaggatgctaaggcgagtcccaggatggcattcaactggacacggatgccagtgttgtgagtgctccatgctgaaagccgccttctctggggcggttactcacgcagaggcgggaacctgactctgtgcctgtctgttggcttccgtaatccagccctccctgtgctgagtttaagcccaaatgaaattactgggctctaagtatgtgcctttctccataaaatgtgatgcctggtcaatatcttggccaaaaaaaaaaaaaaaaaaaaattcctctgaaggagggtagtctggtctctttctagtcacttgtgaaaatatttcctgatctgatctctgcagtcgtgtacgcggccagcacataactgcccccaggcagggccctgacttccaggccgctcagggcagctaccctccctgggatatgtcaagctgagggcttcgcacattcttctctgacaactcagctggtttccagcccagtccggctgcctccttcttttccactttgactttcctaacagcctgggaagctctgaagcctgtgttttcaggcctgccggtgccagtggagctggcctaggcctccccagcacccttcctgacccctacgtagatgcccagtgctgcctgccaaggactttgaatctctccagtggggacattccgcgctccttgggtgatgggaggctgagggtagaagtgagggttgatttaagagagcagcccagatggaagggcctctgggggttgttctccaccctcatgctctgcagcccatatctctcctctgatctctctcccggcctcagctttcacagctctagagtgaggtggggacatggacggctgccagcttggatggggacgggctaactcgcatgaaaccctctgggctgcaaagcgatgctctgaatctgttgttaattacatcttcctcgggccgcaagttctgcaccagagttggtcactctaaacctggggctgttagctatagtagaacctcatctgcctcgttagcagagaccgatgagtgtttgctgcacagctactgcctgctctgtgagcctccatgtttggaaatttactaaaaatactgcctttgcattcaactcgccacacatttctgtgagcatgtacgatgtcaaaggccctgtgggtggctttgctgagggggtggttgaagagaccatgttctcaaaatgaagttcgacgtttcctgaacaactgttctctgcacgttgctgtgctgggtgcatccatcggacgcagcccctatctggaaggagggccgtgtgggccaagaaagaagagaggatgcctggcctgacctgggctggccctgaggctttgaacacctgggctcctcatcctggagtcagtgtgtggtggccgggggcctgtcccagaacgtagcacacttctcctctctgctgtccccatactgtcctgatagcctaagagggtgaagggctggggctgggggagggagtgtggcccaggtgttcagaggcctcgggagtctgctggggaggtgcaaggaggccgccctggccaacctggcagggctgggaggccatgggcacttgaggggggaggataaatgtcacttgagcattttcctcctcctccagttccttctttaatatctatttttaatgaaaataatacatttcattatagtcattttggaaaacaccaaaaagtataaagaagaaaataaaaatgactgtaaacccagattctcccaaacccagattatgaatacagagaagaaagtacagagggaaatgcgttgtggtggcggatggggaacgcctagaccatccctaggcctctgccctgaggacttggacttggactttgtcatgccacattagagtgcaggcattctctttcattcacgacagctgtcaaaagtctaatttaaagtgtcgcctattggatattggggtggctccccctttttgatactgcaagggcaggggtgttgaggaagcttgctgtggcgggtcaccagagctgccaccaccggagggtgctagaggccttcttgggctctccagggggaagggaacatcttgggggtgctgggcaagcagcagaccccctgcccaccctcgggaatcagtcagctggtgggaaggcagagcttttgccctttaaagccagggcactggcagaaatgtagggtttggtaaagacagcctgtcatgttggctgggaaagacaggattcatcattgaactgggctagagtgttgcagaatccgtctgggaaaaaaagattggatcctgccctactcttctaccaaaatgcattccagatggatctgagatgcgaactttaaaaatgaaaccataaaactactagaagaaaacatgggaggccaggttttacagtcttgggatgggaagcttttccgagtatgacgtaagcccctgcagttataaaagaaaacagtttgaccccataaaagtcaagattttctatctggccaaaagaaaagcaaaaaaacaactggtcaccgtaagaagagaatctacacctatctgacggaaagggggtcgacctgcaaggaactcccactgatcagtcagaaaagtccagcaaacaaacaccaagatggccgacacacatggcaagttctcaggaaggaaaatacaggtgacttttaaacatgtgagaagatgttagactttactcacaaggagagaatggaggtgaatccccagggagaggcactgctccctcggccagatggacagagaacagaagctgagagtctgtgacactggctcctgtgaggggcagtgggtgttcccatggtgccttctctgaaaggcatttggcaatatctatccaagcattaaaacacatgtacttggccgggcatggtggctcatgcctatatttccagcactttgggaggctgaggagggtggatcaactgagcccaggagttcgagaccagcctggccaacatgatgaaactccatctctactaaaaatacaaaaactagagctgggcacggtggctcacgcctgtaattccagcactttgggaggctgaggcagacagatcacttgaggtcaggagttcgagaccagcctggccaacatggtggaaccctgtctctgctgaaaatacaaaaattagccaggtgtggtggcgggcgtctgtaatcccagctgctcaggaggctgaggcaggagaatcacgtgaaccctggagacggaggttgcagtgagccgagatcatgccactgcactccagcctgggcgacagagagagactccgtctcaaaacaaacaaacaagcaaacaaaaacacacatactctttgaccagcatctccagttcccagaatgtttcctgcagatatacgtgtgtgtggagaaccgctgtgcagcactgtctggaagggcgagagccgtttaggtgggttaccatgcagaacaaaacaagcacagcagctaagaagatgaagttttcatttgctgaggtacaccaatctccaagatatgttaagtaaagcaaagcagaatgaagaatgttcgtcgtaatggatccatctctactcaaagaaaagacacacaaatctaggcttgtctatgattattgaaaagggatgcatacaaattgggactcgtgtgtagtttctgtagagtggacggctgggtgcacaggctgcaggtctctcctgaatcttttgaaaggggttgaatgcgttgttgttcagcaggtgggtctttggaaggtggacagttgtgtgtgcacaacacagagcagggacagggacgtggggctggcggctctgggagctgagaacctttccagcaagcaagcagctggcctttggctgaaatgacttagtcaattaaaacaacttgtggtcttaaaaaataaaaaggccaggcatggtggttcacgcctctaatcccagcactttgggaggccaaggcaggtggatcacctgaggtcaggagttcaagaccagcctgaccaatatagtgaaaccccgtctctactaaaaatacaaaaactagctggtgtggtggcacatgcctgtggtcccagctacttgggaggctgagacaggagaatcgcttgaacccgggaggcggaggttgcagtgagccgagatcgcgccactgcactccagcctgggtgacagagcgagactccatctcgaaataaaataaaataaaaataaaaaaaggacaaagacaggaaacaagatcaacccaggcagaggctggattgactatatatgatcactcagtaatgctccgaaaataggagtgtgcccctgtagatgctcagaactgaaactgtcgttgccatccttcatccactcattttacaggtggggaacctgaggctggtacctacctctcctggtgtcacttagtaaactgggggcagagaaactggcacggggtccctgggctcagcacaggctcctggggccattctgctcaggcccatggccttcttctctggagagtggcttttggcctcaggcgagtctgtccagaaaggagaattctcttcttggggaggctctgggccttgggtgtcagtgggcatgagcaggcttcaggggactcgttctcaaaggcacacaggttgggctggccagggacagtcccagcctggcatgcgtcttcctcttctctctcctggatgactgagagctcgtgaaggtcaaggcctttgcctctcttgtttggcctcagggtggggtaagctagtttgtcctttctctaccagggggctccctcactgggggtgcctggaggatggagtgtggctagcccatcgtgacccttttcttctgccagcgggtatggggacacaaacctgggctggccttgattcagcactgagtctgtgagatttgggggagtagactctttgggactcagtttcttcacctgtgcgatagggtaaaacattttggtccttcattaaattcactattttcttctttcacggtatacatgttgagctgcctttgcaaaataactcacatctcctcgaggatggggatgacatgaccccagtgctgatgacagggtgatgacacataaccattttttgattacttcctgtgggtctggcattgatctctagacattatgtttcagtcatcgggcataatgacgagcttgttttagaaaagaggaacatgaaggaaattgccaggaaccatacgactgagagctgggaccttggatctagctgcttatggtgactttcccagcacagaacttctgtgggctcagtgcctgtcctgttatttgatgttcacccgtggaatggatgcacacacattgtaccttattcacaattggcagcatcctggccatgcatggcacctgtccctagcctatctggtgggcactggaggtttggaaatgcctccaggccctctcaggatcagtggctgtggaacgctgaccaccagggccttcttcagggagtcagagggacaaaggatgtgacagcatttgcagtgggatgggctctgtttggtcactggtgctcagcagttgatggcttggaagtggtgtggccggtgacctccagccctgccagcaccaccccacaccctggtgctcacttgtcactcataactgcaccatctccatgcactgccccactagggcctcaccttggtgtccagcagcagggccacctgctgtcgctaggcttatctctttccacatcacaggtatccttgcagtcttcctttctggctgattctctgcttagaggtgccccacctcccaggaagccagcccagacacaagatttgaaggtccttcacctggaagtcctcaggcacagacagtcatgggagggggtgacaagtgcctgactctaggacagggggctctgtggagcaatagggatccgttcatcctagaaaaggagctgaaatccctcacttcctagggcgttttgtgtcttgtttctatgcagtccctgctggaacatgacatttcccccaaacttcagcctctgctcttcctaccaggtaggctgagctggtctgttgtgttggaacacagagctgtgaggggtgggaaggagttgagacctgctcatccaccttttcagctgacagtgttgtggatgtaccaggcactttgggtcagtcatagccccaaatgtcagaagcaaaaaggtgaagtgtggtccctgctctcgagtcctgtgtcctgctgggattggacaatcagaagatcttgtgatccatgtggaattgctatcctgtaggccagaatgatcaaacattggccatttcacatggttcaatctaatgctataagaataaacacataggatggccactgatccagcatgaggcttaaggagccctttcagaggtagcaatgtctaagatgaggtctaggagatgaataggaattcaccaagagtgggagtcgggggaagaggaggattccaggtctgaggaacagaatgtgcaaacgcctgatcactgtgtgatcttggtctttgcgtgaggcatttagcttggctatcactcaacaccaggtagggtagcaggagagaacagcaagaaattgggtgccttaaatttagtttaaatcagcaaaggtgtattggtgtctttacccacccattcatccatcaatgcatccatccatccatctatctacttgtccatccataccattaatctacccatatatccatgtatataccaacccatccatctaaactataaatccatccaatcagacacccactcacccatccatccaactgttcttccatccgttcacctgtgcatccatatcattaatctacccatccatctgtccacccatttgtccatactccatgtgtccatatactcatgtacccattcactgttcatccacctgtccacccacctattcattcaaccaaccatccaactgtccttccatctatgtatccattcatccatccatctacccattcatccatcaatccatccatccatccttctgcccatccaatcatccatccttccacccacccacccatccatccatccatccatccatccatccatccacccacccacccactcacccaaccatccatcccatttatccatttactcacctatccattcatctactcatccttccatccatccatccacccatcctttcacccattgatccagaccatatatctattcaatcacccacccatccaccctcccttccacctactcttccttccttccctccctccttttccctttcacttttcctttccctttccctttccttttcccttcccttcccttccctttccttcccttcccttcccttcccttcccttcccttcccttcccttcccttcccttccctcccctcccctcccctccccttcccttctccttccttccttccttccttctttccatcccttcttccatccattcatctacacatccattcatccatccatccacttatccacccatccattcatctgtccatgattttgtcatagcactgggctgcctcctctaccatagcgattggcatttttgtgttagggtggtttacgaccatctcagacttccactgtctacactaggcggccaggagtggctaacttactagtttctgcagtgctttgaatggtaccagatacaactagattctcaagctgttttgttggcttgaactgagagacaagagaaatccagttgcagcagcagccgacggtacagtcagaatcatcatgaggtgctgagtgctttttaagagttatgagaggaggcagcctaccacgccggaggaagtggggatgtggaagtaaccctggctctccgcagaggtggggtgtggatgggaggggagaagtgaggagagcattcctgttgacagtaagacataagacaactccatggtgggaactgagaactgggaatttaaagtccacatgttcctggatattggcttatagattcagagacgcaactcattctccaaataactttgttaacttttcttgactctaaaaggaacgcatactcattatagtacatttgggaaatatcaaaatgactttattttcctttcctcacattttttctttgcatggttgaactcatgtgcagaaacggtgttgtgccctgcacttagacacagagattttctgatgtcattatcagctctttgtaaatatctcaacggctgctgaacattccaccgcatgtttgtatcatagttttcttaactgttcctctcatgttgggtttgggttgtttccaatcgtttgctgttataaatgacacttggatgaacatctttctgataaatcctttctgtctctctgattatttccttagggcggattcttagacattgactcactgcatccaagcatagggacattttaaagcctttttattgcagaattacattccaaccaacaggcagttgtcacctgagcaactgtgccccaggcagtgttatccttaggtgttaaacccaggtggaccccatgtccgagaactggggctgctcacccatgctaagccagttacttccccctctctgctcctagagaggcagtggggagctgtgatttaatgcttgggccctggtgtgattgtttcctgggcctgtggcacgtcttggagacccttttaggcaagcccccgggtcgttgtctggaggatggagcagcacttcctgctccacaggctgtcccgagaagctgaattactcttaagagtggaaactcacatgcatgtagagctttagacctctcctcccattgagtcagaaaatgtaagggaatcttctagaacccagcagacattcactagatgctcattactttcccctccttccctccctttctctggccatctgtgtgctgagtccccactgcggtgatggagtggacagctctgtctgtgtgggggttctgctgacttgcgggtcttctccccacctggtggctgcactaaacgcatgtgcctgggcctgccttccacactgaaataccacaaggccgggagggagctgatgtctggaggtggctggtagagaggtgggcctgggctgctgtgaggagacgtgaagtcggggcctgctgcagctttggggccgcagcctgactcagtcgtctggggcagcaggttggattcttgcagatggattttttcagtgtgaaaatgagctccatgtggccccacacacttgtgcttcacccacttctgggagggcagacggagctgttcagacagctcctgcgcatgagacacctggagagcccccagctgcccaccgcggaggggaccttgaagcttggctccattaacccactgggtgtgcagactcacaggggaacgtcagctccaagtcctgcccccagtgcaccaatgtgtggtgcatcctttgttgcgtctctgggatctcgcacagtacagttatgtgttcattcagggcccatgtagctggttttgagtccatttctagtgttttgaaaacttgcaaagctctcgtaattgaaaaatgcctctggtcccggggaagtaatgtaaaatattcctcccaaaggtcacagtgacccaccacaatgttcctttacttgcatcaaagaactgaataaaataatttcagagctgagtcagcagagccagagaggaaccccactgggctcacccgcagctctaaagtggctcccctcggatgggtgtgaggaaccacacatctggacgagtgcgtgaagggttgagtggacagagaggggctttcatttgtaactggaagtgtattccttttagcttcctctatcacgttgtctgttttgcagcatttaataggtgctaaaccatctcccggggccaatttccttgtatttctaaatctgcccgttgtaatgaaaccgtaaaggcaagtgctgtccgatgccagggctggggaagaacaatgagccaacaggcgcgtttgtcttttgtccacattccacagttttgtctgaaagggcaagtgcaagctgcacttgggcctgaccaagggccctgtgaggacacttggtgtgggggggcccacttcaaatgtcacactcctgggaagtggagacattcctgagaagtgcaaatgcagttttgttttataaaggccagttaaaaattgcccattatcaaggcaaaggccaaagatccatgactgtcttgcagcttcagttagatatggagagatgttaaatatctatgtacttaattatgtaatgcaatttcctgctagatgccaattggcatttattattccattcatttgttataaaagcaatatgtgtccatgatagaagtgttaaaagctaccaaaaagtataaaaaagaagatgaaaatgagtcataatgtcttatttgtttaaaccattatgatggtgatggtgatgattatgatgatgttaatgatgttggtttctattaagtataaccaaacacattactaaaggaacattttgatgtatttactttctactatttgttccatgcctgtatttgcaaaattgggattacatactactttgtagtagttttaaacttaaaacatgatgagcaaatctcaataaattaggaataaaagagaagcccctcaatttgataaaggacattcatgtaaaatccacatactaaatgctttcaccctaagatcaggaacaaggcaggaacgtctgctcgtatcacacctattaacattgtatggagatcctagctggtgaaataaggtaagaaaataaaataagaggcatattgattggaaaggatgaagtaaaactgtctttatttgcagatcacattagtgactatgtgaaaaaaattctaaggaatctacaaaataacttctagaactaaaaagtttagcatggcgacagaatacaaagtcaatttacaaaaattcattgtatttctagatactagcaatgaacagttagaaacaggaatttaaaaagctgttacaacaatattaaaaatataaaatacttagagatatatctaatgaaaatatgcatgacttattcactgatgattacaaaatattgcatagataaatcaacgaagatcttaagatttaaatgcaaagatataccattctcatggaccagaagactcaatattgttaagatattattccacctcgacttgatctatagattcaattcaatgtcaattaaaatcccagcaggctttttaaaaatagagattgataagatgattctgaaatttatgtggggatgcaaaggacctaatataaccaaaacaattttgaaaaagaagaacatcggagggcttatgctttgtgattttgagacttgctctaaagctatagtgatgaagacagtgtagtgttgacagaaagacatatagaccaatggaatagaatcaagtccagaaatagactcacatgtaaataatcttttggttttccataaaagtgctaagatgctgcagtgagccgagatcacgccactgcactccagcctgggcaatatggcgagactccatctcaaaaaaaaaaaaaaaaatgctaagatacaatggtgctgaaacaactggatatctatttgcaatagaataagccatgacccttacctcaaataatatacaaaaattaagatgggtcatgtatttaaaggtaagatttaaaacttttataaagcataagacaaaagagaaaatcttgagtttttttaccttgagttaggcaaagatttcttagataggaaacaaaactatgagccattaaaagattaaaaagctgataaatcagactttattaaaacaacaccttatacttttcaaaagacactgttggaaaatggaaaggtaataagattggaagaaaatgtttataaaacacatatctgataaagaacttatgtctaaaatgcataaaacatggtcacaactccacagcatggaggcaaatgaccccacttaaaactgggcagaagattcagacaaatgttccagaaaagaagacagaggcgtgccaacatgcatctgaaaagatgtttgtcagggttagtcattggagaaatacaacttaaaaccataaggacatactgcaaaagtgtgagtgaggatgtggaaaaactatcacccattcttggtggggatgcaaaggggtgcaaccactttggaaaacagtttggctgtgttttataagattagcccttcctttaccacaggacaaagtaattccatgtataggcattcatccaagagaaatgaaacatgcgtccatacagagacatgtatgtgagcactcatgtgctgtgttattgcaatagcctcaagcagggagcagcccaagtgcccacctggtacggggacaaacaagcgggaatactgcttggcaacagaaggcatgagtgcccgaacagggtggcacgaaagcactgtgctaagcgagagaagcagacacgaaagacgcaggggacacggttccatttatatgacatttgagaaaaggcagaactgcagggacagaaaaaagatgagtgaggagagagacataagggaactcctgggggtgatggacatgttgtgtatcttgatagtgtgtgtgtgtgttggatgagggtgtggagggtacagcactatccatttgtccaaactcattcaactgcacacttacaaagaatgaatttggctggtgcgatgactcacgcctgtaatcccagcactttgggaggccgaggtgggtggatcacctgaggtcaggagttcgagaccagcctagccaacgtggcaaaaccctgtctctacgaaaaatacaaaagttagctgggtatagtggcgcatgtaatccagctatttgggaagctgaggcaggagaatcgcttgaacctgggaggtggaggttgcagtgagctgagatggcgccactgcaccccagcctgggtaacagaatgagactccatctcaaaaaaaagaaaaagaatgaattttactgcatataaattatacctccatgaacctgacttaagccacaaatgccttgagcatttcctcacgtttcaatattcccttattaatactaataattattaataaatgaaataaatggtaatattaatgtaacattaaggcacagatgagtggctatggtattctgttggttgtacagagtgtactgtgatatgtgcagtcctctccagttgggacatctgctttctttctatgttttttcagtattgcatgtaattgttgggtgagcgttttgattaagcatttgtattcatctcaaattcagtgttaaactcccataggagcataaagagaatgaatgtccctcagactttcagtactaagtgtcaaactgtttcctgagaggtgtcaatttagactcctgtgggtactgaatgagaatttgcatccttgccaaaaattggtcacttaaaaaaaaatttgtgccagtttgatgggagacaaagtcctcttgatttaatttgtatttagctactagtaacatcgaatgttatttatttgttcccccctttttctagttgcaagaacatctcctgtgtatttctgttgtacacatcttgttgtttattgcctgttcttttttgttgttgttgtggttctctattgctgcggaacaatcacttcaatacctggtggcttaatagcatcctcttattttgtgtgtgaatctgcgttttgagcacggtttgttggggaccctttgtgtgctccacatgacttcaggttgagtggcttgtttggggctgggggatccatttctagatggcttttccacatgtgtggtgttgatcctggctgttggctgagggcctggggttctcttcacatggagccctccaaggggctgcttgagcttccccacagcatggtgtcttggtcctaagaaggagcattccaagagacatgggagtagagtctcccagtttcttaaagcctagacttgtgagccagcagtgttgcttccatcacgatctatcagtcaggtggccacaaagcccaccttgatttaagggaggggacatagaccccaccccttgatgggctgttatgttagatactttgtggccattttgaaacttccacactttaaaaattttgttttggcattttttttttgttaacaaaattatgccagttgtatgtggctaagtatttacacaatttttatgaagtggagggatatagagaatgataagcagaccttccccttcactgctccaccaaacctcagcccctttccagaagtaacccctcaactctctgatcggtattgttctggacttactggtgtgtgtatttgcatggtgttttatcagatgacattgccatcttttacttattttaagatgaaagggattgtgctttataaggatttccatggcttaaggacatgttgggccatctctccatctcaggccgtctgcatgaaccccttcctgtctggcctctgcagcatatttggcaaatgcagctttgttgatttaaccagttcccgattgatgggcatgtgctttgttttcagttctttgctgctgtgagcaagccttggatgtcctggcacagagcaagcctttctgtaggattcagccctaaaggggggcatggcaggtcaatgcatgtgtacatctgcattgagatcctgcaaaattgctgctcccgaaaggctccttcttccactggcattcgtcttggagccacgaatgcacagttcctttgtttgttcattggttgatttgttcatttagtccctcctttatttgctggtgggggtggtgcttcattgttcacttattgtcccttagttggtttgttcatttgttccttcatttgctctttggttgggtcattcctgcatttgttcactggttggtttgatcatctgttgattggttcctttggttattttttcctttgtttgctcattggctggcttcctccttcttccttcctttgagcgctgtaccaagcatctgctctgagctaagctctcttctctgctgtggattaagggcaagacttgtcccttccctaaaggagctcacggtctgggaaatagcaagtcccttggagcacctgctgccagtcctgggcttggggaggccatggagtgctctggttgtggtttgctggggagacacagaagaggcagggacaccaggaagcggcggtccatcccctcgtgattggtggcagggcctctcatcttccttgagcttcatgaaggaacagtgtctctgctggatgctaccttgaatattcagaataacttacttgagagtgggaagcctgaaagtccagcctttttatccagatctcagctaccagtcatggcttctcggggaaggcaggccctggtattacacctcctttcctgcaggggaaaaggctcagggtggtggagctgcccttggttctcaggtacatccttgtgctgggttccactgagcatttcaggacagcaggagaggtttctcactgccttctaaatcccgaatctgcccacacaggcaggaatccagtgcatccagtagagagaggccatgtgcaaatgctcaggttcgtggagccaggctcttgcccctgatgctgaaatgataggagggtgaggtttatcagcgggatcttcggggtgatgacattccttcccccatcactccttggcacagccacccttcatccagccgtccctggggccattcttcaagcgcccttttccatcctgtagtgagccatctgtctatatccatccctccatcctttctcagtccggccatcttactccctgttcctccttcatctcttcacgtgtctgtgtgtctgtccttgagtgagtgcccagctgcagtgtgtggttgagacagtggatgcgggaggactgtgaataggctgctttctccacagctgcctggaacgccccatggcatggttccacgggaggggcatcttctgcctggcccttgttccaccgctgggggtctcaagattctctgtcgccccatagcttgggtatggagggcctcctctccatgcaaggcctcctatggtcctgaacatcctgtgaagaacaattccgctcttcctcggattgagcctcgctctgccctcatcatggccccagtgctctccccagcgtcactccctccgcagcagggtatctgcaggggtcttggaggcattctcccagcttgcagccccatggtgcagaggaaagattttggacccaaatggatgctgtctgaaactcaggtggtctgtatctctggtggtctgtggctctgaagccatgggcagcttgctctacctctctcacgctgagtttcctcatgtaccagtgaaggggccgacactgtgggccaagttgatgaataagggaagtgtggcagctgggcgcagagcacataacaggtgcacagtcctcagctgcccctcccccatggtgctcgggtgcatggatggtgcccagggtccagtcccccaacaacaggctcattgcagtggcctgccgccccggtgtgtgtccctgactcaggggtcccatcggcaggtgtgttggctggtgccagccccgggaagctgtctgcatccctgcagggcaagcacctgcttctcaccacctgctgctcctccatggtctcttcagagcctgtttttatcctggctgctgtcattcctgagctgatgtgcactcctgcagtgagcgacagagacccccatttccttccctgtggctgggcagctggaccacccaggatgacagcccaagtgatccaccaggactctcgcagtgcagacaaaatgaaactggccctcgctggaggaacgggtgggccgggccctgggtgaaggggctggagctaaatgccgttggaactgggtggcccctgaagtgtctgctttttgccaaggcagagcctgggaagagggagcagggatcaggctggttggtgttaccccctgctggggggcaggcgttagatctgtgcagggtgaggctccgaggcttgctgggtcagtcccattcagtggctctgtgttggggtcacgtggtatctgccctctgttatccgagatgcctttcaggccttcagttctcatcaattctcagttcatttggagcctcctcttcactacttgacacccttaaagtgataccctgccatcagcgctgggaaactgatcatccttttcttcctttcgctctctgggcctccttgtcttgtgtcttgtgtggaaagagcagtctccgaggccctaacctaccaccccgcagtccctccccgatctgtcccctgcactgtggggctggctagggggcactgccgggctggttagggggcactgccgggctggttgggggtactgtggggctggctagggggcactgcagggcttattagggggcactgcagagctagttgggggcactgcggggctggttagggggcactgtggggcttcttagggggcactgtggggctggttgggggcactgtggggctggttgggggcactgcggggcttcttagggggcactgtggggctggttaggggcactgtggggctggttgggggcactgcagggctggttgggggcactgcggggcttcttagggggcactgtggggctggctaggggcactgtggggctggttgggcactgcggggctggttgggggcactgcggggcttcttagggggcactgcggggctggttgggggcactgcggggcttcttggggcactgcggggctggttagggggcactgcagagctggttacggggcactgtggggcttcttaaggggcactgtggggctggttgggggcactgcggaggtgccccggtgctctccggtggtcagatctcaggctcctgccagccagtcccctcgcgaggccccactgccaatatgtccctcttacagataatgacaggcagcctctgggatgggacccactttgcccaggaccatggggcttgtacatggggggtttaggatccaagtcagtccaccccgggagtggggtggtgccgggtcaggtgggcctgtgcctgtggggagggtggtctagtgtcagacacagatgagccatagatcctttgcacagagaatctcataataagcaatgcagtgagagcagtgacactgtcatcttcaggaaggactaccccggaggccctttggacgggcccttcattcttcagcaaggaatgatgagctgggagccatgaacaagcgcagtgcctctgggtacctcagagcccactcagggcagccatccaggcgaaggttaacatagagcctccaggcccggctacaggccattttctcaccctgtgaaacactgcgggtcggtgcacaggtgtctggatgtggacttagctcagtcctgaaggctctgttgacagacaagctgggcaggtgggcagagtcatttttacaaaggttggtggcatggaggggtggggacagcaggccccttccaggtgcgagctccctgcccggcacacctgtacctgttcctccatgacccatggctgaggacaccaacctggtccccgctgtggagggcggagctggcatcctgactagccctggtcagttccaaactgctgctctctgctgtaccatgtccggtgaggtcctgaagtgcaaaaggccttgaggtggggccccaggggcttggggagggtggccatgctgtgcactgcacaaccccagggagcgctgttctaatgcaccatgatggggtcttgcaggacggtgacactggtgaggagatggacctgtgacagccagggcctcccgggaaaattccacaggggcagaaggacgggtgagggccgggactttgacatcaggcagaggagttggacgttgatgggagcttttaggtgggtgcatggaacctgctttggcgaagtggcagtgagcgcagggacaggctgggagtttgggctcaggtctccaggtctccgcctggcactgcagcctcggggggcagcgggagaggccgggccatctgccatcctcccaggatggtgtcctcggcctgtgctgcagccccaggccctctgtgcatttcccaccccctgcccctttgctttgctccctggtttagtcattgaggaagaatttcagtcgcagcctccagagcgcctctgtttttcgacctgctgggttgacctcactgatgaggccgcctgccttgcagggagggctggggtgggggggcctcagccctgggccagaccctccctggtggctcgatggctcggccctcagcccggcccttcaagaactgtggctctctggcttccaggaaatacaggaagggaactaggagggacagccgcccttccccggctctgcagggccctttacaaacagagcaaattgatggcttcgtgaacaatttctgcgagcatctgcgggtgccgggctgtgcggggcccctgccctcctgcagttcacagcccgtggaggagacacacgctgcccatggaacacacatagcagggatatggttccagtgatggggccacgggtgggaccggaatggaggctgccagctgtgtctggagaggccagcgtgtgcctgtggtttcgggagcctgtcactggctccagagtggaatagcgcttgggactggggtggactgggcactgagggtgactcccttgcagccccagcatggcaccagcctgcgagtgaccatgctcacctgccctgtacctcgattcctctttcccaatgaaggctcttagcccagatgctatttatgactcctggctctaaaattagagttctagcccgagaattgtgaagacctcaagcttggggttatttagagactctcaagtttttcttgaagttaaggatattgactttggggcctgcagaaacctcccctctcttcctcgctcttcctctctttctctctctgtctctccctctctctttctgtctgtgtagctctctctctctccctctctctccccatctctccctccctctctctctctcttgctctctgtctgtccccacagctgccttccccgaacccctgatccccagctcattctatcaagtccaccctggtcccttggctgtgcaggccacagacatttggcaggacgtggcctgggctcagtgtctgggaccgtggtgctgagtgtttggcggtgacctctggaggacgggccggggagctttaagggccaggcagaaatgctgccctgttcgggctgggggctggactgggtgtccccagagccgacagcactattcggctgggtgccagggacccagcctagtgcctcgccttcccccagccatgctgcctggaggccgggtcctgagcggagcactctgtacctgtgtcacccaagagctgcggcttcctttagccaccacagcgggcatggggaggggactgtgcgggtgaacatggggcagagagatcgggctgggccagcacacttccccagagaccctgaccccaggaccgacggagccagcccagtgccagggacagagttggaaataaccttctaatgagataaggagataaagatgatactagaatcctaccacactgcctggtggggtgggggagagcctgctgcccaggaagggcgcaggaatcccggaggtcaggcaggtgggcgagtcagaactgaggggcactccttgactggaaagtaacagtgggcactgctccggctcaggggggcaccgggacgggggagctgaggaaaagtcacccccaagtgaccacgagtgaccaggtggaatctgctggtgtgttgtggttctggggccaggggagcatccctgtgcatttgttggcaaaaaggagcaggctctgatggatcgcaaatgcccagcctttgggagcggggactgcggccagcacatcatccggtggggacagacagcctgggcttcaaaggcagccgacccatagccagtgcttaaagatattgaacttgtttaggggaaaaaaaggaattagagaaaaagatccaatgcagaccccagcaggcctcgtaggagcgtgcgatcccacggcctcagacccggcttccttcctgggcaggggaggcaccctcccctctgttcacagcttgctcttgctctgtgagggccgccatgagacggtgacagcagagtggcacgccaggctgaagtgggcttttatttagaaaagtagaacggctgtaaggtggtcaggggtcacctcctcccgtggcagtgctgaggctacaggtcccctggctgcaggagtcctcgaacaccggcagagaggaaacctgtgtggccatcccgtctcacctccaaaccttctgcccttgggaaaaaagtgggactttcctcttgagcccgtcgcgggctgatcaccattcctccctggggaggagggccaggccagggagcggggaactgatagctgaggaggcccacaccactgcacccagagatgggcactgtttagtagcagatgttgggatctaactctacttggcgttagcataaaggtggatacaccagtttctgtagatgttcaggcacagcttgatccagctactcaaactgtgtggccagtctgtctctctgcatcctcttacaccctctcccaggctgttgtgtgtagaagctgtgggttgctcagtcgttcagcaaacacggctgagtgcccagtgtgtgtgggctcctgtgcaggccccggtcctgccctgcatgcaagggctctgttcctgccgccctttgatactccctctccatcagggcccaccccacctgagagtgggtgcttgtgccctgggagcagctcattgcaccccctttcctggggcgccggcacccggtgggcttttctggctgattgtcttttgttctgaagacccgttccccactggggagatgaggctctgaggtcagcacttggcagggtgcccccaagcgtctcccttcctcgaggctggcaggatggtggtgctatggagcgtccaggctcaggttccggattccattctgaggacacatctgcgtcactcaagagggtggccccagacctccactctccttcccgaaagcagcggacttctgcagcgtttctgttgttggtggagaagcgttctttcatgaggggccccacttccaaggggaggggctgctgagcctgagagatgctctccagcagggcaggctgtgaccgggccgaagttgcctcttccttgcttctgagccctcggaggagtgctcgggcaccagtggacgaccaggaactgatttaagttcccgctaaaagcagccatctcattccatcagctcctgtaggtgccggagccctgtacagatgtccagcagccccccaggtctcggggggaaacagagcgttgctgggctgggtgctgtgatgctgccctgccatgtcttcagccacctggctgccagcattcatccttctcagcaggtctgtgagcctcaggccttaaggggagcccagggctccatcctcatgcctcaccagctcagtttcaagccctcatctctggttctttgtgctgggccacattagtccactgctggtccaggccaggagcacctgggtgcgctgagcactgtagtccttgcatgaagtttcagcatctcatgtcctgcagctgtgtgatgagagggtggcaagccctagagtgacatggaatgcggttattctgggtcagctctggaggagcagagaagctgacctccatggggatcgtggaaatgcctgttggggacagagaaagttatcctagcatggttagtggaggcattgttattggctggtggaaaggctgacaacttagtgcagcaattgtaaaattgccctatacctcctgattttcaccattcacttgctcatctgttcactgattgatccatccactcatccatccatccaccatctatccattcacccatccatccattcatccatccatccaccatccattcatccatccatccaccatccatccattaattcatccatccatccaccatccatccattaattgatccatccatccatccatccattcatccatccaccatccatccaccatccatccatccatccatccatccacccaccatccatccatccaccatccatccattcatccatccatccatccatccatcatcctcccattcatccatccatccaccatccatccattcattcatccttccatctgtccatccatccatccatccaccatccattcacccatccatccattcatccatccatccaccatccatccattaagtcatccatccatccatccatccaccatccatccatccaccatccatccattcatccatccatctgtccatccatccatccatccgtccatccaccatccattcacccatccattcatccatccatccaccatccatccattaattcatccatccatccatccatccatccattgtccatcatccatccatccatccattcatccatccatccatccgtccatccatccatccatccatcaccatccatccatccatccatccaccatccatccatccagcatccatccatccatctattcatccatccatccatcctccatccatccatccatccatcatccatccatccaccatccatccatccaccatccatccatgcatccattcatccatccaccatccatccaccatccatccaccatcatccatccattgtccatcatccatctatccatccattcatccatccatccatccatccaccatccatccaccatccatccaccatcatccatccattgtccatcatccatctatccatccattcatccatccatccatccatccaccatccatccatcatcatccatccatcgtccatcatccatccatccacccacccatccagccaccatccatccatccattcatccatccacccatccatccaccatccatccatccatccactcatccatccatccattagccatccatccacccacccatccatccattcatccatccatccattcatccatctatccaccattcatttatccactatccatccattcatccgtccatcctgcatgtctgtgttgagctcctcctatgtgccagtgctgcagtcttgcttgtatttcttatcagggtctttgtgctgccttttgtggtgcatgacacccacgcagaactcaaactttcatttccaaattattctccttcttccttcctccttctccttctcctttttcttcttctttctcttcctttttttcgagaccaggttatgctctgtcacccaagctggagtgcagtgacacgatcctggcttactgcaacctccaccacccagggtcaaacgagcctcacacctcagcccctcagtagctgggatcacaggtgcatgccaccaagcccagctaatttttgtatttatgtagagacggggttttaccatgttgcccaggttgatctccaactcccgagctcaagccatctgcctgcctcggcctcccaaagtgctgggattccagtcctgagccaccgcgcctggccatcaaattcttttcagtcacctcccttcttccttaaaactgaccttgctggcgtccattcctttataggtctggggacctgatgcctggttatatcctcatgaaaatgggcctctgggatgccagtgacaaatacttctacttgtaacagtgcaggggatgcaggggccaacttctctaactctgatcaactcggggatggacaagaggtattccctgggcaagcgaggctgtgcaggatgcctgacccctaggtgctgggggtaaacacttcttgtagtttaaagattctgatgcccgtggccttgtgctgggcccatgtcccataggtggttccagggaggctcctggtttcagtgcacacagctgatgggagcaagccacgatggggaaagggattgaatgcagggagtcaggtggatacagtctccgggagacccggcgtggtggggtcaggaggccccactccactatcccatttggggttgcaccaccatagcgaggctgccacccagactgcaggaagttgctgctgccaatgccgcctggtgccctgaagctggtcccaggccgtggcatgcgtgggggtctggacatgaggatcacctccatatgctgtgtctggggatatggccctgctggctgtgccagggcggaggaggctgccacctccctctcactgtccagctccatgagtctctctgattggcagattctaatttgcaccctgcatccttatgcaaaggcacctgggaagtgtagtttttagctccccagactgcagagcaggatggtgcctagaggagacagggctggagcttgggtggccaaggcacagcaggacacctgctattctctgggacttcatccatccatccatccatccatccatccatccatccatccatcatccatccatccattcatccatccatccatccatccatccaccatgtgatggactgaccccataggtgatccggtcatggcgagggttccatggaatcaacaaagtttttgtttcatgaagctttcggagctggccttctgtgcatcagatggtcggtctcaggaacctctgggcacagctgcatggtccttcactaaagagtaggcaccgggctgggtgtggagaccacacgcgtgatgccatctcgtcttcactgagcacctgggctgctcggtgggtcctctgggaactgctggtgatgggcccctgcctggctgtctaggagaaaagggcaaaagagaggggctcttgtttgttgagccgggaagtgcacgggccagtgtgcggtggccactgttgattctgcagcttctctcactggccttgacccactgggatccaccctctggtggggggtgccactggcttcaaacccatgtccacctgtccccaaagcttgtgctgtgtccaagtggagttttcatcctgatggaggctggaagaaaagctcctgaaaggctgtgcgccaggctcctcctgggctctccccaaccttttctttttcaaaaagtacttaatgttttcctctgctctggcacaggaagcccctggccagcaggaggggtggcactaggcctgggaaaggtctggtggcctcttaaacttgttgcaacagagatctgcgaacatgtccaccaagcctgctggaaaacagctcttgccttcagcaatggagaaaacaggcttgcgagcctgagtctgggaagagcatcacgggcttgttatggtgtgagtccaggaagccccggccgggatccttgctcccctgccccggccgctgccagtgctggaattgagtcttagggatgacccagggctcggcactgtgtcatcttcagcaggtggaccggcagctggcgcatcctctctttccacgggctgcatccaggcccagggctgcgcggtgcagcctcaccaggcactggcactcagcgtttcttctcaagtcaaaggcaaaagcccaccaaagccttctttgctggggccaggtgggaggtgccatacatgcccgagggggtgacagagctgggtgggctgtgccctgcttggcagccgaaagccacccaggaaaacagagaggccatgagaggcctggacgtggggtgttctgggtccctgtgccgcccctcccctttgtcactgttcccacgccgcagtgggaaatcctcagcttctccatgtttctggcttcttgatttaattggcagaggactgcagcaaagccaagctgtagaaatgacaccgtcagaggcagggacttcagaaccctgggacctgggtactgtggagccttccagagaactgtggatggggaggggcttcatgaatgagaaatgcggcttcgatttccctccaccctggtctccttcagagccctgcccaggctgctgtcttccctgcactgtcagctggtcatggcgggggtgggggtggcacaggttcctgtctgtacctccttgtggcctgcgcaccaagcacagtgcccgcgctgagtcccctggagggacagggagtgctggggagacagagtcctccgtctgggtgctcctcttgctgagggcctgctgggacaagcagtgacactgcgccattgtctctggcagccacctcctcccgtggcagtgccgaggctgcaggtgcccctggctgcaggagtccttgaaaaccagcagagaggaaacctgcgtggccatcccatctcacctccaaaccttctgcccttgggaaaaaggtgggactttcctcttgagcccgtcgcaggctgatcaccattcctccctggggaggagggccaggccagagagcggggaactgatagctgaggaggcccacaccactgcacccagagatgggcactgtttagtagcagatgttgggatctaactccaattggcattagcataaagagggatacaccggtttctgtcaggcacagcttgatccagctactcaaacagtgtggccagtctgtctctctgcatcctcaggcaagcactctccacctgctcaggagacagttgccagcagctccaggttcctgttctgtgtttggagccagcagagcagggaggattcctctttctcaaaggaaaaaagccccaggacggagcttccttatcctggctggtctcacgtccatccctgagctgaccgtctgggacagggcggtgtcatgctctgattggccagcagagggggcacggccaaccccgtccacatctactgggcagggcagttgccggctgctgggttcctccaactcccaggccgccccaacacacaccattctgtcgctgtgatgccaacttcgagtttattttctctgccgggactcccagggagcctcttgctcgtgggcacaggagcagtgcttttcccataaaactgaccttgttcagggcaggttcctggattcgcgccttgtggtggatgcaggtctggggtcctcgtggtgtgggggaaggaggctctggcagatggggccgtcttttgtgttggagggtgaccattgagctccctggtaatgatcacggcttcagtggccagaggtcagcttatccccttgcccttccctgagagcccctggatagagggtcaggaaccttctggaagggatgcgggggctgcccctcccttgttcttggctctgcatggtctggcgatgtgggcaggggtcttccagggcaatggaaactgcacacccgctgtaaacggtcatgggaaggcgacagacagtccaggtggataatgacggggggataaactaggccagtgacatccccgtgacctctggaggggcctcaggtggggtgaaggttctcagggctgcagggcagatgttgtgacccaccggttctcctgtgtcattgcacagcacaccataaggcggtcagctccgcagtgggccttctgtggccttccagcatctgcctgggctgctctccttacgtggccaatgagaagaggtgtctgggaggctgggtgtgtggcccctgccagcctcaggagccacgagagcgcagtgaggaaggagggcgtcgtcagagctgggctagcccgggtctgcccctggtgtgtggccgctggtggggacagggatgggaccctctgggctagcctgggtctgcccccggtatgtggctgctggtggggacaaggatgggaccctcctccgcagcgtggtgccctgcctcgcccagcacgcggctctaagctggtcctggggctcttctgagtgcccaggattcacagtggtgggggtgggggtgcttcctgtcatcccagcttccgggtgttcccaggtgctcctttcctctccgtggctaactctgctcctcctctgtcatttcagctcagccagcagatctcctgaaggttctagattttcacaacttgcctgatggaataacaaagacaacaggcttttgcgccacgcggcgatcttccaaaggcccggatgtcgcttacagagtcaccaaagacgcgcagctcagcgcacccaccaagcagctgtaccctggtaagtgccgcacccttctgtttggggcggtgggtcccgttggccctctggcctccagccaggagcagcgctcaagcctgcgtggtggcagaagcgggctcagctttccaggaagcccctctcacgagcccggcttcgtttcactgtagtgaaaaggcagttgcaacagtgggattttgtccttctggacgggactgggctttgtcactgtccttctctgctggatgtgggtgggtgggtgtggcccagtgcccttgaccttctatcagctgtgtctctggtggtagctgggccgccaggactccaagggcagaaagagtcggatgggtcctgagggatgaggttgagagaaacctcggggtcgtgggaaaggaagcacttccagacagaagcttaaccaggggcagtgacattaagagacgatgaatcaaacgtcgtgactcctagcaagagcatgggaggcttttaatgagagtcaactgctaaatgccgggtctctgcttttaattacatgcccggagcgggaagcagcattagctctaagatacagcatccaagttgtccctgtcacccagtcgtggggcggcacctgccacagttaattaaaccctctgggcttatctggacgtgattaacgagctgttgatggagaacctcatcgccttgacccagccacttgctcatggcctggactaaaatgagctcctctttctgattcagatgagaaagggacgggggatgtagggcaggtgagttcactttatgagatgctctgtaattattagaagacagcgcagcatctttttggtggacctggaggtgaccccggcattgaacccacgatcagggcagtctttgaatgctccgtggtgtttctgatgatcgtgtccccacggggcccctgaaggacaccctcttttgaggggctgtttctgcttccacagacgtgctctctgtacactcatccccagccattgcccagccctcctttacatccatgtgaccttgaagagtttgtctctgagagaatctgggcagttcttttcaagaatgtttttgagaacgagttatttcaagaaacaccttcgaggcaccgagtctctgccttgcagcttggtggaggtgaggtgaagtggcctgggacccctggcagcccatattctcttaaacagcccacctctgggtaccagagtggccctgggctgtggatccccagcctcaagcgtgtggaactcatcggctcagacagcctgtccccgcaaaggactgcagcggtttcgtttctccaggcctctggaggagcgttcataagcttctgggagagcatctcttttggaattagccatggaatcctcacttggaccttggcccagaaattgcacccttttctgccccatgacccccggtttagaattcgtgacctagagatcctgggagggctggtccagggaagggcttagagagctgattgccgaggaccacatggactctgggtgtgtgacacgctgaggggcaccctgggaagtaagcgctcctgctttccaaggggatcttcagccactttgtttaatcttctctgtgtcacccaattctggggtgtgggcaccacacactcactggactttgtccttctctgctggattatcttgtggccagaaatattacagtatctcaggaatacgggctaattattggataaataatctaggatcagctgggcgcggtggctcaccctgtaatcccagcactttgggaggctgaggcaggcggatcacttaaggtcaggagtttgagaccagcctggccaacatagtgaaactccatctctaccaaaaatacaaaaattagctggacgtggtggtgcgcgcctgtaatcccagctattcgggaggctgaggcaggagaatcacttgaacctgggaggcggaggttgcagtgagctgagatcgcaccactgcactccagcctgggtgagagtgagaatatgtcaaaaacaaaaaaaaaggaaaagaaagaaatggcttggccttccagcagtttctgcatagcaggctctctgtgcctctctcagcagggaccccatccctgagcagggctcttatctacagatcagttggtttccatgtctgtttccggcttttaaccagatgctaggtgagcgaggttaccgtgacacagtgaagcagtgagccgagatcgcgccattgcactccagcctgggcaacggagtgagtgagactgtctcaaacaaaacaaaacaaacaaaaaaaccaacacataatctagggtaaatttctgaatagtctgcgggatttttttttaagtccatgtttttttaagttttccaaagtgcttcacttgctcttccagagccttctgtgaattagcttacagagtagagtgggtccacataagccaattgccccattcatggcagatgaagctggaggttgcttgggaagtattgaagcagggctgtctacggagtcccttctgcaggtcccaaagtgttgggttgggacctgcagaggtcccaagggacactgttggagaccagtgtcataggacatcatttgcctttgaattgacgccataccccgcctcgccccttccgcccggccctccgagcaaactcgccacctgtcctctgttgctcggactctgtccaccccacttggcttgtgggcccctcagtggagggactcagaagctcacttcaggttttctgtttgagaagtgctcagtgtgtaggggccacacacaggaaagggctgtttgcttgggaccgacacggtctcgcgccagccactcgtgtgggtcagcctaagcgctaggggagctggagctgcaccatgccctgtctcggggagcagcagcatctgcgggattctagagacccgtacctgcctggcagttgtagaggtagaagagagggtgcagcccaggtggccacggcaaggcctgggctgtggggaactgagtggagcaaaaacagtatctgtaagtatctcttggcgagaggggaagcccgcatccaggcagctgtttccccggcatccgatcccctgacaaaatccctgagcaggctccccagactccccgaagagctcacacacccctcggcaaatcagcagccaagtggccctggatcacgggggtgggggtttggagactgagctgagcaggtgactgggagcctccacctgggtgcagtgcccgtccccgcccaggccgcacaggcgttgacctctgccctccacccacactggcaccacctggtcctgtatcccccactgggcacgaactggcagagtgatctgggtgccagggagacacagccatgaatagaacagatggagcccggcctcctctggcctgggagagcgaggttccctaggccaccctcctcaggggcaccgccctcccttctgtacaggggaagaatcctgttcccattttctgcacttgggggcaggacagaggctagaatttcccccctcattcgaagagggttttctagtcttgctgagacccagcagtctgggttctgggatctgtccgaccagggagctcaaccctgagccacggttgctgaccgatcatgggtgctgggttgtcctggcaccagggagatgaggctgcagggactgaagcccaggactgtgacacaggggctgccagtgaagcggggagggttgggacttccttcccagtggggtcccaggcctcggtcccctgtgtctgcagtgcagacatcgcctcacggtgaggtggcctgagaccctgaaggcagcgggcctggcttcctcaccaggcggcccgagctctgggatccacgtccccactgggggcccgggatggtgtgctccctgccttgttgacccagcactgcttgtttgtaatgacccagatctgagctgtcccctctgaggatgaccaggcgaggcagtgtcccccctggtcacctgacttggggaccagccccacctgagcccacttcctggatcagcacgcatcctcctcctcggctctggtgctgtgggtggggtcctctctattttgtcctctgtaggtgccttttcctccgtacccctcttcagaccaggcctctgagatttgcctcctactcaggacacccagggttgggtggaggccacggctctgcccacacccccctgccccttggccaacaccctgtcttcgcctgtggctctcctgcaccctggggcctgggctccagaatcagcctcccttaggcagaatgtcctgctgcccctcgctgcccccgccagtaccttcctgccagagagcaagggagcagccagttgcgctgggccctgggaccctccacaggattgcgctgagtgctggacgagggtggcagggacggccgaacagggtgccagctgcaggggcaggctgacgtgaggggaagatggaggcagcggtgggagggtagtgtcctcagcctgggggctttgcagaccctctactcactgagcagatgctccccactcccctgtacccccatagagcaggataggggttccctgatggctgagaggaggggggtcccatgaaataagatgcggggttcccacctgggaatctacctggtgagactggagaccgtctcttcctcactctatcttcgaccccatgggttagtccagcccagggaatgtaaacttcacttctggccatgacaaatgcagtaagtttgggtccaggccagaaggttccagaaccaagttatccctgcaggggctgccagatggcagcttcctctctggagcccctcacctgtcccaccccaatgtgggactgagagcccttctggtcgggactgaagatggctggtgaaattccttctgcagggctgcctcggtgcccctggatcctgggcctctgccctgggcctgccatgctccccttagcccggcccctcctgggctgccagggtccagctgaaacctcagccgccccccaggttcctggccccctgtccaaagttagccacaccccgcattcatttcctatcctctgacctctttctgccaccctgccccactgccccctgcattatttgcaattattattattattattattgagacagagtctcactctgtcgcccaggctggagtgcagtggtgtaatcttggctcacggcaacctctgcctcccaggttcaagcgattctcctgcctcagccccccgagtagttgggattacaggtgtgtgccaccacacccggctaattttttttatatttttggcagagacagggattcaccatgttggccaggctggtgtggaactcctgacctcaagtgatcctcctgccttggcctcccaaagtgctgggattacaggcatgaaccacctcgcccagcctgcaattatttaactaactggtttggtttgatgatttctgtttgtatcgtgggagtatcactttctgaggtcagggaccatatctgtcctttgactgtgtcaccccagcgcctggcaccaatcactgtttattaggggatcagtcactgtttattgatcacgtgatccactgtagtgagcaatcggtatgcttagtaactgtcggctcagtatgatttagtttcaacacaaatgcatttattgtactcctactgcatacctaaaatgctctagtgcctttggacttcagcagaagtaaaagtgaaaagctctggccgggcggggtggctcacacctgtaatcccagcactttgggaggccaaggcaggcggatcacgaggtcaggagatcgagaccatcctggctaacacggtgaaaccccatccctactaaaaatacaaaaaaattagccaggcttggtggcgggtgcctgtagtcccagctactcgggaggctgaggcaggagaatggcgtgaacccgggaggcggagcttgcagtgagctgagatcacgccactgcactccagcctgggcaacagagtgagactctgtcttaaaaaaaaaaaaatgaaaagctctgagggagtccggagcccacccctcaactgtgacttttcttggagaaatgaaacatgaagtgttcgacagccgattccctcctcccagagtgcccggacagcgtagattataaagtatcagcgtcccagctcatgtcatgactcgaatgggccatctcacagtgacaataaatccattgttattttgccaggagagagattaatgttaaacataatttatcctttcgggttttatctgagctgagaaaatttgttaccatagagatttcaaaacttgagaaacggcattttaatgagctgcggagatgggggttcgtgggcctagcggtgccttgtgccggagacatgagtgtgcgcaactcgttctttgatcttttaagacggaagaatgactctggcactcagggtggcggtggggtggggacgggagccaggtggccctttgcaatgagagtgagggagtggactcagatggtgactgtgccatctgccctgggtgtggacggggacctgagtgcttcaggtgagaccccacctggccctcagtgccccatgcactcccagggatcacgtggggctgccatggtcctgctggcagccttgccatatggggtccctacggtgggtgggcatggcaggtcccactcccttgccataggtgggaccagctaaggctgtcatctccagagtcccccgcccacatcccctcatgtggaaggatgatgcaaagccataatcgcagcagtttgggaggccaaggcgggtggatcacctgaggtcaggagttcgagaccagcctgaccaacatggtgaaaccccgtctctaccaaaaatacaaaaattaatcaggcgtggtggtgtggacctgtagtcccagctacttgggaggctgaggcaagagaattacttgaacctgggaggtggaggttgcagtgagccgagatctcaccactgcactccaacctgggcgacagaacgagactctatctcaaaaaaaccccacaaaaaaacccaaaaaaacaaagctgatggcttgtgtctagacatgggagtcctgagccagttcctccgtgaaacctgcctttcccagatggccacactgactgtcatcacccccacctggggctgtccccagctttgggggcaggtgccttggccaggcccacctggggcccagtctcctgtgggaacagctgagtcatggcttggagctggtcaacacagggtgcccggccacagctgggcagccctgttccctgtcagtgccttagtgagagattcgtgactgcaggatgagcctgctgctgtggcagcttccagcgctcacgcaggctctgggttggcctgtgggggccttggagggtttgcctggagtagtggcccctcattttgcagaacctcaggagatctccctgcagcaccttacagaggatgcagaggctgtgacaggcagcattctcctcccccttggaagcctcaggatgctgtgggacgagggggccttcagcgtccccttcctcccagtgttgtacctgcagctgtgctggagtgaccaggggcagaggtggtgacgctgctgcccgccttgccacaatttcgccagcagagggtgctcatggatagccgccttgcaggcgctgctgccgcagatccagactctgctgccccatggggtcaggggcctctgggccacctggttagcctttgttcccacttctaaagaaggggtgggtctggtaatggattcacgatggctcaagcccacccaccagatcccagccctccgtagtggtgctgcttgtggggcggctccagcagcaggtcctgggccccccttccttggcatgtccctgttgacaccctcctgggacaccgctccttctggcccgttctgagcagcccacagccttaggcccagcacttttggctggcccaccggcatcaactagccacaggccctccatcagccccaggctcttggcagaactgcaggtggcccagggtgagagcatcgctgcctttgccaccaggatcgatggacaggaggggctggggctcccggtcatgcccacggatgaggggcagatatgtggagtgggcttaggtgcttgtggccgggccagcctgggtctgccttttaatgacctcaaattgctcctggcatgtgttgtaagaggtaattcctcccgttaacatactagggatatatttttttctaattttaaatttggattaaattcttttgatgaatttccactttttctctgttttgcgtatcaaccaggaaatgtcacaaagtacaattctagtggcggttcgaggctgttgcttcccttctcccttcctctctctgcttcctccctccgtctctctccctccctccccctccctccctcccttccttgcatgctgagtggtgtgacctcatggagcgtactaagacacctcagaagcagcctccatccagaggcagctcacagcctgagaggttctcctgagggtcaacacacagatgtgttaggcgcaggagctgagggcagggtgttgagggctcccagctggaaggaccagttgtgtttcatggaggagtttgcatttgcactgagtcttgaagggggcaggtttggccaagtgggagcagggaagggctgcaggagcagtttgatcaaggggcagatgtgcagcagatggcagtgccccacgacgggcagcacagcttcccagggtcccgggctggcttgtttgcagagagccatggctgggtgtggttgcaggggctccccgactgccttctcacctctgtgctctgttccagcgtctgcatttcccgaggacttctccatcctaacaactgtgaaagccaagaaaggcagccaggccttcctggtctccatctacaacgagcagggtatccagcagattgggctggagctgggccgctctcccgtcttcctctacgaggaccacacggggaagcctggcccggaagactaccccctcttccggggcatcaacctgtcagatggcaagtaagtgggcacttctgggcaactgtccccctgctggaggggggatcaggccagctcataccactgaccagatgtggggcacagtagaggacgtgcagcagccggtactgagactcccacagacgccgcagcagaggagagggtgctgggcttggagtcctgaaacctgggttatggtcttgattcatcctctgtggctctggggagtcacttctcctccctggccctccattatccctttgtaaagtgcactaaagcacatcaaattcccgcctgtttgtgtcagaagggacacaggaaattgtgaggttatacccaaccttttccagaaaggatttcaggtatccttcaaggacacaggtgtgttaggagtgggagtgagcatgagaaaaagcgggtcgtgccagcacgctctgttgggtgcagacctcaacaccaggggttgtcagtctcctctttcgtggtcagcacgtgtgaggtcatgccctgataatctccgaacgtcttcaatacatgatttctgaattcttcgccaagactttcagacagatccactccttccaccatttcccgtccacacccggtcttctctggctgcctgcagtttgccatcggggttcagagggcacgtgacaagtgctcgcatgcacacagcaaaatacaacggccgccgccctgccattctcccgatggctgtgaccgcaccgcagggaccacgctcccagggaccacactcctgggtcccgagccagtgccgagtgctgtgtgctcccccttccccctttcacttgggctcccggctgggcttccagggttcagacagccatccttgtctgagggacgagggttctggggaatgagtagatctcatggcacggggtgttgccctaacttgtctgattccagaggctgggccttgatctgctccgccccaccacgatcgtgcaggaagtgggccttcttcctgtgtctcgaggaatttgcagcaaaattgcttgagctggcatctgtgatccaagccctgtcttcaccatctgtttctttgcaggtggcacagaattgctctcagcgtccacaagaaaaatgtcaccttgatcctcgactgtaaaaagaagaccaccaaattcctcgaccgcagcgaccaccccatgatcgacatcaatggcatcatcgtgtttggcacccggatcctggatgaggaggtgtttgaggtgagcaggagggcagaccaacccctgtgcccaccagggcactcctcctgtggagccactgtgactgctgttggaggaggctcctcgggccgggaccggctggcggtccactgtggtcaccgtctctgttggtcagaagcctctgctgccatcctaagagatgtttgtggctttcggaaatggaggggccagagctgctgccgcctgtaggccgcgtggggatggcagtggccgcccttgtcccaagggcccagtacgtgagtctcctgggtgctggctcggaaaggacagggcctttgtccagcctcgtgctgaggctcctggaaacctgcacactcctgccgtctgtatccgaggccatcctgggacaggggcagctgtcctctgggtgagcttgaagggcagagctgggccaccgtgtggacgcaccagggagacctgtgccgacccaactcgggctggcctcactccagtctagctgtgtccagccaggggccttgctttcccggggaatgcctcagaggcttgggagtcggggcctgagctgagtgggctctgggaccctcacttcagcccatggagcccttcataggttggggttctgcgtgagagagcaggagaatgccccgtcccactgccaagaaacaggttgagagcttctgcaggtgaccagtgatccccagctgccccgggtgggggcgttggagtcaccaggagcctgtaggggttccagggccctgcctcctggggtgctggggcgacagcctgcacagggtcctggactctgcccttcccaagggcactgcagtgaccgttgcctccgcggcttgggttaggcggcagccaggacccctccactgggcttccttgtcgtttatgtaagttgggttttgcagaagatttggttttgcacccgggtctctgtggctaaaacctgttcgaaagccactggcttaaatggcctccgagggccatcctggctctgggatttcctcctccagggctgcagagatgggacaagttagggcagtgtctcctccctaaatccccgagcgctgccgtgagctcctggctgtgtctacacatcggttctgcatccggctgcccccgtttcatggctgaggtggggtccccagggccatgtttcttctcggtgactcggggtcaccaaaccagacaccgtgttgactcaatcttggtgttctgccaagggcacgcgaaggagacatcacacgtactagttcatttctgtgttaaagatatcgatgtctgctcgtggggacgggcacggttgaactgaccctggggctttgagcgtgtgagaagagggcaattctgaaagtctcacctttctaggaaatcatactggggaccacgtagtgtcactgtgaactggacattcagcagagtgctggcctcagggcaagcccacctgggctctgtcgattgttggatttgggcctcgggcaagctgctctgctatttctctgtcttagggtctccgtctgtaaaatgggatcacagatgtggctgcttcatgagctgtggcaaaggttccatgaggttgaatgcagtgacacagcagcgcactgtctcccttataggaagccccggcttaatgtcaaattcagttgttctggatattaatacagtgtcaaggcagacagaaaggcaggacacagccccgcggcccagtgcagaccgcagaggaatgatcagagcagccacgctctgtggaatgagatgggcctgttagaagaaggcagggagtaggtgtgaaggtggtggagattctgctgaacgtgcagttggctctgggtcagtttccaggaagctgtagcctggggcttcggtagagcagggcgggtgcttggatcctgctggcacagccagattttgcaagctattgagacacaccctccgggcacacttctgaacagacctgcctaggcgcctggaaggaactgcgggcacaggagccgtcctcagccaggcaggaggcagcttctgggctattctggggagctggggttaaaagctgccttggagtcacacagactgggatcaagtgctggttttgcctcttgctggtgggaggatctaggcaaagcaggtgacattgatgagctttgagactcatttgtaaaacattggtcacagtaaggctacctgcacagctgcaggggaggttctgggcttggcctgggcacctgccagagtcacccccaccgctgcctgttgttctgtgggtcgaggccctgcctctggatgggaggccacgcggtggcctcgggttttttttttttttttttttttttttttgagacggagtctcgctccgtcgcccaggctggagtgcagtggcacgatctcggctcactgcaagctctgcctcccgggttcacgccattctcctgcctcagcctctcgagtagctgggactacaggcgcccgccaccacacccagctaattttttttgtatttttagtagagatggggtttcactgtgttagccaggatggtctcgatctcctgaccttgtgatccgcccgcctcggcctcccacagtgctgggattgcaggcgtgagccaccgcgcccggcctcagggttttaatgtttgtcatgcagtctcttttttgtgctgtgtcaaatctttgtaatttctagtgtgttctgttgtaaagattcaggaaaaagctttattttatctttaaaaaattaggatcctaaaacaaatagtgcttcattgatattctaactgagcaggaaaagctgttttcccaaaagcagatgtatgtgaagagtcccttaccccagggaagcactagaaatccgtgttcagggctgggtttgcatcctggctccactgtttcccaggggtgagatcttcggtgagttgtctgaccgctccgagactcagtttccccatctgtaaaatgacaataatagtacccgccgcagttttgtgtgtgtgggaggcaccgtgagaattaatccatgaaaaatgcctatgagtggccgacagcaaacatgccagagtttacctcctttatcagcaaaggatgaaggtaacgtgtggttttcaaaaggaaatggctcttgaatggaggaggctgttttcctaccctggcttgttcttccagggaaccgtgcaggtctcactctgcagctggcgcctggcaggcttctggtcgaacggtaagtcacagataggttccgaattctgtgttcctggtgagccattttttcctgtcgtggaattcgatttgagccagagtggctgccaggaacgagaggtttttattgaccacaagttgttaatggtctggaggaggtgttttcctagccccagagtttcctggctgttagctgtgctcacgttggaaaattggacctgtctttcttaatgaagtccagcaggatcagcgatgccttcagctgccccaagcatcttttcttttttttttttcccttaacagtgtgaggaggaagttcggtgagttggcctcagagtcccagccaccttttgtctcattgcaagtggaagagaatttctatttcttttgaagtaaaagtgatttatctctgctttccagcgggctctgcataacgacacctcccatctcagtcgcttggctgctctagaaggctctaaaaatgaggggctggcactgttgagacatattcctccagcagccccaatcttcccctggaaggacaacttccgctcattcaaagccaatctgttctgtgtttagagttatactgaacaaggattcaccaaactctaagagagttcgtttaaacagggactgggggtttttcctggggtgtctgtggccccacagaggccccctttgtccaaagtgatgcgcccttgagggacagagggagatagagactctcagggccaagacacatgtgtctcctgcagtgcaaggccagggctaacggctggtgctgtgcccgcagcctccctgggtatagacgcggagcctgagtgtgtggctttggccgtgtcagcagccccctgcgcctgcagaccaggccctcactgcctcccagcccctgagtctggttctagtggggcagccttgccatgcaggggaggtgggacactgctgtccctcacagagccacgtacggaggaagtgatgggcatggagggcattctgccggcaggtccccccagccttggacttccttccctgctggtgacttggagccccgtgtcctcatctgtaaaatggggcgatagggccaacgctgtcggattttgggttggtgagatcaaatctgtgttagatgtgagtacctccaagggccgcagggaaccaccttgtcctgggtctttggcggtgagagctgctctctggcccattgtcagtggtcatctgccagtgacaatgggccagaggtggcccatcgtccacagtggcactgtcatgagctgtcccttttctcagcttttctggactccccttatgaattagatgctgtgagtcctgccataaagatgagacccctgggccttcaggaggatggagccgctgagaggtccatggggaaagaactggctgagggtcccgccagccccagctagggcgagtgctccggggcgcctcctgcccgtacctgcacctgccatcacagcagcccctcagcaaggtttgggttcgcaggcccctgtcctcctcccctggcagagtgcccctgtggagctggcaggagatccccctggcatgggctgtgtctcctaggatggggtgggatggccaagccctctcatgctgcctgttcccagggcgagtatgccggagctgcctgggacattgtcctgggaagttctcatcccaagtcttgtcccttctggatgtgccggtgccctggggccagcactggtgtcagaggaggactcagggcattgctccctaagccccaggtttccagaggtgctgggcaggcccaggaccaccgtgcaggaaggggaaggcagaggggctgggctccccccagtgcaggaaggtctttttatccagggcatagtcaggaacgagctttgtgttttcagaaacatggcctcagtggccagggtgagcatggggcatcctgcagaaggtggggatgtgtgagttatcttcacaggcaaggagaaggcggatgggagagcagccagggcccacccccactgtgccctggaagaagagagtcttgctgccacttcatagcttgggaagccagcaccagggaggttgagtcacttgcctaaggtcactcagcaacatgacagcagattgggacctcggaaatcatgacacaactgtccccagcctggaagggatcccggggaccagtggcaggagactggactcaggctggcctgacagcactgtgggcccccgcctggcattctgttctcctagccctccccgcacaggccctgaggaccctggagtcccctggcccatggggtctgtgaaactctggaaccttccaggaagagccagcataagctgttagcaagggcagagggcccaagagtgtccctcccgtgtgtgacaggtgacctggacccgcctagcccctgtcccagcaccttccccagcctgtggcgggcagcacggggctacctggctgctgatccggagggctccatgcacctctctagagtctcacctcatctatgggccctgagctggcccagtgagccacgtcagggaggctgggaggcgggactaagagggggcctggggtgcctctgccttgaggcctgccgtggaaggcccctcctctgtgggtgagctatgaccaggaggggggccgtggaggggatgagaactgccccgggggacagccggccagcgagttctgggccaggagccaaatgtgcttttaagctgttgaaggtttcaaggggcaacaagaccaaacagactataaactccagctctccctgcaaaacccctgggtgctggcgggaaagtgatggcgtcggctccaagctctaacggtcctccatctgtctgccttcatttcagcctttgaaaaacaccgagcggtttacctaatccctgattccctttttccaggggcctggcttttccactgacatgttctttctggaatttcactctccccggggcaggagtggggcctgtgctgagtgggcctttctcagccatccacggaggcaccctgggattcctgtgagtgggaacagaggagccctgggattcctgtgagtgggaacgtcccccagggcgtcaggcccttcagtgttagggcctcgaaggggagagcaagggctttgttagaggcccaggtccacgtttgctgtaacttcccaggctggggcctttggagcctctggatccttccagaactaccttgttgctcactggcttgctgacggctgcctgggctgcctgtgggacacagcaggtaggactcaggcttgggtctagggcagctctggagcccgcagcccatcactgggcagccggggaagccccaggggagggaagcgcaaccgtgaagatgagcagacttcccggcacacaggcgggcgagactgggtgctgagctgtgtgcggctggcggctccgggacgtgaggggattctgctgaggacctttcctcctggtcgggggagggctgcggagctgggaaaacccacctcgccagaccttccctgggccctgctgctcagcctctgctggatgagctgcgttcccctgtgagaggactggggaggtgtccggggagggagggctttccccgccttggaagctgcccagaggggcacatttggggggctggctgggccaactctgacttcggacatgagatggatgtgatgtgtgcacctgggcagggcagggcactccaccgcctcgggcagccccaggcaccctgctatgtcgtctctgtgcctccatcactggccaggcagcatggataggccaggtgtccctctgccagggcttctcggaggcagtgtgtgcctgcccctcccgagtcctggcccaagtccctgctgctgcctggccagtgcgcctgccattgcggctcagagcaactcccggggtgggggctctggtgcacctgcactgacacaggacactgtcacccttctaggtcctcggtccaagacccgcatctacccagccctgctgtctccttagcatccactggtgctttctgtaggatccacctccgctgtctcaggccacctgtgtggcagcccagaccccaccctggcagtgctgaggcagcccctggcagcggaacaccagcaggtgaagggcagaggccccttgtcgtgtcttcagctctgcctgctttgctgagacctcctcttgcccctggaagggacaaggacattgcactctgcatgatctcctgggactgctgcaaccaactgtcacagcccggtggcaaacagcagagatttatcctctcccagctctgggccagaattccaagatcgaggtgtgggcggggccgtgctccctctgaagcttccagcgggggactctgcctgccgcttccagccccgggtggccccagacactccttggcttgtggccacgtcgccccagcttctgcctccgtctttacacagcctctctcttccccctgtgtctctctgtgtgacccacaaggacatttgtcgttggatttagggcccatcctaatctaggatgttcccatttccagatccttcattccatctgcagtgatcttatttctggacaaggtcacctgtggatctagattctgggagttccgacctggacccatccctcggggccatgattcagccacttccctacaccagcgtggaaaaggggtttttcgtctcttaaattgccacagagcacgtgtgcttaaaagtgagcctctgggcatgcatatttggggcctctagctgaggcttcggggtgggctgctgagctgtgcctggctgaggaggggtgggggggctactcctggctagcaggcggttggccaagccccgtgggcatctccctggtgcagtaggcagctgcctggctggctggagccagtgtgcagtgtggcattggggtgcagtttggtatcggggtgcattctcatttgcagttctggtctagggaggcctgagtggtgagcgagtgaggcctggactccttcctgctgcaggtggctggtgacccgcctggtaggtgccagtgaccctgctggtgatctgtgtggcacccagcaaggaggggtccagagaccccacagggttgggcagggcctgcctcttcccatgtgctgtggggcctggcccctcctgctgcctggcccgaggtttgggcttcaggtttgttccatggaaaatgtgagccacagacccatctcccagcccagacaggaatgatgtcatcttgggagccggccttatccaaagatatcttgctgggctgacggcggatgttctgatccacagttcccagaagatggcactgagggtctctgggaagggacgcatgatgctggagggtctctggaggggagtgcccagggcaggcagggctgcggtggagggggagcaaaggggcagggcgtcccctgtgggagggtccagtggctgggggagccgcccacctgagcggaggagctgccctcacacggctgacgggcgagggggcccacgaacgtgatgtccttctttagcaccgtggccaagggggcatctgagggagccgcagtcaagccccagccctccgcccatccttcccatggctttgagccagcctgaacctcagtttcctcagctggaaagtggggatgttaggcttgtggtgcggatgaaaggaggcaaagccggtgcggcccgccccgtgctcactcagcgtggtggcaggtgcgccgctgtgtgctggcaggctctcctgcccgcgcgagacggtggctgttgtgatgatgatgatggtagtcatagtgattgtgcagtattttcatagcatcgccgtcagtgccgttaaccctgtctcattgaaaggggtgtgaagggtctacaagctcagtgggcaggtaggggagccaggacctaagcctgctccccatcgagacgccccgtctgttgggtgcagtggtgggggaggggccccgtttagtgcagtggtgggggaggagccccatttgttgggtgcagtggtggggcaggggccccatttgttgggtgcagtggtgggggggccccatttgttgggtgcagtggtgggggggcccatttgttgggtgcagtggtgggggaggggccccatttgttgggtgcagtggtgggggaggagcccccgtctgttgggtgcagtggtggggaaggggccccatttagtgcagtggtgggggaggagccctatttgttgggtgcagtggtgggggaggggccccatctgtggggtgcagtggtgggggaggggccccgtctgttgggtgcagtggtgggggaggggaccccatctgttgggtgcagtggtgggggaggggccccatttagtgcagtggtgggggaggagccctatttgttgggtgcagtggtgggggaggggccccgtctgttgggtgcagtggtgggggaggggccccgtctgttgggtgcagtggtgggggaggggccccgtttgttgggtgcagtggtggagaggcccgtttgttgggtgcagtggtgggggaggggaccacttgggggggcagccacatgggaagccgggaagggagctcccacagctggtctctgtcttccacagctggcctccgcctctgggcatgaattgttcggtcggtggtttggtgcctggaagaagcccctgtgggcctgcagagtcagctcggaggccaggttggctctgtttctcccccgtctaagggaggctgcctggctcttccccagacccaagcagacggtccaggtggtcaggccggtgacaccccacttgcagggcctgggtgctgtcgtatagaccgtgcgcctggggtgtggggctgtgtcttgccagccaggtgtgctaatgagtgagtcttgatcccagagcacatggaaaatctgtctcagaatcacttttctgccagcaccctccagtctgtttgaagatccagcagttgggaagggctgctctgttctaccactgcaccccatggtgcccaagcactaggctggatggggcactgggggctggtgcagtggccaccgcttgttcagaaaacccaaggctccgagatggaggtaaagccagagaggtaaagccacctgcccacagtcacacagctgggaacagtcagggcaggacttcagcccaggcctggatctttctgggttaagagttcccatacttaggtgaagaggggcacggcttggggtcccggataggaggcttctgcctgggtcctgtctccttattctcatgaccccttcttgcatctcctgatccaaatccccgctcttcagtcacatctcctgtgtcccctttcagcgtctcgttctccagccccatagagccactgcctggccctccccgcaagtggatggcgctgggcctgagtctcacaccctggactcctgggcctgtctgtgagtgcctgacaggaagtgaaccccctttaccctggcccccttcctgtccccactccttccccctccttcctgtccccctccttccttccccccttcttcctgcccccttcttccttcctccctccttcctgtacccctccttcctgccttccttcttcctatcccccttccttccttccccctccttcctgttccccctctttcctgtcctcctccttcctgcccatcttcttcctttcccccctccttcctgcccccttcttcctttcccccctccttcctgcccccttcttcttatcccccttcttccttcctcccccctccttcctgactctcttcttcctgttcccctccttcccccttcttcctgtcccccctccttcctgtccccctccctcctgcccctcttcttcctgtcccctccttccttcttccctccttcctgtctctcgttatccctgtccctgttccttccttccctactccttcctgttccccctccttcttattctccctccttcttgtccccctccttcctatttcccctcctgccttccctcctccttcctgtccccctttcttcctgctcctctccttcttgtcccccgtccttcctgagccccctttctgtcccccctcctttctgcctcacttcttcctgttgcccctcctcccctcccccttccttcctgttccccctccttcctgttccccctccttccttaccccttccttctgccctcctccatcctgcccctggcttttctgcttccctttcttcttgcccccatctttcctgcccctttctggccctagaccctggtgcttctcatgttcaaccctgagttgctgctttttgttcaaatggccccaccctgttctctgctggggtttccttgaccacggggaccaggtctcccctggacgcctttttccaggtgcccccagcccatacccatcctggctctgtccgcaaacctgtcctccagaagggcctgtgggtgaccaggctgcagccggggactcccagcactcctggagccctggactctccaaaccaggcgtgattcccgctgtgctccacggcctctctccagagccctggctgcctgccgtccatgcctctgggaggctgtgtgtttggaaatactttttggagctgagaagtgcaggttttcctgcgagctagccacgtggcctcaccctgcccttctcctgtccgatagtgagttttaccctagaggcagtttgagccacgccacgtggtcttcttagcaggatgcctgagccctaccccactggcttcatgctgtcagggaggctgggtcacaggcccatttactcactgcagggtgtgatggtggggagcatgtggagcagcctggctcctaacataaccccagagcgctcctccctcccagtctgcagccacagcagggctgtgtgcgctccacagagaagtgagggtcttcctgacgatggttgatttgcagagacacccgggagttgcatctgtcactgtcccatcacaggtaaagccaccttactctattggttgacagaatgaagactcagaagatctttcaagctgggactatgttctcgaactgagaaaatgaaattcaatcaggataaacgtgagcttctgcacttgggttcaaaacaatcaattgtacaagcgcagggccaggagaagcggcagtgaagtgttttatatgaaaaaaacttaggggtttgtgggtgtcaaacccattaacgatcatcagtgtggtgtggcggccacaggaatgcacgctgtcacaggtggcgttagggacagagggcagggtgatctcaggtctggaaactgtgctgaacagaagctgaatagaaagaactggggtctgaacccgggacagagaaggtgggtggagtggagagtgggtggccccagtgtggggtcttgtccagaggagaggggatgagaccacagcagactgagaccagtgatgggatgtgaaccttgtagcagccaccttctcctcctccaggcccagctctgagcaaccttctccgtgacgctctccttgacctcccaggcaaagtctgttgcttctgtgctgcctcccaagtcttctcccttgagacttacagtcagagacccagatttttttcatctttatgtccctaagacttatcagagagatgcaaaaaatactggttgaatgaacaaaagaatgaacaatcagagctggttgccttcctgcaggccttcatgctacagaggcatgttcgggaaaggctggtgagcctttctcagggatccaggactgttgatgatggtggtggtggtggcggaggaggtggtggtagtgatgatggtcataatgatgctgatggtggtgatattaatggtgagtatgatgatgatgataacagtggtgtggtggtaatggtcatgatggtagtgatggtggtggtggtagtggtggtggtgaaggtgatggtgatgtttatggtggtggatatgctgatgatggtgatggtggttgtgatggtgtgatgctggtgaaggtggtggtggaggttaaggtggtgaaggtggtgatgctgatgaaggtggtggtggaggtgatgtggtggtgatagtgattttggtgaaggtggtggtggaggtgattgtgatggtgtgatgctgatgaaggtggtggtggaggtgatggtggtggtggtggtggaggcgatgatagtggtggtggtggtgatgctggtgaaggtggtagtggaggtgatggtagtggtggtgatgctggtggaggtggtgatggaggtgattgtgatggtgtgatgctggtgaaggtggtggtggaggtgattgtggtggtggtggtggtggtggaggcgatgatggtggtggtggtgatgctggtgaaggtggtagtggaggtgatggtagtggtggtgatgctggtgaaggtggtggtggaggtgattgtggtggtgatggtgattcttgaagggtggcctgccccaccacacctgtgggtgtttctcgttgggtgggacgagagactgagaaaagaaagagacacagagacaaagtatagagaaagaaaaatgggcccaggggaccagcgctcagcatacggaggacccctgccagcaccagtctctgagttccctcagtatttattgatcattatctctaccatctcagagagggggatgtggcaggacaatagggtaatagtggggagagggtcagcaggaaaacgtgaacaaatgtctctgtatcataagtttagaaaaggtgctgtgctttgatgtgcacatacataaacgtatctggtgcattaaagagcagtatgccgccagcatgtctcacctccagccctaaggcggttttcctctatctcagtagatgggatatacaatccggttttacaccaagacattctattgcccagggacgagcaggagacagatgccttcctcttatctcaactgcaaagaggccttcctcttttactaatcctcctcagcacagacccttcatgggtgtcagtctgggggatggtcaagtctttcccttcctatgaggccatatttcagactatcacacggggaggaactttggacaatacctggccttcctaggcagaggtccccgcggccttctgcagtgttttgtgtccctaggtacttgagattaaggagtggtgatgacttttaacaagcatgatgctgccttcaagcatttgtttaacaaagcacatcctgcatagccctaaatccattaaaccttgagtcgacacagcacatgtctctgcgaccacagggttagaggtaaggttacagattaacagcatctcaagtcagaagaatttttcttagtacagaacaaagtggagtctcttatgtctacttctttctacatagacacagcaacagtctgatctctctttcttttccccacaattctggtgaaggtggtgatggaggtgatgatagtggtggtggtgatgctggtgatggtagtgatgaagatgatggtgatgctggtggtggtggtggtggtggtggtggtgatgatgttagtagtgtgttggttctatggttttggtgctggtagcactgctggtggtggtcatgatgctagcagtgtggtggttctgtggttttggtgctggtggtggctgtggaggctgtgctagtggatgctgattgctctggggagtgttctggtgcaatcccatttagtcctctgctctatgaggtagatcttattatcctcttttatcaacagatggaggcctggagtaattagtcatacgctgacatcctcacagatgacaagggagggacccggtgcccaggcctcctgtggtcagtgccttccctgtgccattcttctcgggcagtgctgccaagggtcaggtggcttccttctggggagcctggaccgagtgaacatcccctgtgctcagcgatgccccgtgtgccataaaacagtgtctgcaggcccgctgctccgaaagtcaagatgtggagaaggagcagctcaagcgtgcactgcccaagccacaagtgcaggcctttgtgaggtcaccaccctttgggtggcgagtctttgaggaggtgaacccccaccctttggagagagcaagtctttgaggaggtggacctgccccccagcccctgccattggtgctgccatttcgtcccttggtctagagatgaggccccctctccgagtttgctgagctgacccttcagtccctgtggccagcttcagggtgtgcatgaggctgtgacctgatcatgccccttctctgcacccatgcggcccacccccatgttggagacacagatgtgtcattttgcagccttgcacccagagctgttgtgagtagacttgaccctacacgtcttgggctggtggctgcaggtgagaattggactgggactggaggcagcgagcgaggacatggcggggacagcagaaagcaatttccgacgacatgaaaatatttctctgacactctcgttaatagtgtgaaactcgttctcacaggtgctgtgaaaaccatggaaaaaattatttagacctcactggcttgggggcattttgtttttccattttgtatgactcacggatgaagaacatcaaagcgagattgtaaatgtgactggtctggcccctggcagctggaatggggggatctggtggtctcctacgtgcgcagcgctaaggacgtcaaggaagtgcctcgtggagaaggggcaccggtggcgtccggccaggctgctctggcagtgtctgtcagaatccgccgggcccagcgggagggaagccccgtgcaagagactgctgatgatggcactgtacttgcggggaacgcagtcgtgttcttagctcctgtttgcagagcccagggccagactccaccctcccagcagcctctggggccagcgttgttccatccccagcttcagaaggggaaagaatggtttaacgtggtttgcgaacacacctgagatcactcagccagcaaggggcaggattcagatgtgggcccaggtgaacccagctccagaccctagcgctgcccgtggctctcccggcctccgtccctcccagtcagcgtgttaactcagctgggctgcgttttgtatgggaggttggacaacgtgcccgcctgccaggacaggggaggtttgtggcagggcctggcagtggcagaacaatctctcatggacaacatgcttgccgaccgcttctcccacagcctcgaacaagaagggtttgtcttaaatagttatttgtgtctctctgtttaccagcacgaagtgctctggctaaaattagatgataaagtctgtgggacaagcagagtgctcagctgggattcctgtggaccctgtttcggttggacgaggagggggcctgggtgccaggcagtcatgggggggctggctcaacccagggatgggggatggggttgaaaggaggagtgcatgattaaatggcagaggaggcactgagcatgcgattagagggagcagcagcatgagaagcagcctgggctggggggccgcggccacgggagcctctaatttggtgaggtccatgtttcccgtctccatggctccaggcttatggggctctccaatgaaaactttgcagtttcctcagctcacaacagagacgcagcctggatacggtctcattagcagaaaaggcagaactgattctctcagcaaaatgctcccatctctgccagagccaaggacaacatgctcccgccgtggccgccgacccatcttccgtcgaacgtggccgccaactgtgccgtgggcaggggctctgcagcagagcggaatggccgtaatgaccctggcctggtggcggaaacttccagggcactttaatgacctggcagggggcagaatccaggaatgtaaagggggaaaatggtcagttatcagagcgagggatggcatgaaaacagctgccacctgcttctttgggcagccacagggccagctgtctggagccgctggtgctgggtcttggcttttaaagttgagcagagtggttcaggggctcagcccgggaagccaagacgtggaacaggagaagcctgaatctgccaggcgaattgggcaggtgcctgcccctgctcctagggctgtgtgggtgatgggacaaagttttgggaactgggagcccacggccgttctgtgtgcaggatgtgtgacttggcacgatgtccttgactccaaggtgggcagctctggggtggggactgtgggggctgcaggcagagactcaggagccccagtcagccctcctcccatatggcctgcgagagtggcgctgcctctcagaccctccattgctgcatctgtgaaatggggatgggagagtggaaaggagaccttgccttcctcctgggggggctgcaagaatgggagtagggccagacctgtaaggaaagtctcttttgccgaggcgtgaggtagggctgggaattgggtcagtgtgaaacaccagggtctttcccgaagcatgccgggcacaggcggtgcacgctgaggatatctgacatgtcaacacaacctgtcacgttggagcggggaagtggggtgggcttaggacaagcagcctcaaagaactgtgggctgttgttgagggaggggactgagtcccaggcacctcggggccatctccagtgctgtgccaggacccatgtgtgccacacacatgcatacctgttcacatatgcacacaaggcatgccataccatatacatatgcataaaagtgtgtgcatgcacccatgtcacacatacacatgcatgtatactgtgcacacgacgtaggcatgtatgtcacgcacacacaccgcacatgtgaatgcaaaacatatgtgcacagtacacatatggcctcctgcacccatgtgcacacctgcatcaacacggtaccggacacatgcacgcacacgtatgtatgcacacacacagtgacacaacacaccagccaaccccagatcctggcgcttggcctgcaagcgggccatgggcctacaagtgtggggttgctggctgggcttccctgcgtccagtgggtgtttggccctgcaggagggctggaaaacagcacgaagaggacagcagcaagggagacccagcacttcacacactcatctcatggccagggcaggacaggggcagggcggcacatcatgctccatatcctgggtggtgatcggcctctgcctttccagggcaagggggcggctcaggaagtaggcggctgccatcgttggtaagaggacggaggatggggagaaagcaatgaagggtggagaaggggcgtgtctgaagaaggtcggaggtgacacctattgccctgctcagggattggatgtgtgccatgaaacctggcagttagatgtgacatcagaggagagccacaggccactgctgggcagggcatcaggttggttccttgcgcttgtgtgccaggggctctgatagcacctgggagggggactgtggggaccatgggcctttctgaggtcgtggtcaggctgcttggaggttcttggggtcaaagtccacccgtctgagagggcagctgcagctaagaaattcctggggtgcctcagtgcctcaggaagggtcagggcacggcccactgggcaattctgacctacagccggcctcttagagacccagggttgggtcctggaaggctgcaggctgaggtctctctggggtttctttggctgtgcgtgcgcgttgtgacccagccccaagctccagcttcctgtccccatcccctgaaaagccacgagctcacccaagcccaagcaggggctgcccaccagcccctggccctttgtttccaggccgccagcacctcccgccggccagtgccgggcaaggctccaccaggagaggaggcttcatcgaccaattttcctggtctgtagtttggagcttggtttcatatcacaggatgcactgtgaaaatgctctcagcatacaacatgaagtcgtgatcctagctttgtatttgaaagacagtgtgcgccagattatggcggtcgggctgggcatgtcctctccagcacactggggagtggctgccggaagccctgggttgagaaggattctgagggcaccagggcagagttctgcctagggctttcgtgagcttcgggcagagctgtgtgtttggtccacacagcctggagggggtcaggggaggctgagatttcctgtgatgaaatggggagactgtggctcccaggggctggttgcctggctggtaggtggctgggctggacgtctccacatgctgacctggcttccagagaggagccgactctgagtgaatgttccagaaggaggagtgcaggctcaggaactgccagggtaccactgacagaaggaggggcgtccccgcatccacagctgccttcaaggtctgtgaggggcggctccaggcctggctgcatcttagaatctcatgagcagttatggctcctgaatcccagtccccgccagacccaccacatggagtctctggggatcccagggttccgcgggtgtcacctgctgggtaggacacagtgtgtggctgcgcgtgagtcagggaagatgcctctctcaccctggacccatcacatctttcatcagtctagtgatggacacaggtctcagggatgcaggaggacttcagtgtggccctcactgtctccatccaggaccccccatgataaccctctagagccccctcaactgtccccatccagggctgtcagatgtcccccccatgggacccccatccagggctgcccaggctcccccatagtaccccatctaggaccaccctgtaacctccccatagtacccatacagggctgcccaggaccccccatgaccccgttagggctgttctgtgcctctcgtcaccccatggcaccccatgactgtgtttggatcccatcactatctcgtctctgctctgaacactggactagccaccaacccacagccccgagggcagagctggaagtcccatgcacctgggcctctggactcgcaggaatcaggtggccccaggggtggcccagggcagaggcaggtgtctcactggagtcctgcggggtgggttacagcctttccctctgcttcagctcctcctccgcccagtccttgtgggggtgcagacatcacagagccctcttctcagccctgcctggaaggtggcacagaaggagcgctagctcgtgcagccatggggctggcccgtgggaggttgctgggcttcaggggaggcatccgctctgtcttggagcctggagcagatccctcactacggccccatctgcctggggtcctgcagagaagctcctcctcaacagccttgctgggcacccaggtgttcagggtcccctccctcacctgcatgtgtagggaagaagcagtgggtgggctggaaagagccctgggccaggatccaggtctagagcgaccctgcttctgcagcactctgagcctgagccttagcacctgcgcctcggtttctccttctccacgggggtggtgtagggcctggcagacccttgccctttggcagtggtgcccgcagaacacaccggctctttctagtgtgaaaatccacctgaggatttggtggggaaatgattcgaacgaagcacgtgcatttgcagaggagggggttctcgaagtgaagggacctcatgcccagtcctactattgtctgttcactgctgcagtctgggggtgtggtgggcaggccacaaagcagggctggctgagggccaggtcagcctgggatcagagcgccgggcacctggggacacctcaggctttgtcccgcttcgtgggtgttcgttacctagccttgggccctgatggtcgtgcaggtgtgcctgggtgctgtgtgcccacaagcactgagaccagtgccagcaccttatgcagggcctgcaaggtatggccgctgtgctggacaccctggggtacggggttgtgccggacacgcccatgatccaaggagcttggggcttccggggaagcagagctggatccaggggtgcatcagggcccaggaccacagctgcccctgaaggcccctgaggcttctcttccttctttgaagtgcctttggagaacatatattcagatgtcaaattgccagttgaaaggagaacatattttatttgaattggatgaaatgtgatccagaagtcatgttgcttaataaaagtgtgtggttttgattcactgttcctccttgtctgctggagaatttgaaacatgggccaggagcctctgacatccaaagatgggggagagagagaaggagaaagagggagagggaggtgaggcaggtgggcagctctgctggcctcagcgggtggagagtggggcatcccgtttgagggttggtgtcggggagggaaggtgtgaaatgctgagggctgcgctaatcagggccccactcttgcttcctcctcaaaatgcccccagtttactgtgatggggtctcaggggcagggggcagcagcaggtagctgtcctcggtcactccccgtccccgtgctctgtccctttgtgggtcacagcccccgaggtgaagtctggaaggagaggaacctgtcacccagtgccctcctcagcccagcagatgccccagcccagggaacaggtgcaagctcagctcccgacgaccgccaaccctcagctgcttcctgcaccgctgtcctgaggcaccactgtcctgaggcaccctgcggagaggaaggacccgggttggagggggctcggcggtgctgtccatgatgtggggtgatgcggggggttcagtccctgaaacttcagatgaggcagtaggtacgtggcggccagggacgccccatgctctgggcctgatgcctgcagggagagcacccgtctctgtgctgctccatctgttctgagatgtggagacaggggaggcagggctgggtcagctagtgtcaggggccccgctgcacacataggctccaggtcctggccactgcttctgtggctctgcagttgggaccagtgatgtctcctgtcccagcctcttctatctgttaaatggaggtgacagaaatttcccttgtgagtcctgagtcctgcaagggaacgggtgctggcgtgcacccaggcaccggacggacccctgaaccctggctgcacccttctggatggggcgaggcaggggcaggtgggcagaagggctgtggccaggctatggcacagtagtgccgagaaaggtgggtccgtctgcctctgacccagaggcaggtatggatgtggatgtgtggctgaagtcaggagcaggaacttaccacctggcagagctgctgcctggaatgttgggtgggcttggggagggttctgagctcctcgctcatcatttgaggtttttaaacacaagttggggtcacccacgataaccacagacacataccccactctcttcccctttttggtgctgagagccgtttcctgttgagccccgaggtcctcccctcggcccctgcctcgcaccactccctcccctctcaggagcactgtcctggctgctgtggcctcttccctgccaccctctcacacctgctgttgggcccccaccctgtgtcctgcatcagccccctgctgacccccagttcctccaaacctactgcctgctgagggcttttcctgagcacatgccttcccccattgacctcaaaatcttttgcattacttattgagtgccttctgcatacaaggagttttgcctggaggactctacagctctgtgaggtcaatgctgccgttttatgctaattttttcagagagaaagcagggagcagagaggtgtgtgtgaacaggctcatcccaggccacacagccaggcaacggctggagctggcatgtgggccgggcctgtccggcagcacagagcttactgcttttccaagtgtgcctgcgggctgggattccctccgccccgcccgtgtgcgcagtggttgtgatgctcccacccgctccatccaagtctcagtgcctgtcttgctgtggccagaccctcgcaccaaaagtcttcgtggaagagagcagccctcggaacaatgatgggtgtgcgcacagagctcacagctgtgaatgtctcccagcccttcccagaacactggcaccctgggagtgagggtgactcgccagggtcagaagtacacagcgcaaagccacgtcacagccaccgcggctgcaggccagagtcttcaaggcggagacaaagctgtcactagactcctcctggcccagagaggggcctcggcgggggaggtggtgcctctgcttggatggagtgaaggttccgatgaaccaggctcaggtgaaccaggctcgggtgaaccaggctcgggtgaaccaggctcggatgaaccgtggagaacttgccatcctccagatggggttgggcaccctgaccctgcagcccgctggctactgtggctctggaaaagtgtgcagatgtgatgcagggtggcaagatgagctccagacccagagcactcagcacctggccctgccccaagtccccttgcctgcggcaccgtctctggtggcgggaccggagacgccaccgtctccaggaccggagcacctggacatggtcctccaagttcttttccctcccttgagtgtggtggggcgtgtagtggttggcatcttgcaggctgccttgggctgatcctgccccagctgctgggggaccctggacaggtgacctcacaggtcctcggtttcctctgttgtagagtggggattagtcggacacaattcatagggttcttgagggcacagagagaccaggtgcaggctctttaccttgtacttgatctgtggtaaacatgatctaattcgtcatcactgtcattactataatcattactatattggtcggcttctatgcatctgattatggtcaaaagatcctctgctttggaacacccagggtgctgccagggtgactcctagcgtgcctgtcatcttcatctctgcagatagcgtttatgagacctgcatttcttattcctactagcagcccttttatttctcctgtgtacacattgtggtgagagaataatggaataaattgtttacacatcatggttagaggaagaaggaataagtgcttgcatgcttttcccggctgacacagttagagtgtaggctgctcacaatgaatccgaaagttcagttgttagcagtgtgggttcatccgccttgtagtgtggggcagtacttccttcccttttgtggttgaatgatattccattctatgcatataccacactctgtttatccatttagctgtcggtagacatgtgggttgcatttatcttttggccattgtgactaatgctactatgaacacttgtatacatttatttgtttgagtccctgttttgtttggagggtgaactgatttgggtgaattgtttatgcatctgtttcagttccggagattggaattactggtcatatggtaattctagttttaactttttgagaaaccagacatcacctctttaaaaatactctcttccccagtggttgaggggtaatggcaaaggaggcagggtacctccaagccctcggggtctagggcgggtgagagtgcaggctgtttctcacaacaggcaaaagctgccagcactgcactggcatctggcaggtgctcaacaggtgtctggtaaatggatgagtgaatgggtggtggattgatgggtgggtgggtagatgggtggatagacagatgaatggatgggtggatgggtggaaggatgagtagagggacggagagatggatggaaggatgtatgtatctggatggatagatagatggatgaattaatgagcagatagatggctgggtggatggatggacaggtggataggtagatggatgaatggatgagtggatggatgggtgaatgggttgaaggatgagtggatagatggatagatggatagaaggatgtgtatgtgcagatggatggatgcatggatggataagtgaatgagtggacagacggatggaggagtggatggatagagggtttaatggatggatggacagatgaatgggtgaatggatgggtagatggatggatgggtggatgggagaatggatggatgggtgaatggatggaaggactggtagatgtagatggataggtggacagatgggtgaatggatgaatgaaagagtggatggatggatggatggatgggtagatggatggaagcatgtatatatgcagatggattgatggatgagtgaatgagtggacagatggaaggatggatagatggtttatggatggatggataggtgaatgggtgaatggatggatagatggatggatgggtggatgggtgaatgggtgggtgaatggatggaaggactggtagatgtagatggataggtggatagatgggtgaatggatgaacgaatgagtggatggatggatggatggatggatgggtagatggatgagtgaacggatggatggatggatggatggatggatggatgggccagcctagcttgagtgtcttttgtgagtggcagcttctagggagaatgtttggctctgaggacaagctcgtcttgtggcttggtctggactttcccctgcttcaaggcatggggctgtgtctcccaggtccccatgcgagtgctctgtgagctgctttttcatgagcgtctcttcttttccagggtgacatccagcagctgctctttgtctcggaccaccgggcagcttatgattactgtgagcactacagccctgactgtgacaccgcagtacctgacaccccacagtcgcaggaccccaatccagatgaatatgtgagttaactctggctgggatcttggggagcatgagcagactacttgggatggttggtgaagagacacataagccatgggacccttattttaaataaatccactgggtgagaatttggagggacctaggaggtaaacattgggatatctgactcactttactaaatagcactgcccagaatgatagggtcacagagtttgtcatcaataaccctctcctttaaccttttgaacaagctccttgatggtgaatgcccagtgctctctcacgcttgggcttgaccttgatggggtatttgtgagcacagatgccacaggtgtcccccatggactcgatccactggaggggccatgtgcagctcgccaaagaggacggagcctgggcttgtctactgtagaatggccagccctcggatcccttgagtgtaaagtgtactgtagagtggcagccgtgcctgacacctttgtccctcttcctgggacccgccatgtccatgggtcagctgtcctccccctcccgctgcacaccctcgcggcactgcagtttttcttatttgcagttcttcctatcacctctgcatgaaaatgctctcccactccctgggcccactgcctctcatttctcatccgtaatattaaatcctgtttatttctccttgggtcttccttctttcaccaccagtcaggaaagaaggaagggtagctttcaggaagctgtgggaccccgtggcccaggccacatcttacaaaccccaggaggggcaggacagagctcccagccgagtccctgctgccccggcctcctgccaggctcctcccagctcctggtgtgggaatgggctcaggacaaggcctactctgtcccactgaagccctacccgtggggtccctgggctttgaggcttggggctgaaggcccgggagcctgctggagacatggtgacggctgcacagactgccattctgttggttgttctggcctgggttccaaagggccagaagccttcacctttgagggctcatctttctctgactgctcgaggggacctggtgttccccctgctttctctcttgtgcttctgatgaggctgcgtcagctttccaaggagctggagagggaggaaccccatccggggacccacagggaggttcacgcctggggctggacggggcgtcgtggcgtgcagatctggaggttgcggaaggaaggacagcaggctggtcgctctgcgggctccgctgcttcctcacggggccgcaattcgctttcagtacacggaaggagacggcgagggtgagacctattactacgaatacccctactacgaagaccccgaagacctagggaaggagcccacccccagcaagaagcccgtggaagctgccaaagaaaccacagaggtccccgaggtctgggctgagcgggggactgggttgggctgggcccctcgaggccatggtgcaggggagggcgaggccaggagaggttgtgtcagggtagagggttgggggctgtctggtgaaggttgcgggggcagctcagtgagggagccggctgttgccatccgagctttgctgtcacggggcgtatcgggctttccgcagtgaggaggacgttgggagatgccaagtatacaggggagcatctgccagcatctctgggccctggccccggtccccaccctgtacgaggcacagggctctagcaggcccaggatgagtttggttctcgggttccttaagtgtgggtgcagctgtggtgggagaggagagaggagagctcaggggctcccccggggggtgacgcagtctgaggtcggcctcgggtcctccccgctctgggctgtcatcccctcacctctgaaattggggagggttgtgagggtgcgtgagcggcagtgagagccggagggtcacacctagcagggcccgggccccgtgcaggagtgtgtatgggtgggtgtcctcctggggaggaggctgtccagcctcagagccattgtcagaggtaaagagggtggggtgtgagcatgggcggtgtgtgtgtgtgcatgaacgagtgtgtgtgagcatgtggcatgcaggcacgggtgtgcttgagcctgcgtgtgtgtgagagtgtgtgtgagcgtgtgtgcatgcgggcacgggtgtgcatgagcctgtgtgtgtgagcgtgtgtgagcgtgtgtgcatgcgggcacgggtgtgcatgagcctgtgtgtgtgagcgtgtgtgagcgtgtgtgcatgcgggcacgggtgtgcatgagcctgtgtgtgtgagcgtgtgtgagcgtgtgtgcatgcgggcacgggtgtgcatgagcctgtgtgtgtgagcgtgtgtgagcgtgtgtgcatgcgggcacgggtgtgcatgagcctgtgtgtgtgagcgtgtgtgagcgtgtgtgcatgcgggcacgggtgtgcatgagcctgtgtgtgtgagcgtgtgtgtatccttccagggaaaggtgacctggtcatctcacattgctctgagagcctggagtgttttgctacttttgttttttaaatactgagatatgattcacccttttctggtgtgtaactgggtgggtttgagtccattctgagcacgcttagtaactgggggcttgcagctgggctgccttcttcccacttgctctgcccccaagccccatggatgggggcggcccctgcacccaagaggtctctgggcctcttgacaggcctgggctccaggcgttgccactgagatgcctgcacccggacatgcggcaagtcccagacctggcaccactgccggcctccgccctgactccagctgtctctgtccttggctcccaggagctgaccccgacccccacggaagctgctcccatgcctgaaaccagtgaaggggctgggaaggaagaggacgtcggcatcggggactatgactacgtgcccagtgaggactactacacgccctcaccgtatgatgacctcacctatggcgagggggaggagaaccccgaccagcccacagacccaggcgctggggccgaaattcccaccagcaccgccgacacctccaactcctccaatgtaatttctttccttcccattggtttggtctggggcagtgggccaagggccagggctggggccacaatgctgagctcccttcttactccagttctcaccttggtgtcctcgggtggcccctgtgttccaccacaccctggccctgggccctttgcagctgggtggcgtaatacttcccaggggaggccattgctgaacaagtttggaatccctggtttgctgagttcatctcaatgttgtcaattttttgcctggaaaatgggtagaatgaccctagcccttccggtctttgaggattcaggtggaaattggatgaggaggggggtggcttgtggacagagtccctgcctgtggcctgggtgtggccaggcaggatggggctgggagccaggatccagacaaatacagcgaagcaggagctggggccgccctggctgggacgggggctgactgtcagcagacaggcctgaaagctctgcccgagaccttggaaagttagtctgcgtctctggacctcgcggttctcctttccaacatggcactgacagttcctgtctctgggggctgtgaagttttcagattcaggaggagccttgcgtagtgtgtagcacatggccgatgcttaacatagccactgtgtgatgcagaatctccactgccagagaggacacctcgttccagcaggtccagacccctgcgtctgcagcaccgccctgggatgcattatcgcaagaccctggggctgtggggtgcagcccctgcctgagcgggtgcacgggtgtgccagctccatggtgtgccagctccgagttgtcagacctggagccctcagaggaggtctctcccagaggggggtctctgcccagttgaccgggtagccatggtgccagcacagggcctgatggatctgggatctctgcccagttgaccggatagccacagtgcccgcccagggcctgatggagaggcagtgcctggtgcgtttgcgaggcaaccctgcgccttcctctccctctgcagccagctccgcctccaggggaaggtgcggatgacttggagggggagttcactgaggaaacgatccggaaccttgacgagaactactacgacccctactacgaccccaccagctccccgtcggagatcgggccgggaatgccggcgaaccaggataccatctatgaaggggtgagagggtgcaggcccccgttccgggtggggttggggggctggtggggcatcatgggggctcctgcccaagagcctcctcaggggtgggcctctacgggcagctcaagtgttacaccctattcccaaaactttatttttaaagagacctcggtgcctcgaatttgctctgaataacgtgtgtatcggagcatactctcctctgggcctgtttcttcgttagtagtcacatgggctcccgtgggcctggcctctgtcacgctcctgccatcctcctgggcctggggagatgcccagctacgatagtgccctcggccttgcgaaatcgggcagattttgtgtaatctggactttctttctcacttttctctctgattctctttccatctgccttttatcacccccagattggaggacctcggggcgagaaaggccaaaagggagaaccagcgattatcgagccggtgaggacattttctcattccctccctgcgccggggtgtccgctgctcggggtcacagcggggtgtgtagggtgtgaacaggtccgtgggcccctgcacctgcgcgcactgggtcacttcgagcaaccacctggtctcgtggagtccacgcaccacttgtccccaggacttgtgaagaatccccttgggtaggggatgttctggactgtgatggagggggcgggataggtgctgatcaaagccggtcctgcacccaagctctgggcatctcagtgctggtcagtttcacctgggatgaaaagcagctcagagctatcgaggcggaggcggagtcccctttgaggggtggaggagaggatgtaaatggcccattccgtgtaaaagatgcgcgcggcagtggtagggaatagttaacacgtggtcgtacctctctgcgtctgttatgcaaccgtttggagtaagtttacagaagctgttgaaacatggaatactgtttatgaaactttatcaagggaatgaaataaaacagcactgtgctgaaattccagctgagtaaaacccaactatgttaggtaatgagatcacgggtgagttcaaaaagttactgttgataatgccctcaagcgtgggactgtagcgaggacgttctagatgcccctcctggttggcgcgtttggtgggggccctgccccatactggggtgtccttgtcccatagggggccatggcctggctgggaggcctccagttctccctggggtctcagagccactaaggtcttgatgccccgccccgccgccggcaggcaggatgccctgtgatcagctgggcagggagtcctgccgctgcatgtggtgggcacgaccggagagcagggaggagccagcaccaaggcccaccctgccatgttgtccaagtgcccacaggaggaggtgtgcgtcctgcaccacggccagtcatgaggctgggggcagctgtttgttctgccgccaggactcagttcctgagggctgagctcaggatacaccttgggtctcccagaagccccctgaccttgcagttcccagaatgtgcagtcacagtgacccgccaccctactgtagagctggggacattctcttggaaccttgacggatggcacttagcaggcctttatacccctggaatctctttgaagcccgtggccagggcagacgggatgtgtcccatctctggggtggaattcccagggtccagggcttcaccccttcctggcctatggaagcgtctggatggctcttgtggggctctatgcccttgctccaggcccaacccaggggtgggacctgccggtgcctacagacacatccttttctcggaccccctttccagtgctctctgggggtccagggaagacagagcttgtctgaggcagaagggtcatgggctgcagggcaaaggggtgcagaggcatgaaaggagactctgaggccaggatccccctgctcagcattgtggaaaacctcagagccaggcctgggctcagggaccagagcagctgtgggggagagtgactgccgtccgcctgggcggactcacccagaagcagggggctgcgggcctgttctgctctgcccaagggtgtttgccagaaggtgaacaacagcagaggctacatccaaggtcccagccccaagctacacttgttattgagaggtgggacatccggttgcatttccccagacttggcccccaggtagacttgaggttggccttgggcttcttttgtgctgtccccattgcttcagtgaaagggggtccttgctcggggaggaagatgggatctcagggtgggcaggtgcccctggctctgcaggatcccagttcggtttcccctccccgctctgggagggccggactgaaacctttgaatgagcttcgtgttggctcatgttcccgagtaagctggctctgtgagtgtagacgtggtgtctgggctccaggagggggttgggagtgtggggtgggcacaggttttccactgccaggcacccgggaaggcagcagtgggcaagggtgggccaaggagagggccgagagtcgaggtggccccacaggaacatcatggctctggaaagtccagttcacctttgttgggaaaagcagcagccgtacaggaacatcatggctctggaaagtccagttcacctttgttgggaaaagcagcagccgtctgggtgcagttaggaaggattccctcccccgggccccagcctgctccaagtgtcctggggcctttggccaggccccctgcagagatcacataaacagttggaatttctcaacctggaacgttgccagatatccttgggtccaagctgcacataaacagatggccaggtcctggggccctgcgggcgtcccggcctgtggaagggggtgtctgttgtctgccccacctgagctccctcttgggagatgcatctgttccaggggcatgcccaggtctttcccactcagtcccgctccctctcattgtcagccagaccagaggctccctaaaaggacaggaatccacggaaccgagaggagacaggttcatccttatccttgtgcttccaggcaggaagcccccagactcagtggctgattttacctgggccacatccattaggggcatccaaatcaccatctccacttgacactgttttttgtttttaaaatatgtgctgtttaccagatgggtggaccctccattgagattgtcttgagttctgccaggtctgaggtcttttatttcttttgttaaaattgtatgcattcggccgggtgcggtggctcacacctgtaatcccagcactttgggaggctgaggcaggcagatcacctgaagtcaggagttcgagaccatcctgaccaccatggcaaaaccctgtctttactaaaactacaaaaaaattaaccaggtgtggtggtgggcacttgtaatctcagctactctggaggctgaggcaggagaatcagttgaacccaggaggcggaggttgcagtgagccaagattgcgccactgcactccagcctggacagcgtgagactccatctcaaaaaaaaaaaaaaaattgtgtgcattgaaggtgtgcagcatgtttgatagagttacccaggcacagacagacacagtgaagtgatcctgcacccaccaccaccaccccatagctgcctctttttcttctttatggtaaaagtgcctaaagtgtactcttttggcaaatgacatctacagtgcaatatcattaactatatcgaggcgttttcctctcgttcctctttcgctgggtcaattttgagagtggcgtccgtggttgggtgggccggggcgggagcggggccacagcttgcctgggaaggttcaggcatccccaccctcaggcgcattcatccagctgttcccagcttccttcagacgctgacctgggatgatctggtgttggcttccctgcaaggtccccgcccgcgttgccccagttccctgagaaaagcaatttgcgtgtctgggaaggcagctgctgtccctggccccttgatggccagtggtttctcccttaatcccagctcagccctgggctttctcagctgcctttgtcagagacggaaattggaaaactggcatcttggaggctgcttggatgagctctctgtgtacagcacacacacgggtgtctctctgagtgtgcatctgtgtaaacacagtgcagagctccccagctggggcaggatgggaggggtggggagatcggtgttccccccaaccgggagtcccctcatcagcctggtacccagcacctctggtgacagcctctggtggcctgtggcctggctggacatctgcggcccccccagccgggagtccccttgccagcctggcacctagcacctctggtgacagcctccggtggcctgtgaactggctggacatctgcagccccctggccgggagtcccctcaccagcctggtacccagcacctctggcagcagcctccggtggcctgtggcctgtggcctggctggacacaacctttgacttgtcagaagtgagcttagttcattgtgagctgctgttacagcacaccacagtcagggtgatttagaatgaacaggacttcattggcccacagttctggaggtcaggaagtcacatatagagggaccacatctggcgagggccttcttgctgtgtcctcacatagcggaaggcatcgcatggtgagaaggagcgggagagaaggtgactgctgccatcctgtcatcaagagcccactcccaccctaacgagcccgctcccatcgtagctgcattcacccatccaggaaggcagagcctggtgacctaatcacctcctgaagatcccacctctcaacacggttgcattgaggattcagtttccaacacatgacttttggggagacacattcaaaccctagcacattctgtcccagcccccaaattcatgtccttctcacatacagtttacattcactccatccggtacccacatcatctcaaaagttcgaagtccagagtctcacccaaatcaggtactgatgagacttaggctcaaattatctatcttgaagcaaatccctgtccagctgtgagcttggggaatgaaacaagcctcatgcttccaaactacatggtgatggggagggggacaggttcccattccaaaagagaagcatgaagaaaggggtagcagccccgaggaagttcaaaaccccacaggacgaacctttctagaataatctttcacttggtgtgccacctcctgggcacactggagggaggcggccccagggcctcaggcagcactgctcatacagctttgcacagcaggtctcaggagttggagcctcgtccttgctgccctcccaggctggcgctgtatgctggtgacgctacagtcctggggtctcaatggtgcctccacttccatagatccaccaggcgtcatcccagggaactctctgcagagcctctgcccctgtggctggtttctgcacgggaccccaggctgtccatgccacactttgacctctacgtggagggcgccatggccgcagttcctgccttccttccctgcagctgcaggataatcagtacccatgggtgtcgccgaggccacacccacaccctccagagctgagccagagctgcccctgggcctgctggagccttggctgggcggctgacgggtgctgtgtcgcaacgtggggagcagacacttgaggggtgcagggcagggaatgctgagttcctgggtacctctttgaaaatgtggtcccccaggtcctagcttgcctcaaagatctctggctgcctcggggtcattctccattgtcttgttgagtagcacctggttcccatctgtcagagcaagtcccttgaggaacagtcgccctgaagtcgtcatggaacacggaggactcttggggcattgggggtgcctgaccctggcgttgccaggtcagaagtggagagaggaatcccgccctggggaaggggtcggaagtgggggtctcagggcagggagccccgtcctgcagggagccgctcccactgctgccttcacagctgtccacattgcctttcccagggctcaggctgacccaagagccaggaggccctgtccccattggggttagagtgaggcctgggtgtgcttgaggcagatgggccctgtggtgaggtgagggccagaggaggagggctgagtgggcaggtggacatggcagggtttcccatgggttctgggctgctgcgtgcatgggaggatgcacctcttacctggagggaggcggggtctggaggttgcagccctggggcctgacggtggtcctggctggggacagaagttcagcctggagctggggcacctatttttcccttatccttcccaaatccacccgagtccccttgtcctggcatccacctcctccctcgagtggctttggcctggcggacctgcctggcactcccctttggggtgatgcagggagcctggcggtctcggctccttttcctcatctcggcgtcttcaggtgcttctcgtggcgctggtcttgcgggagcctgtgtctgtcactggccgctggcccgggttgctcttctgccagcgagtgccaggaggacagccactgaggccccaccacaggccccctttgcagtctgtgctcgtgactccccaggacagcaggagctgagccagggcctcttgtgcatgcagctgaaggccgtccacaccactggggtctggggtgtcgggagggatgggctgcggtctcagacgccctctctctgtctccccagggcatgctcatcgagggcccgcctggcccagaaggccccgcggtgagtatccggctttatcctgtgacttgcagaaggtgctcttggtggggtggggttggtgacaccccttatgtctcctggatggaaaagaggggggctctccgcttttgcagatcccctgggagccggcgctatcccacccccacctctgccttggttggccagttggaacttggaccttgccctgcggccccatcttctaactgccccaactttatttttaattctagggtcttcccggacctccaggaaccatgggtcccactggccaagtcggggaccctggagaaagggtaagaggttgactgtgtttcctgagatcacacaaggtgtggggctgcccacgcctcctctccacactgtgacccgagctgtccctgcctgtggaggtgacccagaggcttgtgtcttcaaatcccccctcacccaggcactcctcacaccagccccgttcagatgtttctggggctgaactgtggctatggggagagtggggcccctcggggcccagggagcctgccagtgctcagcccagacggtggcctcaggaccctgcagttgcccagcaaacggccgcagcagcagtaaccacagcagatggctccggggcctttcccactcctcgcccctgggcagccacaccacgtggaattggccaccccccttgctgggtttgggaacttccttggtctgggttgcacctggctcacaggctcagaggcatcctcgggtgtccctcgccgcgggaggagatggagggagagctgctccctggctgccgcgatttccttctgacacctggtgggcgctccaagtactgcggcctcctggtgtccggcggggcgggagttttctcttcctgctgttggaatgaatgtggatttgagtgcagaaggactaagaactgattcctggacagctggcttgtgggtgggagaaacaagggctgcgtgcgggtgttcgcgggtgttcacgccagggccctgcctgctgtccggggcagagtgaggaccctgtgggtgttgtggtgggtggatgcagggcagggtctggtcgtgtgagaaggtggttcgtgatgtcagagcgcagtggctagggatgcttcccaggttactgcacggggaggcgtttggggagtgtcttgtgcagtgcctggtggctttgcagcagtgctcaggaaaggcgggccagggcgcaggacagtaagtcctggccttggacctggaggttcttacaggtgctcagtacccctggaaagctggggaggggcaggacaggtgaggtcaggcagcaggatgcaggggcaggcggcggcagccttcttgggagcaagagccgagccagtggggatgcttgcttggggaggagatgggagcactgaggccggcctttggaggagaaggattcaggtcagctatgcgggaggaggttgttatcgttctgtgtggctgggtgacctctgagggcagtacgcatcagattgggccacacagtaagattctctgccacgttgcttttcacggtcagggatttggaggtccagaagaggcgggtcttgctccatggcaagggccgtggcgggaaacagagtggggtgggggcttggctggcctctggagcacaaagctttcacagcatccccggcctggcagccacatttccaaaactccagacaggcaacagcgagtggccgctgctcttgcccagccagcaccggccaaaactccagacaggcaacagcgagtggccgctgctcttacccagccaggaccggcatggctggagctctgtgctgggggctgcagccaccccagctcgctctggagaccccttcccccagattcgcgtgagatggggcaacggccaagctcctcctccgcagagctgcctgcggatgggtccacaggtgtggctgggttcgtatgcaaaggagagtgcattgcatggcactgggagctgttttctctcccagatgtaggacagggtggtacccacagggcacaaatgccggttgacacacagggcacccagatgctgactgacactgcctcagtggtgttccacggctccgtcctccttctatccatccagcgtacagatttgtactgagtgcctgcagggctgggcactgctctagcctggggatctcaatggtgtgaaccagaggggtgctggttcacacctcaccatgcggtccctgcctttgggctgatcctggcttgggagtcactggtgggtggccctgccagtgccttgtgacaccgtgacctacccagctgccgtggaggagccaagggccctgactggagaatatcgttggtttaggagctggtcctcctcaaactcacatcagggtccaggagcatgaggactgaggttggggttggcagaggagccaactcctccagggtctgccatccgtggagtcagaggagagacctggagcccaccggcctccccagggcccttccagtgagaggggtgctggttccaggagctgagagctgaccacccctctgggtccagctccggccagccttgttcaggaagccatccctgctcaccgctcagcgccctcttgatgtccagatcttgctcgatgcccgctaatcagctgtgaaagatcactggctatggggtgaggccctgcagtgcagcctgcggtgggccgggctcaggtgcctgtgcggcggagaaacaacattgtctctgccctcggaggttgagcatctggggcctccaaaagacagattaacaagagaagaggcatacgattttaacacttttaatcttctatgcacgggggcttcgcagacaagaagtaaaaaccaaaaaaagtgcttgggttcgggagcatatataccattttaacaagcagcaataggatgtggagaagtggctagaccaaggaaaagggggtttgggcttcgcggggtgacagatggtgggcaagtgactaggaactccatggaggaacgaatggaagattaaggttatcttggcaaagtctgttgatgcagattcactgggggctggcctccctctcaggtgataaggggcgctctccaaatcctggtacagaagcagaggcaggagggtggggtgggaggagggggtaatgccctgcttttaggcagaagaggggaggtaagagaactcttcttgcgtccgtcgattcttacttggcttcagcagaaaatagtcgttctgcaggggagtggcgtgctctgtcccctccgtctgcttggcctcctgtgcctctgtctgggagggccttttccctggggtctggaagagccctcttctccctgccactcccaacctcccgccttgggcttccccagcccttcctcccttccccaagggccgtctggccgtgaccggtttgtgccttttcttcctcactggatggtgagttcctcaagacaggcctcacttctgtgcccttcctcacaccctgctccctgtgggcagccgtgggcagccgtggcaattggctgggagccgtctgtgcacctgtgccgtggcatcccactgggtatcatgcagccctgaccagctgctgaagcccacaccctgtgcctccactggctggccctgggtgttgcttccttcacacactctggtgagccctgcacactctcccgctgctccccttggatgaccttccatgctgcatctgccttctagcacctcaaatcctttcttgctcttgtgcccacggctgcccgcagggagcagagtgcaaggagaggcacagaagtggggcctgccttaagaaactcaccgtccagtgaggaagaaaaggcacagaccaggcacggttagacagcaagaattaattagtaaaggcattggaggaagagctgggaatcccgagatgggaggtctggagcggctgtgtccgggtggagaaggggctcgaaccatcatcccatccagtttccctcaggtgactggtgagcaggtgcacagctggggcaatgtgcccgcagggagatagaggtagacctggggttgaactcagatctcctgtggcagaaggaaggtggccactcttactttgaggttcagaggaaacccaagagagctgggagtccccaagtgagctgcaggccaggtggccgttactcagcccctctctggcctgggtttcttgtgggtctggcttctgtgccacctgccagtgcgtttctgtaggggctgactcttttgcgcatccgggaatatagtgagatatcagtgggtctgaaatcatgaggctgtgcatttgtgaaggttccctatgatgccatggtggcagtgccgtgcccctgtgggtcgctgagcagtgtttgcccagcgaagcccttccctgggctcctcgggcaggtgggggaaggagagggctggggaccatcagtaaagattcaggccccagtgagtcccgccttccatggacttccagggcccacacctgctagcctcgatagaaacacccggaaggcaggcgccacctctgtgctgcttgtgagcgccccctacatccattcgcgtgtgtgccccagagctggtgtccacggatatttgtgcctaagaaatgttccctgtgatcagagcgtctttgaggcgagtcccttcctttcccttccccgtgtgcctctccaaaagccttgcaccccaggcactcctgtgttttaaggcagctcctgaataccgtccagtgttactgtggatttgattgcatttttcaggatgctgtggccaaactcctcctgaatctccgcagtccactggagagtttaacgttttcatctagaaataagcttgcttaccgtctaattgactcccgagagcgccagctggtgttgaccagccactcatctattgctcttaagagagacttcacacagatctttccacctacagcatatttattacttttgggtaaagtagcgatctgcttctgggtctgtgggcaggtcccacctgctggggggcctggatcctcctctgggaagccccagggattcagtatgcaggtttctttcccagccgcctcagggtcagagtggaggcagtttcccaagctttctccaaattgccacacaggggcacctcgctccctgcacagtgggatgcatttgatgccttgggaggaggcccccacccttcaatgaccccattatgtgcagaagcagcctggcaataatgatgctgcccggcgctgtcttatcagcccctcctgtcactcagcaggggctcaaaccttctccccctcttttttatgtgtccaggattagccttccccatgggattttgcgtgagtgcattttctgtgccttgaaaagtttcgtatgtaagccatgccctgaaaaacagcagtcactacctcccagccagaaagtgtggctcacctctacctaacaggttctggtgtggtctccccaggaccagccttggggtgatgccctgctatgccatcccctccccatggcctgctggtgctacacccagggtgggagaggacacaggctagatcactggcaacttgacagagtgagcaagtccactcacgagcacgcagctgctgtctgactccgaaggagttagcttcgagaaaagctgtggggaagaagcaagcagcatgggattcatttgctttcctggctcccaggctcctgtggatgggacacgccaatccagtctctccttgtctttagaagtgttcaggacatcttggcagagctgctcagagaggttcacacacacactcaagcacacacgcttgcacactcacccacacatgcactcacattcacatgcactcatgcacacacactcatgcctacgtgcacgcactcatgcatacatgcccacacatgcatacatgcacacactcaaccgtatatgcacacatgtacacacccacacacgcacacactcatgtgtacacgcacacactcacctatacatacacgtatgcatgcacagtcacccacacctgcacacactcatgcacacccccatacatgcacactcacacccacacatgcacacacatccacatatacatgcatgcacacacacttacacatgcacactcacccacacctgcacacacactcatgcacacactcacccagacatgcacacaggtacgctcacacacatgcacacacattcacacatgcatgcacacacccatacatgctctcacacagttacacacacatgcactcacacacctgcacacacattcatgcacatgctcactcatacatgcacacacatacacccacacatgtacacacattcgcacactcatgcatgcatgcacactcatccatacacatgcacacacatttacacacatgcactcacacacctgcacacacactcatgcacatatgcacacacccaggcgtgcacgtgcacacacatctacatgcacgcgtgcgctgtctgggttcacctccacacggcccttccatggaggctggtctgcaggcttgtgtgcccgaatccccagcagcctggtcgtgaatgacttctggccatttcgagtcacatttatcttcaaagcttagtcccctgaggccactgataggaatctgtccaagcctcaggtgccataccaggagatcagtgggaactgtgggtttctctgctgtagccctggaggcagtgtgtgtctcccaaagcgagctcagtgttgaagattcattggagggtatacattatcatatggaaaagaaaatcaagtacagtttgtggagagagaggtgaagggagcaaaggcctcgggacatttctagagtgaagggacagctggcaggagctgcatgaatggcgccaagtgcactatgctgtaggaccccatgcagggtctgccagggtgttcatcacggtcagttagtggcaatggctgggtgagtccaggagtctttctcacgtgggccccttaaggccgcaggtcttacccagagccccgattattggtggcctatggataaagagcccctcctgtggattttctggttgttagttctggttgaggggtgcggtctgaggcatcaggcttcttgatagggccccgcttccagtcttttagatgggccctagggctcctggaagagtgtctgtctagctcttggaaggggctcagtaggaaccctctcaatgaacgaacgaatggtgggttcatttctttgggatcctcggacaattgatgaccaacttggggtttaaagcaacaggaatgtcttctctcttagttctggaggccagaaatctgaaatcaaggtgtaggcagggccgcaccccctctggaggctccaggtgagggtcttcctcacctcttctggctcctggtggccactggccgtcctctgcccttgtagcttgccggcgcatctctgcagtctctgcctctgtcttcacccagccctcccctgtgtctctgtcactgcctcccctcctcttcccttacaaggactcatcattggatttaggacccaagatctcatctcaagatcctcactcccatcctcaaagaccccaagtaagggcacagtcacgtgtttcaggacctggatgtacctttgatgagagacccttcagcccaccgcgcgtggtcatgcacgtacgtgttctgcacagccaggagatgtccagcaggaagtgaccactgagagcttctcccagccactcccgagctgggcctgcccagggtcgggcctggacagaaccacatgcacacaaaggttctggagagacgcctgcacactgccctcctgctccagctctttccgagagtggaagggagcttttcaacacaaagcctcctgcaggcctacagctcctcccaaacctgccaccaccatgaagagaaaaggctcagagttctctgctcactgctttgacccaaatcccggcctggaaagaggccttgtgcctctcccctgaggttgagccgagggtctcgtggggacagtttcacgtgctgaatctgcagtggcagagggagccactttgtgaggcatctggtcacccagccacatcgtctctgtgcaaaggacgtctggacgtcctcaggaaagaaaccctgttagataccagtggtgccttcatttggaagtaggcacctgatttcttcacctggtataggtatgacactgagagccctcctgtgccagggccttcagaacattgctgtttgaccaagttagggcactgatttgggggccagctaatggagtaacaggaaaatacatgcaaatagcaaaggcaaggtgggatttcttattttgccatattttgcctgtggctggagccaagcagcatccgcatgacctgtgtgtgggcctgctggagcgttcccttggtgtctgacacctgccttgtcgcagacaacagccacatcgctggcccgtgctttgtgtcatgaaaattggaaatgtgactttgaggtgtagccgtgtctttcagcccaggggtcaaagtctttacgttagagaccacagggcttggcaaaggcttgctgacaatgtttctaagtgatagcaaatgcaggttcatgttggtggccctgaggacttgtgtcaaatttgaacacttcggaagggttcatgggggtggcgacattctttcctttcttctccacactgtctccttcttctaggacttcacgttatccttgttcatctacgttcccattctttggaattgttccgggtgtcggtgagaagcggcatcagagggaagttgctttcacagcctggggattggattttcaccaccgtggcttagaacaggcaggaaggatgctgaaaagagggtctttggaaatggacagcagtggacaaggagtggccttgaggagacttcctggcttcctacagcaacaccatgtgagcaggagcatgcatgcacagacacacatgcacacacatgcattcccacacaaacgtacacatgcatacacacatgcattcacacacatgcacacacgtacacattcatatggacgttcacacatccacacacacctgcatatgcatgcatacatgtattcacacacatgcattcatacacacatgcattcacacgcacattcacacacatgcagatacatgcacacatgcattcatacacatgcagacacatgcacacatgtattcatacacacatgcaaacacatgcacacatgcattcatacacacatgcagacacatgcacacatgcaaacacatgcacacatgcattcatacatgcagacacatgcacacatgcattcatacacacatgcagacacatgcacacatgcgttcatacacatgcagacacatgcacacatgcattcatacacacatgcagacacatgcacacatgcattcatacacacatgcagacacatgcacacatgcattcatacacacatgcattcatacacatgcagacacatgcacacatgcattcacacacacatgcattcacacacacatacacatgcattcacacacatgcattcatacacatgcagacacatgcacacatgcattcacacatgcacacacccacaaacatgcatgcacagacatgcatccacacatgcatacacagacatgcatccacacatgcatacacatgcattcacacattccacacgtgcacacacatgcattcatgcatacattcacacacatgcacacaccccatgcattcatatgcacacccacacacatgcacacatgcatttacacatgcacacacatgcctttacacatatatgcacatgcacacacacatgcattgatagtcacatacatgcacacacatgcattcacacattcacacacatgcacatacatacacttacattcacacatgcacacacatacacttacatccacacatacatgcacacacacttacacacatgcactgcacagacagcagcttgtccttgggagacactgaccccaaatcttaaatgcaaggtttggtttggaattgattccgacacaggaatctcagctgtaagtggctatgaggattgtatgtcaatgacaaaacctgggcggcaaacatgttttggatctttattttttaaacacgatttttgtcttctgagagtgttttccaaaatggcagttgggagcaattgggcagtatccattagcaattcagaaatatacacatatatacattctttgacccagcagcactgctttgagggacttacctagtagaatatgttagcacgtctgtcgggcagtgtttgtcataatgcaaactggaaccaatccaacgtgcatcggcagaagacgggttaaataaacaaggagtccattgtgcctgggagatgcaacagatgttgccaaggatatctacagagacaggccatgatttcaagagcaaattgcagaatatttagggacagtatcattaaaaagaaagagactgggcgcggtggcttatgcctgtaatcccagcattttcggagcccgaggcgggtggatcacgaggtcaggagttcaagaccagcctggccaaggtggtgaaaccccgtctctactaaatatacaaaagttagcccacgctggtgtggacacctgtaatcccagctactcgggaggctgaggcagagaattgcttgaaccggggaggcggaggttgcagtgagctgagatcatgccactgcactccagcctgggcaacagagtgagactctgtctcaaaacaaaacaaaaaaaacaaaactccgaagccacacagcctcatagtgatgaatgtgttagttagtgtgtccagcatgtgcgtcttcatctttgcctttgcacttacagaacttgagcactggttacatccggagatgaaaagggacctttcactttcactgtataaatgtgtaccttaagccatttcacaagaaatggagttacttctgcaacaaaaagcaaccagtaaagacaaggcaggcaagtttaggttcaggcccagatggctccacagccttctggatagttccagaaaaaccactcaggttcttggtctttctgtctgggagttgggaatccatcatgggtttcctggcagggagcgtctcactcaggtggtgtgaacacacatgctcagtgtagctgttgctgattcggaagactgcagccagcacccatccgctacactggagtgtaactggagtgtagttggtggaggcttttctcactggggagagggggttaagctccagtctctatgcaagacaagcctcatctactttaggccagctgagaatctgcttgcttttgtgaaatagctttgtgatcaaatattattttgaaaataaatcatcttactggttttacatgcgtatagtggtctgaagctggctggaattggtctagagaatccagtcctaggtatgtctgtgtggccaggttggctgggcgtgaggagggcactgtgtcgtttacatataagtgggttcttgaagttgctgtggctgagtgtgtgctctgctgtgttgcgtgtccatccacgcaagtggctgctccatcccgtcttccatctgagcaggcacaggcggctcgctcggagcccattaaggacaagtgcccactgggcacaggaggcactgggccttgagcctggagtctttgtttcctgttgggtatggagacctaaaaggggcgttcctggagcgacaagagcctgacactgcctcctcaccttcgggctccttgtctctgccttgaggccccagaggacgcctgctgggtctctggatttctctatatccagctcagacctccctcccttcttatccctccctccaaagcctttccgatcctcagcccacagccgtgcccctcccttctccgggtgggggtttctgaaacattcctgccacggggtctcacagcttctgtgcgtgtccagtgcatttcccgggtgggccgcttctccgacgccctcattctcgctgcagcccagccctggcctggttgcactctgacttgtctctcttggccccttgtcttcagggcccccctggacgcccaggccttcctggggccgatggcctgcccggtcctccaggaaccatgctcatgctgcccgtgagtacccttatcagtcggaggtggggaggcagctggggcaggtgggatccaaaccagaccctctgaggctgcgctgtcactggagaggcctgtgggccccgtctcagtctgtggtcttgcctgggtgccacgtcactgctcccagagtgacccttgtcttacacttgcagttccggtttggaggtggcggcgatgcgggctccaaaggccccatggtctcagcccaggagtcccaggcgcaagccattctccagcaggccagggtgagtactgctgggtcccaagaggcctgaaggggacagagcccagccccaggggccaacaggagtgagtgagtcaggctcagagcccaacttggagggaagcagctgtcttgatcccagaatgcctgcttgctggggtcaggagctgtgggagcgtccagtcctcagtgtccagtagggaccccgagagcatgtcagtgtccagtaggggctctgagagcatgtcagtgtccagtaggggccccgagagcgtgtcactgtccagtagggaccccgagagcgtgtcactgtccagtagggaccccgagagcgtgtcactgtccagtagggaccccgagagcgtgtcactgtccagtagggaccccgagatcatggggactgtttggggagtttctcagcagttctttgtccatgctgagggtccgggttctaactttacaaggggcttctgggcccctccacctctgacccagtaggcccaccttccaccgttggtgacctttgcctctgtgctaggccctctgctgggatccagaagtggagccggaaacccacgtggctcctggaaggggctgcctgggctggagctgggctcctctgggagagagcccttgggccccagagcccctcactctcagcctggggggtcctaaggagcagggtccgcagaggagcacttgcctccctattgtgaagtagctcattagtggcctgtgttttctgtagacttggctccggattgctgattgcccacgataggtgtaaacactgccccgtggggcgggtgggtgggtgggtaatcctccagcggagtgcaagaaagctgctaagtaatcccttgtttgagaaatatttatgcagctcccacagcagccagagtagatgttaatgatcagagtgcttaggtaattacaggacagtgtaagcacagagtcgttaccatggagcaaattgcctgaatgatggaaggtggtgtgtagcaaaccccactacctgccactgggtttatgggcttgggcctgcctggctggccttttatcttgtgtattttaattgaagctaaatggatgataggctataagattttataatgcaaaacaaaatattctaaaattcagatggcatctgccagggaaacagagtcacttggcagctgcagaagcggctctgtgggaaagcggtgggccctgcactggtgcaggtgggggccacatgcagagggggcaggtgggttcctaccctcccaaaatacttccccagtggctgggagtgcttgaagcgcctcccatgtgaaataaaatatgtcatgactcagcttgagctcaggtgtaaaatgtactccctatgcccagagtaagaggcttatttctgacctagccaagggtgatgggctgggagcaggccctctctgtgtgggctagagagacaggaaggagggatggggcctatcccccaagggaggaaacgggggcccactggcttgcacctctgcatgtcccacgtcactcccgtggatgctgagagccccatcgaagtcggggggggggggcccttggggagtcatcagacctccttttccagagtctcctgtccctcctctgtccagtctgcccgttccctcctgccacatctcacggctcaggcgccagcaaaccggagcactgctgctggggccctgtctcagcgtgtctcactttcctttgcagttggcactgaggggaccagctggcccgatgggtctcacagggagacctggccctgtggtaagtcattggcaaatctgagagctgggcgtggtgtggggattggcccactccctgtgtcgttggcggacagtggcaggtggccctggggtcctgtggacacagagcggcccttggtccagtgcctgttcccaggagggtggccagggggaccaggggcctctctcggtgctgctccagcccccttgttggtggggggtggggatgggtgactgtgcctcgaagtcacttgagggagttcagcggggtagagctgacatcagcgatcctgggaaacagcctccaactccatcctgaatggaaaggagctggcaggaatcagaggaggaggcccctcctcacccctgcattggagttccaggctccccctgcagagaacacgctatgagctgtcaccagaggagtggctccttagagggatggggtcctgctgcagccaggggcctggggaagtccctcgcacaggctgtgactgccttgtggagcaggggcctccattgatctttacagccctgttccagagttgaagataactaagtgtggggcagaacgcaggatttccagcctcacccgcccctgccctgtggcctcaacttagctctcatctggggtcctcgatgcatgagaaacatacagtgtgtgcccagggagacttgggctgccagtgtcaggcacaggggctgggttccggggcctctggggaggagtgtgggtttgcaggcacacagaggagttcaacaccacaggggccctcctggctttgccacctgccactgggtctgggctcggtcgcctccacacagggcctgactcagggctggcctcccacatctgggggatctggccttgaggggcctgtagcaggtgcatacgctgctcgaagctttgggctgtaacggaccacggtcaggttcaccccggagagagaaacatctccaggagctttgtggtgtttgcgagccccaacaactagaattgtattcctgattaggaagagatccaaacaactgcatttcccggctcctggaaagtcatcgttcttccccccggttctgttcgaggcagacaggtcgcgctttgtgtgctgagcaccgtggccgaagccctgtcccctccccctgcccctcccctgccacccccagcccttcctgtgttctcgagtccccacctcgagcagacattaacacacaccatgtctccctagggtccccctgggagcggaggtttgaagggcgagccgggagacgtggggcctcaggtatgtgggatccttgccttcgctgtctggtgggcgcctcccgttctccggcggcagcgacggcgagcatggagggaccccaactgctgcatgttttcaaggaaattcgtgggaattgtccttgctttacgcagtgctgagggtggagcacaatgaactctgacacctgcggcagaaatgagctggctgtattctgtccctggccttcattctgggcagcagatccgtgtcccgtccccgaagtgcccacatgtttgtggcttggacagccaggcatgggcagggtcgatgagcacagggacaaggctttgctctttctcctgagaaaggcggactcgccactgaccctttgtctcttacccctggcagggtcctcgaggtgtgcaaggcccgcctggtccggccgggaagcccggaagacgggtgagtggtgcgagtgtgtgtggtttagtgacagcagcttgggcgctggaggagcccaaatctggggtgcgggcacccccaacagccagctgggccacatgaagccaggtggctccccttcttgtgatgggtgcgtccatccccaaggctgcctctgagccagctgcctgggaggggcgctctgtgtcctgggcgcagacacagcggaccaggcctcttccctgggcacattcatttagtttaataaacctttctaattcaagaaacttcccaggccctttgggagcaaatgttaagaagacaaaactatcagcgggccttatatatttcgggcagcactgggactccagaaatggcctgattcgggggcatgggcgggccttcctgcgccttacctgctgtcttgcctcctggaattttctgtctggtgcatggttctcctggatggaactggtttgtttgcacatgaccctggcttctaaaagaggacacacgtttcccgagtgctgaccaccacccagacaggctggggcaggccctgggagcccagattgtgctctcaaaagtggaccttttcaaccagcagacctttctggtgaacgagagaaatttcggtgcagggttggatttgtttcagtgtggacctcttcccagtatgttgtctacctaagctacccttgactgctatagtctgagtcaacaaggcaaaaatgggtccttccctagtggttctggatgctcctgacttggggagcaagctgtggttagtgggtagaaatgacccgataagccgcagtttggcaggtccgagggtctatgcagggatctgggcatgaaacagaggcctgggctggataattccaggaggattagcagctctggaatcgactcttggtagacaattgggccatttatttggatctgattctgaaaaatgttttatttccttaaggtgtttttgtgtgtctccgtaaatccttcccacccagtttcactagaactggtttcctagagtgaggttaaaaactggaacaagaggagactcgggaaatgctgtctaacatggccagctgcagagttgcatggtgtcggggccatgcatatgcgtgtgttttaaggcattaagtatgcccagaagatctgctgcagaagaaaagatggtggtgagagaggggcttggagctgaggggtcgattccaaagtggtctgagcagcctcttccattctttgctagcatttcctgcaaggaacgctcgcttgtgaattgtagaagcatctgggtgctttgcggggctgagttgtgctgtgaaatcctgtgaagttttccgacaatcttcccttggtttctaaaagtgtttggaaatctagaagaggctcccaatgggcccctccatttgcccaacagggcgatgtctttttggggagcaacgggagcaccgactgtctccttggggtgtgtttggatttctctctttttgcttctcggctgttctcgggtgccaccttgtctgtctccagtgctttgagaccctaagctgccaccctccagatcttctctctgcttggtggtgggttgggggcaagggcctcatatgaggaggagcccctggaaaatggaagtgcagggtggcagccctctatactcgctggctggggtgcctcgttgtgcagggtggcagccctctgttctcgctggctggggtgcctcattggcgtggaggtctggctgagtttcatagagaccctgttcccttgcagggctctcctgtggtgaaggtggggcctgcacagtgggccccggaaggtctaggtcccctcttcagccccatggccagtcagttgggcaccttgtccttgactgtgtccatagctggccatcaggaacagggcatctgctcaccgtgcagatgctgcctcccgtcgctgtgtggtctgagtgagactgggcctcacttggggcctgggcctcttccttagccaagtggacaaaccagatgtgtcctttctctctttcctctgacctccaaatggtggaaaggagctgtgctgtctgtgatgtcagtggcctgcactcgcctgagtcctaaattcacggtcccctagactgacgcagctcctccagccgggtctcctctgccacattgtggcgtcttctcgaagcccaggggcagtggcgtgatccccctttgacagtctgggatgacgtggtccggaaagaccagccccgtgtgttccatccgttggtgtgaggcacagaacagccccgcccgggctcctggatctgggtcctcgcagcagcccggccactcgggctgtgaccttgggggtgggcgcggctctggtggaacgctcaacttggtttaacggaaaaccatggcccgggggtctcagtgaaccggggctcttttgcattgacggttttgcctcctttgttccagggtcgggctgggagtgatggagccagaggaatgcctggacaaactggccccaaggtaggtcacccaccaccctcctggtgccctggcatcactgtcatccctggggtcatgttgatgatgtaaccaaaatgctggttatgtgatgactacgattatgatgacaggtggctccgtcactggcatttgacgtgaagatagggttggtgggtgaatttcgccagcaagcgtgacagttgcagttcattttcataagggagaaatttgctcccttccagcagtggcgagcagggatgggggtgggatcccgactatgaaaaccatccgtggccgtgcaggtgacgaggcgcatgtagggcagaggcggggcatatggcaagtgcgggggccagggggtcttgtccagtcgggactcctgggtgttgtggaggtgagtagatgttgcccgtggctaaaggcagggctgtgtgtgtggcatgaatgaggctgcaccaggcatgcaccagctgttgctgtcgccactcatgcctgcccgctgctgtgctcagtgtatccacccctctgccccagcactgctgtgagcattgccccggtcttggctcacccctcctcctcgcctcttggaagcatttgtcccaggccacggggggcaggggagatactgaccttccgtgaagagtgcacctggggacagcagctgtgatttggagattggagaccgggcaccaaaaaaatgccagggctcaactacacctgttccctcttaacgggcgtggatgagctctgaagtgcatcccgtcagtcccaagctagtgaggtggcctggggtgacaggaggaaacgcagtcttgttgactctgtctcagaagaccatggtcttctttcaacaacatggctgaaagcctaaaatgtcccatcatcgacatcaccccagatggtgtgcacacccatgagacagggccctgttcccgggctccagggcatgcagaagaggggccggccagagagccaggatgcctgagggtagccagtgctggcccgtccaccaatgggtacgcgtacctcctgagcgcgggcagcccctcggcaccatggatacagctgtgagcggacacaccgggaccctgctctcctggagcctccctggggtgggggagatcagcagcagacactcacacacacgggaaactgcagcggtcgctgaaataccgcatgactaaggacccgtcggggcctgggacttggggatgaaagtcatctccccctttgcagcccatgttcatgtttgcaggggaagaggctgagattgtagatgcaaagtgggggcctatggggagagggctggccgatggggttcagggtgcatagatgctgtgtgaaacgtggtccaaggcggggcggccatcacttggtggacaccaaggcggggtgtccacgtgtgcagggtggcgtctgaggcagcctttctgtcctttttgcagggtgaccggggtttcgacggcctggctgggttgccaggcgagaagggccacagggtgagtatttcctctgtgagacacaggcatgacgatgggcagcagaggtgtctctcgggaggcccttctccttccaggcagcctcagatttcctgtggggtcaggtctccgccattccaacagtcagtatacaaacctcacgggagtcagcaatggcagtgagccccaagatgatgtctttgttgatgggtggccagcccaaaggaattggagctcttatctacagtttgtgacaagtgagccagatgggcctacccacctgaggcgcgtgaagggggcagggaaggagcccttccttttagagatctgtttaatggagtcctttaacatttcaggaaatccaagcagctgccatttcaggggcggccaaggacactttgcaatattaaagtggtggtcccaagggggtggggacaatctcaagtggccatgtggagaccaggtcacgaaaacatgccaggtgtccccctgttccctgttaatgggcgtggatgaatttgaaagtgtgtcccgtgagtcccgagctagtgcggtgacctgggggtcttcctggctgcgccgtttctatgtggttgttggagaacacagatgcggcagctttggataaacggcaacagccaagcccctcgaatcttgaatctgtctcaatagactgtggtcttctttcaataacaacgtgatagaaagcctacaatctcctgccctgttgaggaggtgtggtggggaaggctcgtcctggccgcctgccctgctttctcagcccatttgggggcctgacatgagggctcttcacagcttgtggggtgttccttctctgacctgctttctgtgaagcagatttctctgatggctcctttatattttagcacactgaggacatacaggcacatgagtatgtgagtgcacaccccccatgcacacacacacccacacatacaccacatacaccacacatgtgtgcgcgcacacactcatacacacatgcacacacacgcatacacacccacacacccccacactcatacacacatgcacacaagcacacacacacacccacattcatacacagatgcacacacaccacacatgcacacatacgcatacacacccacacacacccacactcatacacacatgcacacacccacacccacacactcatacatgcacgcacacacacccacacacacccacactcatacacacatgcacacacacatacacacaccacatacaccacacatgcgcacacacactcatacacacatgcacacaccacacacccccacacatgcatacacccccacacccccacacacatatgcacacatacacccatattcatacacacatgcacacatacgcatgcacacccccacacccccacactcatacacatatgcacacatgcacacacccccccacccccacactcatacacacacaccacacatgcacacacacccacgcacccccacactcatacacacatgcacacacaccacacatgcacacacgcatacacacccacacccccccactcacgcacacccccacacccccacactcacacatgcacacacaccacacaggcacacacacacccatgcacccccacactcatacatgcacacacacgcatacatacccccacacccccacactcatgcacacatgcacacacatgcacacccacacaccccacactcatacacacatgcacacacacccacgcacacacgcacatacacacccacacacccccacactcatacatgcacacacgcatacacgcccacacacccccacactcatacacgcccacacacccccacactcacatgtgcagacaccacacatgcacacacatacatgcacacacacatacacccccacacccccacactcatacacacatgcacacaccacatgcacacacacgcatacacacccacacaccccacactgatacacacatgcacacacgcacacacccccacaccccccacacatacacacatgcacacaccacacatgcacacacacccccacacacccccacacatacacacacaccacacatgcatacacacccccacacccccacactcatacacacatgcacacacaccacacatgcacacacatgcatacacacccacacacccccacattcatacacacatgcacacacaccacacatgcacacacgcatacacacccacacacccccacactcatacacccacacacacacgcacatacacacccacacacccccacactcagacacatgcacacacaccacacatgcacacacacacacccacacacccccacactcatacactcatgcacacacacacaccacacatgcacaccccccacactcatacatgcacacacacacccacacacccatacacacatgcacacacaccacacatgcacacacaccccacacatacacgaacaccacctacacatgcacacacacgcatacaccctgacacacccccacatgcatacacacatgcacacatgcatacacacatgcacaccacccacacatgcacacagacgcatacatacccacacacgcatacacacatgcacacacacacgtacacacatgcacacacatgcatacacacccgccacacacatacacacatgtataccaccccgatacacacatacacgtgcacaccagccacacacgcatacacacgtgcacaggctccacacatgcccacactcacacccacatgcacacacatgcacacgtgcacacaccccacacatgcacacaacccacacatgcacactcatacccccacatgcatacacgccacgcacacgcatacacacctatacacacatatgcaccccccatccccccacatgcacacaggcatacacatgcacacaccccacatacccccacacactccacccacacacgtgcactcgcatacacacatgcactcacacaaacacacaggcgcacccacacatccacccacaccccactgctctgttgattgctcccgtaagcatgccctgcagccctccatgatgccttgagaaggggcttggctgttgccatttatccaaagctgctacatgtatgttctccaacaaccacatggaaacagcacagccatgaaggctgtccctgactcagctccagcccttttgcacgactgatgagcacatattgagcacccactgcgtgcgagctctgaggctgcaggcaggcggggctccctgagggtatgagcgtgaggctgcttcacctggagcacttgggctgaggatagctcagacctcggctcagtgtcctgaggctgcccacatgtgtggccctgccttgcgctgctgggtgctcagtccagcaccctcctaccttcaggccatcgtggtgagactcaggtgagagtctgcagcctgcattagcccggctgaggcacacgtgatcttctaaggaaaattcccccattctggaagggtcttttgagagcttgggaatcttactgtcagaattagagaaaaacaaagtgggaccttggacaagccctgcatgacctgctcaggagaggctgacgttgaccctttcacttcctagggtgaccctggtccttccggcccaccaggacctccgggagacgatggagaaagggtaggtattctgccgtccctccgactgctcctgcctgccctactcctcagtgatttgggcaggaaaaccacagaagagaggcccaggtgtgggattggcctgccgcatgtggagggccagctgggagaaggcagatggggattccagtgggcaaagcgattgatcagatgccaagaggctgcggggcattggagagaccctgactgcaacgtttagttactccatcggtcctgctgatggatggagctcggggccagctctcagctctcactgcaggatgcaggtgccccaaaccccactgggaggaaaggtggccagagcgtttactgagctcagcgtctctgcttatctcgtccagatgaggagttagctggaggcatgtgggtggcagaaagctgagatttggaggagcagaagagggtggggggattggaaataaccctctgtgggcctggaggtaggggagcgagtggctgtggccatggggccagagcacaggagggagctgttctccagcatggacgcacaggccggggtctggtatctgccacgccgtcttcatgtgtggaggcgaagtgggatctctgggccacagcacagtgggattggggcatgggatgcacgaggctgtgggtttccaagctcttccctgcaggcaccgcagtcactcagacgccttctttgtatgtgagaggtgtttagggggaaagctttaaggagctctggagggtgagaaagaggagcagctccaggggcatttctgtctcaccagctttcaggctgacatggacggggcacctgctcctgtgtgggcctcagcacagtctgctgtaagatgaggaaggagagagggacccttctagatgtcagtgcttcttgattgagaggacgtgtgtgtgtgtgtgtgtgtatgcgtgcatatgtgtggctgtgtgcatgtgtatgtgcagggagtgcacgtatctgtgtgcatgcatgcacgcatggctgtgtgcgtgtgtatgtggacaagcatgtgtgtatggctgtgtatgcatgtgcatgcacagggtgtatgtgtgtgcacaagcatgtgagcatggctgtgtatgcatgtgcatgcacagggtctgtgtgtccatgtgtgtgtaggcatgtgtaggcaggctgtgtgtgagcatacatgcttgcatgtgtgaggcgggcgggaaggtgcagtggtgctttggcgagggacagtgtttgcaaacagcccgtgggttgaagcagtgagccagggaggcattcccttctgcagccaggaggaagcctcttgctgtactttccaggctgtttaggaccccggcagggacacctggttccccagagggtggcccaggggatcttgtgactctcccctgatgccctgtcctgccccagaggctgtcattcaagaaggtcaccaaatcctttcaattagatgctctttctgcccagcctttcctctggagagctgtggcatgtgagctcctgagccggcatctcagagcctgcaggcttcacctgcagtgtctgcacacctagcagcttgctgggagcgaggacattccaggcctttccggctggtaccagagctggtaaacctggcgtatgtgaagcagccccaagccagagaacccttgtgcaccactgaggggaagctggtgtccaggctaacagctcatttctctaaccttgccttttttctcctctgcagggtgacgacggagaagttgggcccagggggctgcctggggagcccgtaagtctgtgagctgagtgggacggtgggggctcagtgtggagaaaggctttgtccaaggctcctgctggagcaggatctgggatcagccaggagcttagaagagagagagctcgacctgagaacagacggacctgggcatctcccagggaagccaaagagaggaggcacaggcgaggctggctggcaactccaggaggaagtctgagcctgcctacaggagcaagcctggccctcaagggttgttgtgggggtccaggggcagcgtggtggggtctgggggcattgtggggagtcgggggcagtatgtggggtccatgggcattgtggagggtctgagggcatcgtggtggggtccggggtcagtgtggggtgtccgagggcatgggggtggggggtacaggggcatcattgggagggtccagggtcagcatgggtgggtacaagggcattgtggggggtctgagagcattgtagggggtctaggggcaacatggcagggttcagtggcaccatagggggtccgagggcattgtggggggtcaagggagaagcatgggaggtctgaggtcattatagggggtcagggggcggcatggggggttcaagggcattgtgggggatctgagtgcattgtgaggggtcccggggcagcacagtggcatccaggggcattgtggggggggtcacacacctgaatcagcccgagcttgggcccgtttcaatggccacccttccagaggcagattcctccagcagactctgccccagccctgggcatgggaaagctcttccctaagcagacatatatttaggcccagagcaaatttcctgatggataggacattaattactattcatttactgttgctttaaagcatctcttttctcgtagccaagtcagcccggctgcgtgcgtcaggtggtgctaattgatgagaaatatagcaggcactgcatagaggaggcaggggtcggtgcctgcagactcatttgggactaaattataccccagatgtctgattagcctctaaggagaattcatgaactccactctctccttaacacatgtccaagtaataccttctgggctgttagcttccaagaaatgttgctataactaggtattaaaataacgaaggaaacatttaagaggcagtaagtgggggaaggagttctcttctacagaatctgaaaaggttctgtcaaaattaagggcacttgaagtccacgtacctggggtgaagcctctgtaattctccgtgggtggggggtgtgagtgccctgtggcaggcagttctcccggaatctcactccacctgcggtaaaggggaggttctgcacgagcctcgccgaccggagagggcgtgccagctcttgcccagagtagcgtcctggaaaagatctgtaccccacgcctccttctgcacattcagtcttggggttcccaccagggactagtttcacctggtgctctcctgcccgcaccctctgaccctgtgatatcataaaaacaatcgtatgtcgctgcggaggggaattcaggagcgagccggtaatgaggatagggcacaagggctccgtgcagtggaatgttatagcgtggtgattctctgggggagcgtctgctcacctgccccagcaagtgtcagaggagccggtcagcttgaaagcccccctttccctgagggtgccctgtggtgtcctctctgagttctcaccaattccagacacctgcccctggttcccaacaccagggtggggtggagggaggcagcgcagcaggctgggagggagtctgggcctcactcctgggaggccaggaggcctgagtcaccagctggggttctgggtggagtcagggccaagtgggcataggggacagagaggagggctgggatttctgcccgagtttaaatcctattttccctttcctcttacaggggccacgtggtctgcttgggccgaaggggcccccaggtcctcccggacctcccgtaagtcccattaccgccctgcttgtctgcccccatctcggcctttgagaccccgcctcccagccggtggacgcttgggcactggggcagcaagtccgtgctggcccctctggcgcctgcctgctgccagtgtgaggcgtgagcgggacactgatgttcagacgctgtagacacggccccagcaggtgtggccttgcaggtggaggcccgaggctgccggcctcacgcctccgcttcaccctggctgcacttcctcctggcagacagcatgtgctatttcagttataagcagaaacccaggatgtcacgtttcttccctgctagaaagaacttccagcagcttctgtgaacattctggaaggaggctgaagcccttgattccagtggggctgtgtcccggtgggcagctcccccagggccaggcctgcccccttcagccttcccagccccgtgacctggttttctagaacctgaggcctgccccgtggaatgctagggcctggcagttcagttaacctttagctgagggttactggggctgatcagtggacctctgggaagggatttggagtcaggtccttcccttccccagagagcatcccgtcctctgattcgtcgtgggatgggcgtctgagctgagttgagtgggattttcctcttgagcactgtgagttctttcgcattcagttacatgtttttcttcttaaaatcgtacacagggtgtcacgggtatggacggccagccggggccaaaaggaaatgtggtaagtccctggggtcccgtggcctggcttcaggggcactttccctgggcacactccttgcctggctagggaggtccatcgctgtccacatcagctgggaacatgaagggcaggttgcagaccctctgctgtggtgcccaccctccagtggtgagtggcacctggagactttagcatgatggggtgacttgggagttttctgcccaataaatcatttctggtcagttcctctcacgtgttccttcctggtcggatgtctgggcatatttgcataaacgagttagtgctcactccatcagagtcaacctccacagcctcagaggcgctgagtcctggggctgctctctgtggtgggacccggccgcctttcccttcccgctggcattaggcagtggggagcagtttgaaaggatgggaggccagtgagggggcacacgacacccaggaaggggatacagttcccagagcccccttcagtgcctttgctcttgtctcctgtagggtccccagggagagcctggccccccaggacagcagggtaatccaggcgcccaggtaagtgagcctgagagaggcagctcgcagggatccggccgtgggaggcacacgtctccagtccggagccctgggaggaagcggggagctctgtcccctccaagtagcagcccctccccttatctggagggagactaggacctgggttggtgcctggatgagggagacatcaatgagaagatggacagatggcaggggagggttctgagtcaatcagcgccctcaccttccctttctggctctttctccctcttagggtcttccaggcccccagggtgcaattggtcctccaggagaaaaggtaggtgggcctgggctgtgttgcaggccactgcccgcctgcaggtggattccctggccccaccctgggaggacccctggtatccaccagctctcaatgtatatcttggtgctcccaagagacgccaaagctcagagtgccaagaactgggccagaagcatgaggaggattttggatccgtgtctcattgattcatacgtttattcattcattcattctctagtatgtataggggttgctggatttagcaaggaacaaaaatacaggacatgcagttaaatttgaactattgtgtatctgaaattcaaatttaaccgggcatcttgttttgttgttgtttattttggtttagtctagttttgctaaatttggcaacttgactgtatctccagagcctactgtgtcctaggccctggaacgagagctggaagtgcttgcccttctagagcttgtcgcttaaccaggcacaagatagttcaggtagctccaagtgccttggttgcgatcagcaaaaacacctccaaggggctggttctgagtgcatgagaatccccggggggcctgagaaacacagagggctgggctgctgccaggcctgggaccttccaggagctgctgtttatgggatactgaggctgtgggccttgcactgcaggatgccctgccctgccctggggtgttgatgtgaacagaccagggaggacagggtggtgggagcacttgaagaaggcacagcactgtaagagcagaggaggccagatgatgcccccccgggccccagtatgcagcaggtggatgtggagaagaatgggggcacttggtggactgattccgttcctacagcagaacctgaaggtgctgagaacagtggagccgcctcctcctgggcgctaccgtggctgcacgcctcacagccagggacccagtgcctctgaccacacttctcagcaaatgctgtgtgggcagaaatgttgaaaagtaaccttggtggccgacggagaggtcaggtgagcctagggagggcatctcctcatggagtctctggtttgttctagggtcccttggggaaaccaggccttccaggaatgcccggtgctgacggacccccggtgagtagccctgcccacctcatccctccatactctccccacctccaccctgcggatagggctgcaggcccaggctctttggggttgttgttggacggcattgactcattctggctctgttgatgaagacccgtttggtctccagttggactgctcggtcattcttgggttctggacacccttaacatcatggattttaatcaacgagtggcgattgcgcgagtaggaatattagctatttattaggttgtgctgattaattaccggaagtcaggcctgcgtgctgagccgtgaggagggctgggccgggctccaggccatcgcttgcgtccccagggttggaagcgaagaggcagggtacgtggtgtgtatttttagtgttcacacactgagaagggaggtggtgagcaaacgcgtttgcagtgtgtgcgcgcacagctgtggagccaaattagattctgcctggaaatagcgagttggtgacaaatccaatctgtgtctaagctgtgtggaggggggaggtgtgaggaagtagaacacactcagaatgcgtgcgtgcgtgcacacgtgcgtgtacatgagtgtgagctgatttgcacccacaccctctgtaagtgcctgctgtggttttggttttgattattccgttaatgctgagtctgtttcacaaacgagattagcagaattaattattgaagatgcagtatgctttatggttttaataacactgttaaaaactaaacaaggaagttaaatatgttgatgattatcggtgactgctcaccacacagcatccctcaggccgagtcagttggcccagtgactcccacatcacaaactgccctttcttggtcagaagaagcagagtggagccttctcatccccacgcgcgcagctgtggggccccgtggtcacctggccacatgggagtttgcatactgagtggttcatcttttccaatgtgttgtgtcctttaatttacatttatatttcattgccctttctaatgatcagaacagcacatcttgttatagaaaattaggaaaataaataaaattacagtaaaattatagccacctttgatctcatctcctgatttagccattgacagcgggtggacgtgtgtccttccaggctagttttctgttcccgtgctgctggctgtggtgtccatggagtatgggccgcaatctgtggggacagtggctgggcccagagccctgcggggaggaaggggacctgggtgtgaagcaggccacacgaggaaggggggcctgggtgtgaagtgggctgtacccctctttccttctgcggggaggaagggggcctgggtgtgaaggtggctgcacccctctttccttctgcggggaggaagggggcctgggtgtgaagggggctgcaccccaccttcctgccaagatcattctctcggccctcagctgacctaacttgttctccctggaattcccctccccatgttgaaacctccaaagaattggggtccctaaagagcctgcagtttccttttatattctttgggggaaggaaaggcctttaaggtgtcccttccccagcccgaatttaaagcttaaaatgtgagcgtaggtggaccccattcacatgaaggtgcttcgagcaaaaggaagcaaagggtaggcccaaagacagccccagccatctcccacgaaaatctggaggaaagaaaagatgtttaaaaattctcctttgcaaaggcagcacattgagggtaaaccctacagagagagttttctttttttcttgttttggttttggtttcaaagaaaggaagattgccttaaaatccatcaagaggtatgaggcacttcagagcagactcagtgcctagaaatatgttgttgaataaatcctgatagcacacgctggggaaatggctaagtgaattatggctcagtggaatatattcctggtatcacacgctggggaaatggttaagtgaattatggctcagtggaatattacagagccagtaagaattgaatttagacaaatactccgtgacatgagaaaaatgctcacaatgtaatattaaattaaaaatagatctaccatgccaagggcgcatgcatatctgcagagacgacagatgattctatcatacaattagccacagccactccgagtggtgaggtgatgaaggattttaattcctcttccagttgcctaattgtctatgatgaacatacgttacttttttaatcagaaaatatcaaatacaaataatgtaagctttattattttcccattacagaagcactgctcattatagaatattgggaaacacacacaagtagaaagaaaggggaaagcggccctgcccggctttgcaggaaaatcagtcgtggttatcttgttacgtttcctttctgccttttcctgttcaaacattttttagtaagggagctttgtgcttccccccactgctttactctcattctctatctgtaactgaaaatatacctaaaggaatttggcctggatgggaatggaggccgccgtgatgccggccgctaactctgcttggtgctccctgggtgggcgcagttctgagccccttgcaaacgctctgtgcgtctccgcagcggcgctgtgtgcagatgtgctgttatctccagcctggaactgaggaaatgaccacgtggagaggcctgggggcttcctcgagcagccggggctgggtctgcccggtccagagccgggctctcggcccccctgcagatccacccactaggtccttcacagaaaggtgtctgtggctgatagaaagtgtaataaagggccacaaagaacccctcctggccaccctggaccaggacaccctctagttggctctgttcaggtccagcccggccactctgaggtgctggcgccatgagccttgtttccggaaggcggcgtggtggccaagcacgtcccctcccagctggagcagcgggtgaggtcccgcaggtgcctggacttcctcaaagcctccctcaaggggaactttgcgccctcccactcacttgctgctaggataggctgtctgctaggataggctgtctgcaaaggcatcaaacccaattggacagctaataaaaacttaaaagtcacacacgaaccatttaattgaggcaacgagacttgggtcttcttaatgctactgtgtctagaaagagtctcagatcaacgttaggccactcaaggtagaagagcatcttgccaccctctcgtgttatacctgaggaagcgggaggcccagagagggcaagtgacctgcccaagctcacacagcaggttgagtgtgtccaggagtagaacccaccctgccagccttctcatcaccctgcccagcctctttcctggaatcctcgttggtggaactgcatttctgcacagtgaacattgatgatctttctgcttttatcctggaagtttggctcaccgatcctgagctcacaggcattaaaccgagtgacccgcctgggttggaaagtcagagaaacctgcattcctaggaatggaattagtacaggcccaggcaggcaggagacacaggtccttcctagagcctcggctgggtacctgtcacatggggcataggtcctcaccttcgctcagctcccctccatccccgaggccaggtggagacccgagggtgtgggtctcaaacgaggcagctgtttgaagactcacggatgtgctgggacccctcagtcaagtaacacgccttagccctccaccccgcaccaaccttgctttgcttttggttccccaacaatcagagattccaaggtttgcagacagctcagcaattgctagtccgggaagcagggatgccaggaacctggtcccagctcattattgtgcagattcatcttgtcaggtgacctggggaagaggcccttgttggccctgtccccactcgtgggtcactggtctgtggacctgcactggagggcgggctggctctggccgggtcaggagccaccgtgcaggtcacctgtgcacttgggggttgctgcatactccccgcaagtctctggccttggccggggttgggccagggtcaggcttattgttcccattttgcagatggagcagccgaggttcagggcctggcggctcggggaggccgggctgtgcttggctgcctggccagctgccttcgacttctggtgctctcagttttcctggggaggaagggaaatgggctccatgatcatggatgctacgcagggaggggaagcgagggaggctgctttctggagtggcactgactaatcaatgcttcttcttttgtgacagggacaccctggcaaagaaggccctccaggagagaaaggaggtcaggtgggtgctcgccacgccctcctacccttcagcatccaggtggggcgggtccaggtgctctgggctcagcctctgctcagggacatccagcttggaaaggaaggagccggggacactcagcccttcctcaggtgtctccgccaagggacccagcctgggggggacacaggccttttccccaagaagcggggcacccctctctgggtcagtgcccctcaccccaccctccagttgctgcccatgaccggatcgggtgcccatgaccagatggggtgtgggcagcagggcagtgtctccgtgttcagccctggtcttgactctgcacaagctgggtggcctttgagttttggggagatgctattatgaatggggacagacctaccaggtcacgccggtgccagggatggagtctttctatggatgactgtgtccgacactgtgagcggcttgtggttcctcctgcggggcctgctgggctgcgagggtcccatgcagcacgtccaccagcgccttctctccactgcgattcatgacaaagctgctgggctgcaagcacctctgtgggaagagcctccagacgggaggagtagccagtggggactgctcttgctgtcctggtgtgcgccaaccttcgttcaccccaagactgcttttcttgtgtgttgaaaccgcacaccgagctcatggtcgtcgggagcctggggctgagggcagaggcccacctgctccagggttccagaggccccagttgtcacaggctctggaatcgggcctgattaacatttatctcttgaagcagggcctgtgcaggcaagatggggtctggggcctggtcccagctccccttgccaagggtgtggtaggccaggactgaccctccagggcagcagagctagcgccagtcctcacagggagttcaatttccagtgccaggcctgctgggcagtggcacttctccaacgtgctgcctctgagacccagagcggtctgagattcgccacttctgccccgttccctctcttgaaggtcgcagcagccactggggtgaaccctcccctcggcccttggcttccgttcaccatgggagacccagttcccgctgcctccagtggggagtttaccagccctcctccctgggcacagcctcttatcatcagaggtggaggcagcacctggggccaccagagctcgcacagtgcccggaactggtgctgacaggtggttggcacttggagcccacagcacaggcccactgttctgagagctggcttttcaactggaacgagaggcattcacttactccctgggacttcctgagttcctctatgtgccaggcatcctgttagcgatgggatacagcagggagcaaggcagaccgggcccgggcctcagagctgcagccttgcagaggaggccaccaagcccatcctgcctgggagctccagccgctgccgtgacaccatgtggaaagggggctgggagggaggcggtgggagccgttcatcatgctggagtcttgggctgggggcatgggggctggatgcccacccccatgagctctagttgagcatcggcgaggcccttggctgctggaggatgtctcttccctgtctagcagccttgtcccttctcccagccggaagctctcctgatttattccaaggaccttaggctgggaatgcatttctttagggacaacactccttgcagagctccaacgctgacctttcaccgtctcactgttcccccagcctatcccttatttccctgactgccggggtggggccagcgtttgcttcacctctgtgtcccgctcagcatgagacacagccacacctccactgtcagtgcaggctgtgaacacctgtgcgagtctcccacggggggcctctctggaggctctgagctgggatgttcgccctgctctcagcaggaggggtatgccgaactctggagtttcctgatgttccccaggcacctccacactggcatggggctaacggtctttttctgtttggttttagggtccacctggcccccagggtccgattggctacccaggtcctcgaggagtcaaggtgagagagactcacgccactccaggtcgtcctggaggtcagggttgggactgtgggccttggcgtggctggttttagggaattctctgtggtttaatgtccctgctattcagtctggagtagcccagtcctcccagtcacttgtgtggacgctaggtctcaggacagcgggcctgagcaggtgagggtgtgaccagctagagtcaggagggctgatatggagcacaggacagtctgcagtctggtgacgacgccaggggcgcgctggcggccatctgtcaggacgggacacgtccttttgcttcttgcctctttaattgttgccatttgtcaggcttctgtcactctcctcgcagacagcagatcccggctgaagccaagagcctggcctctttcctggggaagctcggaaacatttcttcccagccatttgcacattccgagtgagaaacagagtctgtctccaccgatagcatctgggtgggccagcgctgtcgcaaggcggagttcatgggagctgtccatttattcacaatcattcgtgtttctgccatgacgggctctgacaacctcgttacatggggcgcacagctccagagcaatatcccagacacaggtcccctctgtcacagcccagctaactgtgtttgctctgagctgggtaatgcaatctcgagttgtgctgctctctggacacggcacgttctgtgtagacagacatacccctaggcgcacgcggaccagctctcctcttcctctgagaatggggacttgcggtatcttaaaggctcatgatgattctttccttcaagatgcttttaactggatgtgaaggaatatgtgtgtatatatagcaactagtcaagcttgagggatttgtagaaatgactcaccagctcccctgcccctcacctccctggtctgaagggctttatgcttttcaaacattgttgcacatcagaagtgtgtggccgccctggggcatggaggccaactggaaactgtcgtctgctccgaatcaaccctcctgactctggctggtcacccctcacctgctctgagagcccaagacatcagttttcagtgacatgccccagattacactaaaatcgaggctgctgtcagaaatcaaaccaggttccaaatcaagtgccccacccttgtcccccggaggccccgacttccatttcccaggaatgaggaccttccaagttcacgaggtattgaagagagacctcccaacggttgggagccttaggcgagtcaggtttttccctaaagccagcttctaccagcaaaatgcctagcgaattttataagggtgataatttagtagaaatgctgattatgtgagttctatagcatgtttattttacaaattcctgtcgcatagcagaagcctctgccaactcccatacatggctaattgcataacgctgcttctgtgagctaaaaaggtgtttgctttaaaatgtttatggagaatgctcttatcttgcctatctgattaaaattcattcatgacatgagcaatccagttagacttggaagcagagggtggaaggaaaaccgaggtttaaaattattttcatcggggaaaaagtttctcatactcctgtgcatttggaaatgtgagtggtgtcggcgcctcacgagtttggcccgggtggcagtgatggtggcagggcgtgggattgcgtgggccgagctgccgccatttgaggtgaatagtccttggtgagagggggcccgttattttccaccaaagccctaccttcttcccaggaaaaggttcttagtccagtggggctgctataaccaaaagaccctaaaatgggtggcttgtaaacaacagggaattatttctcacagtcctggaggctgggaattccaagatcacagcaccagcagatgcagtgtctgcggaaggctgctgtctagttccttgatggtcccgtctcactgtgtccacacatagcagaagaggggggacgagcaccctggggcctctggtaaaggcataatcctaatcacaggggctccaccctgtgacccagtcagtcacctccccacagccccacctcctagttccattgcctcaggtattggggttcaccatatgagtttttggtggacacagacattcaggccacagcaggctcgtgttcctttgagttcactgacctttagcccacctccaggcttccctctgccttgcacgtctgaaggggcacctgtttaagcttgactgtcagcagagtcaaatccacccctcgtttagcccccagctgctagggggttgccaggaggccccaaatatgagttcacatccaggccttgggcgaaagcctgtccctctctgggctgtgcgcacatctggtcccagccgtgctgcagctcctgagtgctccttcccggggcggctggccggccgagtcacggatgccccaatccagcccttcccagccagggccacttcctgcatgactggggagtgccctctaatgggaggtgctgctcaccccaccacggacacagcagccccaatgtcaacagccccgtggccaagaagccctgggaagtgctggttctgtctagttggtcccattcctcctacggggatcctgaaacggtagaactgtaggaccgggaggggtctcaggaggctgcggctggttctgtctagttggtcccattcctccgatggggatcctcaaacggtagaactgtaggaccgagaggggtctcaggaggctgcggtcctacctgcctgctctcagcagggcatgggcagggagggagcagcagcgtcccccagcctgcccagccagagggaggagagctggtgccaatgcccccgggtgctgtgccagggagtttagtgctcctgggaaataatgccagccacacaaacccagtcccccaggactcagggcagggaggggcagctggacatcaccttgcattcaggatcagacgctgctgagcaggctcaaccctgattgtattctcagccacacctgcgattttcctgtgcgtttcagaggaaataagcagaatccaaagttgctcttctattttgcaagtatggtgaggactcaaaactgccctaagaaaagaaagtagctcatctcctaaaaagcccttcttggtggggttctggggctgttgtctctgaggcgatgccacgccgtggtgagacggcaggtggttttctggggcccccagctctgtgtcagccagcgtggccctacctgttctcttttcaaaactctgggggcttccagccaggattgctttggaagaaggcatctgctaggaaaaaaacaccaccaagtgcttagaaaccactcgcctctcagcagctggcccagctgagtcacttctcaccttcctgggctgcccgggcccacaggtgctgccaagcgcgtgctgtgctcagtgggggcagtggcctgcagcaggctgttctgagcctcctcgcggcttggctggtcgttcccactcagccctggaatacgcaagctgtgtttgtccggcgcttcctctccatcttgaggtccatgtcccatctcaggctggggtagagactagcgtaggagaggcttgtttggagtcggcctccctgcttgggccagtgctgtttctgagctgtgccctgtccccccaaggcgctccatgctggcccacattagtgtgccaagtgccaggccagacgaaccagagctgctccgagcccaccttgccctcccggctgcctccgccctgtgctgggcgtagagggaggtgtcccaggcctctccactagtggtggcggccaggtgtgaagcagacatgacttcagcaatggtgcctgcaggtgtagtggcagaactcttgcttgtctccggtgctccaaatcctccagtgattatggttcagggcaaccacgccgctgccctgtctgcgtggctggaagtgccttgcagctggcactggagtggaaggcgtttctgcagttacatccgcagctccttggcagagccagggcacgcagcccaaggccagccacctctgcagaaaggagctcctccgtgtctccatcccttcccagagcccctccctctccaggacctggggaaaggccagaactgccaagtatgtgggaagttctgaccaccagagggcagccggcaggccctgcgtcctccagtgctctgtggccccggcttcagcctcagcctggaatcccggtgccgggggcagtgtggcttctctctctctctcaagtcccacgggcaggtggcctgaggtagcccgaggtagtctctctagctaaaagtcaccctgctgggagggctgaagtcaaagacattaacagcaagggtgtggctgcgtaattccaccccacagatttacctccactgccccaggcgcttggcacagtgagagtgtcagagaaatagtcctgggccccgtcccagaaactcctgttcagcagggaggtgggatggtgtgtcctgaactcatgacaactgcaataaatatgttatcatcattcattagtaatatcacagtatcatctcttcatgttaacacggagttgaaatacatggcactgggcttctgtttattgacacctgctgtgtgctgggtgctaggtgctgttctgagagcttagcaggcatttccctcccaacagtggtaacgaggtaagggttgtcgtcctctccacttcccaaatgaggaaactgaggcacgcaggagtctggggcattgtcagaggccatggagggggagctgggacctaatcaagtctgccttagacctcacctcctgcttcctccccaaacctctgaaaggtgggggtgtttctagaagatgatgctataatgggaagcaggaggggtgtgttggctgccgggtgtgggcccttggaagggcgggtccagagcttgggctggaaggtgggggatgggtttgggtctttgcatgaagaacaggagtcagtggagtcagcccaggaattgtggacacgctgggcctcctgaggccacagggggacatatgggaggaagtgtgttgagggcagggcgctggcctcatctgtcagcttcagcgagctcagcctgtcttgacacgcctgcgacagctctagaaaggctgagacttgtaaccattcactcctttttcttttcccacccgcacagggggccgatggcatccgtggtctgaagggcacaaagggcgagaaggtaagtctctccttgcagccacggggccccctgcttagtccggagccgaattccagccagcggggccctcccacaatgcttcttccatgaaaccagctgaggtggatgtcgcctctgagtactgagggggatggatgccactctgtggaaagtgtctctgtttgcagacggaagaagagtaagttgaggataggccctcgggtccccaggggcacatctcctagcagagctgagtgggtccagggtttgtgtctctgcacaaggagaaggccttggccccagagacaacacacggccccccacgtgcctgcaggggccagtggacacctgtcaccctccccactcccaggtgggccgccttgcatggccgctggcacgagggtccacttagttgttagatgttcatccctgggcagcccaagctgcagaaactcacagtgtgcagcagagccaggcagggagggagagaggccgtgccattggccatggtccgtgggggcaggtcaggcctaagcagatcactgtggtgaagacaaagctaaactacacccccatgcatgcctgccagagtcagaagcttgggtgcagcctgcagcggcgacagcctgagccacatggagctgcgtggccggccacctttctcttctcactgtggtggaaggaagctcagagccaaatccaaggcccagttatgacacagatttaggcctcaggggcggcctcaccgtgccaccctccccaccgtggcctcacgctctgttgtgggttcgccctgccatgccgtgtagccatgcaatacttgctttccgtaaggcatgttggtcccctttgctgggcagactctgggctctcccctggccacggcggcctgcggggctggagtgcgggtgctggcgtgatggtccacgtgccgagactccttatttgctacctgtcgaagatgtcgcttggatcctttcttgtgaaatctgccggccttaaagccattcccgaggggacgcattgagtggccacaactggatcagaaatgatgtggcagcaggaacgctcttgttccacggagtttgttgagcgtgctggtccctggtttctgttcttagtgtctgcccttgtgggaggaccggccaggaggcctgagcctgtgccatctcggctccttcccaagggcatccgcacagcggaatcctaagtcctcatccgggaaagctgagcagtttggcctctccaagagcactgctttctacgtggagcccgtcggggcttcggaacacgagggccttacgaacacagggtccccatcccagaattccatcccgttggtccccgggaggctccctcacctgaggacctttcatcctttccaaggtggcttcacagagtccagctttgccgcttgatcttgtcacgtttgtccctagccagagacagggctgcctgagatgatactgattgggctgtgcaggggatgccttcttgccaggagagctcccgcactgttcccgagggccacgcaggcagcccgacatggtctggggaaggagtggggcagtgccaagggaccgtctttgtggacttctgcattatttgtggccgctgctcagcttccagcactatgtgaacactgtgaacaagtgccttgaggccctgggagccccgggagctggcgctggctggaaagggctggattctcactgcacagaaagctgcctcccttgcgtgtgcccccagccgggccttgaatgtttacgaccggctgagtccccagatcctgtcctttcactctttttggatcaagatgtagcccctgaataatgacaggaaaagcccagccaagggtcccctctctgggagccacccgtgccctctgctgaaggatctgagggcttttgccctgcggtttccgggatggggaacgtctagaccagggactcaaacggacagcagggggcactgacgcgcggcagcctcacttgggtcccaggttcaccagtaacccaggggtgcgcgggccgctgacttcccccgccacccccggcaacacccctacccttcagaaagcactgcctgttactgcagtgccggcaagagcaggcgttagggattctttgcaggggcattttcatccagctccccgtcctcaattgtcaccccctttacccgtcacttcagtgcttcagtgctgatgggacgccacagagtgcactgagaaatgataccgggagctcaggggcctgggcttgctgaggcctcgccatgcagaacattcagattcaaactgggcctgcccaagaagcagggacgcagctctctccagcttcagaacgttacagctgggaacgcagagctcatgggaaagccattctcgagggatgggccccaagcccaccccgtccgggccatgtgctgccccccaagcgtgggggacctggtgctgagtgtggttgtttggagcggggaagggaccgccagggaggcgggtcctcttgcctagactagggcactctcttgtcccatattcagggtgaagacggctttcctgggtttaaaggagacatgggcatcaagggtgatcgggtgagcatctcaggtttgggatttgggctggggaaagctgggtgggcttggccgtgtgggagggggtggggatgtttgccgccacagggcagcttctcagaatggaggtaaactcttggtagagattcctggtgggaaggggacagtggcgtggagcccagggcccgactctctccagctcctcttcacctcctcttcctcagtttgccccttggggactgggaataacctgtggtcgccagctcctccgcccagtgtcccacacagggggtcagtggggctgggttcacttctgactgcacctgtggactgcagagttactcacctgactcaagagggataagcggtgcctgggaagagaaaagagagcagctacggaaatgacccagcctaccgaaggagcgcagctgctgcccaggccacacggccggcgcccacagggcagcacgcgacgtgggtctaggatccctgtgagcctggggagcgtcctggtccccagacagttcttcagggtccctgggactcccacacagtcctgtggtctgtgattttggctcaggagacctggcttatttttaaatgaataatttagctcggctccagagaaagccggtgggtgctgggagggactggggcttgccggcaaccacagaaagtgacgggctgcacgttcctgtaattaaagagaaggtgacgcaaagggcacgaaggaagggtagggagctcttagagcagccagggtggccaaaagactcttggaggtttccccagtaacctctcagcgagcagaagcccagcagaaggaaccgaagacgcctcggcctccggtgggcacagccgtggtgacagctgtgcacgcaccgggacggacatctgtcggctgcagcagggctgtcacccagctgccgcagtcatccccctgcagcaccggctcgcaggtggctttccagaacaggaaagccccacacacttggcacttcgtcccaacctggcaggcaaaaggcagaggcaatctgcacctctgtgggaaggaagggggaggaaggaggggatctcttgcgcaatgttgtcccagttaagttgctgctaaaggcacccattctagaacttctttcctagtagaaggctcctgaatccccacatcccagcggcttctcggtttgatggtgaaagtccttttctcctcctttctgatgcctctgttcacacatgtggcgtccacgtgacgagggtgcagcttcagaagagatgacacacgttcccgtgccagggctccgagagtggagctctcgttgccatgggacgagggtgggatgcaggggtgggacccatcctgagcccagggaacaggaccccatatgcggacctcttcagagagcacagcctggcactttgcaccttctcggtgctctgtaaatgtgtgccgggttattttgttgaacgagaggaacacctcttagggacagagagttcctgacccgatgacagattagagcctcagaattaggaagttattcatttttctctatctgagcaatacacatttctgttgtgggcttgcaccactgctttacagctgctcttagagacagatgatcagaggaggatccatccattgctggacaaagagtgccgggaagggcatttagagactctgccgtagcgctaccattgcctgggcaggctccagagccctctcccctttctgagccccgagctcccaatctgtaacttgaggaagttggacgaggcggaatttaagcccgtctgttcctgggacgcctcctgaggccctcccgtgtgctcgttatgcccaggtaactgccccatccggggctggggtccacttccatacctcctggggtttcagaagcagcagcagctcccagtcactctgctctatttggagaaacagcaattcagagctactattgttaaccaaagttattttagctaagaggcactcaatttagagaaggtaattgggaagtaggagcctgcagccttgagaaaataaatagcaggcaacctcggtgcagagaccagcttccgcagagcccgggagcccgggaattcgcggtacaatgcgctcgctttgtcagtggctccgggagcagctccgtggtctgagtgaggccgagctggtggagcagctctgaccacagggtgcctgtgacctgtccccttgctccttgctctcagaatggtggtggagaatagtgtgtgtgcggggggtggtcttctcacctcctcttttctggcttgcagggggagatcggcccacccggtcccaggggagaagatggccctgaaggcccaaagggtcgcggaggtcccaatggtgaccccggtcctctgggaccccctggggagaaggtttgtgatgtgggacgttcagccactttcttgggagggatctgacaggcccttccccatggcctcgggctcccgttggctgtggctgccctaggcatggggtgggggtgattcctgagcgggctcctgtctccaccctgggttctctctgctgttcctatgaagctgttggttgaatgatgaccctttccttgtcccgggttcgccctttcccagccctccaccatcgccttggaaggctccttcctcccggtggctacaaagcctgcgttctgagccccaacattccaggaccccgtccttgtcacattcccgcctccacagctgggtaataacggtgtccccaccatggcctgaaggtgtggcagcctggcaggaaggaaggccggggtccttggagcaggctctgggcatgcagccatcaataggcctgcagtttccagctgtgggaggctcctgggccagccacacaccctggctccaccctgtttccaccctgggctcaggcaggaatggtgcatgcagtggtccagacttcctgccctatcctgctacgtggacccatacaaaagggctcagaggtgccccaggatgaacacgctgagttgaggcatttgcctctaatcgctttgctccacagtggcaagacctctcctccaggggccttcgcttcttcctcggtgcagggaccatcgggtaccccctggatttcatgggtgctggcagtcaccctccacctagggcaggcagggcttctgcataatgacgtgtgcccccgcctctggaaaccacaccctcctccaggcccctgccagaacgcatgtcctttctctctgctccggggaaacggatggagcaataccgtgctggccattaatgcaactctttcttcccccagggaaaactcggagtcccagggttaccagggtatccaggaagacaaggaccaaaggtaacttctggccgtgttaggtgtcccgggacaggcggagggatgttctgcccggtctccccaccctgcatccggccgtgttaggtgtcccggcacaggtggaaggatgttctgccgataacttctggccatgttacgtgtcctggtgcaggcgtgggggttgtaccgccaggcctcctcaccttgcatccagctatgttaggtgtcccgggacaggtggagggatgctccaccggccgtctccaccctgcacaggttcatccactccccatccttgggggcgtgtgtgacactgtggctctcagcctccaccgtgttcactgccttctgcattaatttgccgagttgaaaggaggctcttgggcaatgagtcttctgccccagtcggcacagacacctggggtccttctgggatcctcctggagtcccctgcagtcttctgcacctgttgcttggctggtggcccttttcccctgggttgtccatacccagaatccgtgggatggtcgcctctcaactctacctcaccggcgatttgaaggctatttgctcataatggagtataaaagaaaaaggaaacctttcttatgtgaaatcatgttcaggtttaagtgaaacagctccttgaggctttggaaatcattgaaaatgttattttttttcaaatctcacattttattattcatggttcttccttaaagaataaccagctgcctgcactggagacataattaacagccgaagcggggtcccgtctttctcagatctgcctctgcccgaggcatctccttttagcctcagcaccttttcggtctcactggagcagtcttgttaacaggaggacgggcgtggtgggctgaggctgccctccaggtatttccattctcattaaggaaatgctcctgtccgtccttcctgtggaatgcgaagccccctgctccgtgtgtgtggatgcacaccccatatgcaggagaggtagcttgctgtgaaacaggaatttcatttaggatctaacagtggctcgttgaacgtgggtgtgatgtagctgctgaccgcagcatcgtcactgaatgtggtcaaaggggctgatgggcacttttcctctcttaatatacatccctctggggatggaaagaagagaagtttgggaaagatgggtggtctaaatcaagtccaggcaactttttggaaaggaatggtacatgtgtcctgggcagagactagaagtagccatcagcacagtgacccggtttctgaactgagctctgtgtcacctgcactgaggtttcctgggtcctgccccctgcctagattggcaggcgggcgtgtgagtggcttggctgaactcagtcccctgtgagaaatacaaggtttggacatgtgtgagctcttcatggatacaagtgtgcattcaggacaggattttaagccagacaaatagagacctgccaaagacagtggccagcgccaaccctgtgggcagctgagcgacctcactgcggtgctgcttcctgtgtgggtgtttggatattcaccaggtcagagtccctaaatccatctctggtctgtgtgcaccttgcaaacttctagaattaaagagctggtaggtgctacagtcagtgcataaatttgcattcattcccaactctgcaagctgctgtgctttatttaaagggattgtgggacgccaacacaacgtgcacgaggcacagaaaatacaatgtcacagtgcaatgttcatgtctcacctcagttcagctcagcagtgtgtgtccctttctcccaaacaccagccaccctcctatggatatgggcgcgtgggggatggtggcaggggagggagcatgatgaaactccatttggctttctagagctgaagcctgtgaaatgcttaggaaatatttattgagtagagaggatggataaagagataggtggctgggtgagtggaggggtgtggataggtaggcagatggatgaatgggtaggtatgtgggtgtgtaggcagatggatagacagatagatgggttggtgggaagagaggtggatgaatggatgggtgggcaggtggggtagatacatagatggatggatgagtgggcaggtaaatagacaagtggatgaatggaggggtgggtttataggtaggcaaatcgatgaatgggtaggtgggtaggtagacacatggatagacataggtgggctgcttggcagagaggtggatgaatggatgggtgggcaggtaagtagacaggtcgatgaatggaggggtgggtttataggtaggcaaatcgatggatgaatggatgggtgggcaggtaagtagacaggtggatgaatggaggggtaggtggataggtagacaggcaaatggatgaatggttaggtgggtaggtaggcaggtagatgtatacataggtaggccagtgggtggataggtgggtgaatggatgggtgggcaggtgggtagacagttgggtgaatggaggggtgggtggataggtaggcagatggaatgaatgggtaggtgggtgggtgggtaggtggatagacagatagatggatagagagatagatggatagacagatagatggatagacagatagatggatagacagatagatggatagacagataggtgggccagtgggtaaacaggtgtatgaatgggtaggtgggcagatgggtaaacaagtggatggatgggtgggcagatgagtagacaggtggatggtggatgggtgggtagacaggtggatgaatggaggcatgggaggataggtagacaggcagatggatgagtgggaggataggtagacaggcagatagatgaatgggtgggtgggtgggtagacaggtagacggatgaatgggtaggtgggtagacaggcggatgagtgggtgggtgggtagacaggtagatggatgagtaggtggataggtgagaaggtaggtagacaggtaggtgggtggttgggtgggtgggcaggtggagtctggggcagaggctgtgcactggcatgcaggtggtcccccaggcggcccatgcagcatgactcattcctggcccagctctgatgcctcctccttaaactctctttcagggctctattggattccctggatttcctggcgccaatggagagaagggcggcagggtaaggatagcctggcccctgggcaggcagcttgttcggctgcctcggtgcctagcaagttggttctccagccgacggcctgtttatttctcactctcttgcttctgaaactgctctcctgaatggctggccttaagctcttgaacttcagcaccacgtgttggtgacactctccagacgctgggctgggcaggtatgtgataggaaggggcagaggcaggaaggaagtgtgctgagaaaatggagctttctaattagcaccacaatccagaaggctctttcaggtcattctgaaaatcagattcttctcctctacccaagtgggcttttcctccaagctaattttaaaaggaagggaaaaaggagattgttttttcccttcaaaaatgtcctgctacttaaccgtcgtccaaatttaaagtcatttaaattaacattaacttggacgggattagcaagctgccattgtcataaacacccaccagcttgcagtgtggtttgagtcccctttgtcctcaccctcagcgaaggaacagggggccgggctgagggagctgtgttctccctgcaccttctggagcccccgctggcccaggcctccctgcaggagcggtcctggatgcttgttagtgaaatcacagtgcctgagcattgccacttgggaaaacaggagagagatggtcctcaggccttggactctgagctggccttgtccacggggcatatggcggggacagagaaaggccagtctgtggtgtacatgcaggacagcatctgcagagcaggcctgggggacatgctccccgaaagatggcagagctcacacctgccttgtagccccagccatgatcctgcagccctgcccagcccatcctcctatgccccatcctgctgtcccagggcagacagagctacagggttgcagctccctcttgggcctgtccctcctggccaaaaccttatgagcaaacaaatgtgttctgccagattcacaaaataggaaaaagaagtctgttctgagtgtaagttggcagcacagacccaaggagactattatctccatctccacccctctctgtctctgtccttttacccatccatccatccacccacccatccatccatccatccacccacccaccaacccatccacccatccatccatgcatccatccacccacccacccacccacccagccacccagccatccagccacccacccatccatccatccacccactcacccatccatccagccacccacccacccatccacccatccacccacccacccacccacccatccattcatccatccatccacccacccatccattcatccgtccacccacccacccacccatccatccatccatccatctatccatccacccacccatccatccatccatccatccatccatccatccatccatccatcttctattatctgtctatctctgtcagtatctatccaacccatccacctctccatctgtctctatccagctgtcattcttcttctggagaagccctgagtagtgcctttgggaatacactgtcttctgaaatactcttaggtaccactgtgagaaacatggggaatgtgaggtaccccggtgggctgctcctgtgctgggggacctttcacactgcactgcagtgagagtgtctgggagaggatatggccttctgcagctggtcatgggctgtgactgcaagccctttccatggaggactgtgtgggaccagggacctcgtggagcaactggagcccttgctcactcccatgctcctgactggggctctgcccctcatgcgtctcagcctccccaccggcgagccgaggagcttagatggatgctccagatgtccagggcatcagcactgtgggtcacgggacacaacacaaacctgactcaagcccagacctgccaggcaccacatgccccagtcacacataggagctactcacagcctttctgcagcctctgggtgtctggccctgcccaaggacatttcgttcactgctgcacctggctggtggcacaacccacaacacagacctcaggccaaaagggcgaggccgtgtgcttccccttgagccatggtagtggtggttcatgtgtgtgagatggagccctggcctccttcatctttgccatcacagctcttcagagcctcccgttcaggacactgagcacagcctttgcccgcatgagccttcagtggcatcgtcactgcagaatgaagcctgcagcactgcctggctttctggacagggttgatgctttgtaccaagttcggggaatgacggagagtgtgggtgccctctgatctagtaggttgggcttcccgaatgtccacaggaagctgagggctgggctgtccttgcaaagggacccttcctcttttgttgactgcagaagcctcacttaggttacccagaagcctctgggcgctggcttgccttctgcgcctcggtgaacagatgctgcctcccaggtttcgcccttggccgcccttcttttgccttgggctttggacttggtagtcttgggtgcagtccattcacttaaacagcacatgcatcgcgagtcctttctcagtgctgggtgttctgccaggctctgaggactctggtggtcaaagcagacatccctctggcatccagagtggaacaccacctggtaagcagcactcagaggagtggtggctgtgatgatgaaggacaagggtgagtcagggaaaggtcataggcaccagggtctgacccagaaggtccagggaggcctcctggagcagtgacatttttgctgagccctgcaggagggacagaagtggataggtgaggtatggaaagcaggcagagctgtggggtcaggaggtgaggagccgggggccggcacagggccgagcccggcaagggagacgtgggagtgggctgtgggctgcagagcctgccggggcagccagctgctttgggggaagctctttatcctgaggcactgggacctacggaaggttttagccagggggaatggcactgaagattgtttgaaacagctctggtcccagtgtggggcaggaatgggaaggggaccattccaagggttgaagggaaagccagtgggatgtctgtgctcatccagagaggtcttttatttatttatttatttatttagagacagagtctcgctctgtcacccaggctggaatgcagtggtgcgatctcagctcactgcaacctccacctcccaggctcaagcaattctcctgcctcagcctcctaagtagttgagattacagatcgcctggctaatttttgtatttttagtagagacaagatttcgtcatgttgaccgggccagtttcgaactcctgacctcaagtgatctgcccgcctcagcctcccaaagtgctgggattacaggcgtgaaccaccatgcccggcccagagaggtcttttagaagatcttagatattccggccagatggatgcttctaggtgctaggatgccaggcctgagtgtccgcatgcatgcgtgcatgtgtgtgtgtgcgtgtgtgtacatatgtgtgtgtgcatgtgtgcgtgcatgtgtgtgcatgtgtgtgtatgcatgtgtatgtgtgtgtgcgcacacgtgtgtgtgcgcgcgtttgtgcacacgtgtgtgtgcgcgcgtgtgtgcacgcgcgtgtgtgtgcgcatgtgtatgtgtgtctgccttccacatgagggctgcctgctgtctgcctgctgtctgtctgcctggtcctaccttctgcagagctagcgttggttctgtggaccttgactatgggccagacgtggaaatggcaggaacataagctgctatgtcaagccagctgaagccaaaggaagaggagtgggtgtgagcaaagtgtcgctttgcccctcgggcctcgggccaaggagggatcccaggagccccttcccgggaagggggaaagacccgctcttcagatgcacctgcccgaaagtggaaggcctctcctagctgtgtttgacttccccagtagaaggtcccctctcaagctgcgtttggcttcccagcatggccattgctgggactgtccactccttcctaagggcaagaagacaggtgcccacaagcaatttgcaagggagaaggaaggctaaggaggctggggggggcattctgttccacagctccagtcacagggactcgagattctttggcttgagttagtttataaagaaaacagatgagcaagatgcctgctgggagccccagatggcgttgcggtcgagccggtattttgctaactgccagggccccagcgcctgtgcctcgggcacagtcagtttgggttgcagtcatttttgttgcaggattaaacctgtggtccaggtcatagtgggactgttttagggtggagggttttcattctaggggaggatgggaatgagtaaatctggcagcccgggctcattcgcacctaaatgccaggagtcatcaggttggccgtgggcatcctcgcctgtagaacgcctatcactggaagaaagcagatgtttcgttaattttcatatgcaaatatttatttgaagccagaggatatcaccatagtaattgaagaactggaaccggagcgcattgttaaaaagctacataattaactcatcatcataaatggttttaataaatgcatttcaaaatgggagactctaggaagcagttttgactctggcagcaaatgaatgaaagatgatgagcggaaacttatctgatggcctccagccatacagatccaccttgggcggagcatcagaaaccagtcaagttcagccaggcacggtggctcacgcttgtaatcccagcactttgggaggctgaggcgggtgaatcacgaggtcaagagatcgagaccatccttgccaacatggtgaaaccctgtctctactaaaattagctgggcgtggtggcacacacctgtagtctgtcccagcaactcaggaggctgaggcaggagaatcgcttgaacctgggaggcggaggttgcagtcagccaagatcacaccattgcattcattccagcctggcggcagagcaagactctgtctaaaaaaaaaaaaaaagaaacaaaaaagaaaccagtcaagttcaggaagctgagttgggacacggtgggggatgtaggggcccctgcgtgttcagcccgtggcttccgtgtaatgtagcttaactacattttccagctctgacatctttgcactgcatttgttttctgtggtttggaaaatgcaaaacaacaacagaaaaaagagtataaattctattagaggagaagccgatgactcttggatatatgatttatatattaaattccaagtttgcgcgtctgcagagcctgttgaaaatttaatggctaatattcttaactgtagcaaaagtaaattatgtatgaaaggggttgactttcttctcttttcttgcaataatgatttccctccctgctgaggacagagagagaaagagagatgaggaggaggggaaggagggaggaaggaggaggagggatgtagcggtgctctgaggaaagaaaccagataatagtataaacatccatcagactgcaggaggaaaattggatttcagcaggacttgtgcaggagtgcaaagctgtgtgtgtcgggtgtgcggtgagcttctcgccctgataaatctcctattaaaacacggaaaaggtgggtggcggggaggcccaggttcctcctatcctgctctgaattcacagtctctcaataacccgggagacagctgccacctgagcagggccgggcatttagagagtgactgaccagccccttctctgattctaggggacccctggaaagccaggaccgcgggggcagcgaggcccaacggtaaccaccctttcagcttgtgggcatgtttgggaaacgggagcatggtttagggagcacgtgccaggggctgggggaaggcagtgtctgtgtgtcgggacttgagctgaccttccttctctcccatctgtccagggtccgaggggtgaaagaggcccccggggcatcactgggaagcctggccccaaggtatgtttttggcctcctgggcggtgggcggcgtgaacccaagttgcaaggctacagagacgtggagcgtctgagggtgtctgtgaccttttttattaaaaaaaaaaaaaaaggcaggacattttcttaggtgtgtttaagaagcttgtcccctccagcagcctctggatgcctcagatcagatgtaattaagtggctgagaacgatggtcatgagaagtggccccagcagagcagggacagggcctcgccccaacacctgggaccccaaagacggcagcagggggccaggcccaccgcagactcacccgccctggtcgggaggccccatttcctctcttgaaaggggtttgagagctgcagaggcctctaccagaacctacagaaagtgctttctggcaggggaaggcccaggccggcctcatgcacattcttcccaccgaggggcattgaagccactccttgggtggagaatctggacacagacccagcaggcaggctactcctacctgtccaggatgccactccagagcgggttcctgctgggatgagtcttccaagggctgaggggccgagctggcccgtccctcggctgaccggaatgcacccacaggccaccctgaactcctccaggacaagctctggggcacttctcgtgtgccccgtgacctgacctgaggctcacctatgagaactcagagcagcagctgtcacatgggggtggccctagagcgggtccctgcgttctgcctttgcatgacttttccaggtgctcgaggctggggcacagcctttgtcccactcaggagactgttctggaaatgtccagccttgtagacactgggctgtcagctgcatgcagaggcacggggacaggcaggctttgatagccacagatcagcgccaatgccttctgccccttactgagggtcagggccaccttcaggggtgcacacaggcaatatttgactcagacgttttgatgacgttgtgggccagagtcttttcatccaaataataacaatcataagcttttcccccctctccttccctctcaagggcaactccggaggtgacggcccagctggccctcctggtgaacgggtaagcagctggagccttcgggggtgtctccaagggcagagcctgcctcgaatgccccctgcactttgtcctggggtgggctggggccagggaggcacgcctcagaccctgctgaagggtagggttttcctaagatcccaagggtgggtcacgccctgggagtgaactcttccgtaggtcaggggcctcgaccgcagccctggtcttggggtttgggagtggccgagatgacaggaaatgggtcctgggccccatcctgcccccgagggtgaggcagggtgagggaggggctggaataatggaggaaaggccatgggggtgggaagaaatgacacctgcgttcagagagccaccggcacaggcaggtcagcggcaggagctgctcgggagagacctcttgtcctcaaactggcctttctctgttcccagggacccaatggaccccaaggacccacaggatttcctggaccaaagggcccccctgtaagtaatggcttccttgctgggccagcactgcctgtcccctccaaaacccacctgtcccctccaaaacccgcctgttttctctgaggtctgctcggagctcctcacagtggccggtgggtggagggaggcccgaggtgaaattctggctggtcagatgagggggagacccccccaccgccaaggcggctgtggggcagtctgtggctgtgtcccactgccgggcccgctggcactggagagggctgcacgctggggtcctctctccttgagactgaagtgattttctctgagttctgtgttagtgccctggggccgccatcacaaatgaccaggaactggcttagaactgggtgtggctcttctgtcacagccctgggggccagaagttggagagcaaagtgtggtcagtcagagctggcaccttctggaagctctaggggagatggggtaccaggcctctcccgggggctggtagctgctgccagtccttggcacccagtggcctgtgcacactcaccctggccactgcccccatcttcacgtggacttccgtctgtgtctctctgtcttctaatctctttctttttttgttttttgagacagagtctcgctctgtcgcccaggctggagtgcattggctcgatctcggctcactgcaaactctgcctcctgggttcaagccattctcctgcctcagcctcccgagtagctgggattacaggcatgcgccaccacacccagctaatttttgtatttttagtagagatggggtttcaccgtgttggccaggatggtctcgaactcctgacctcaggtgatccacctgcctcggcctcccaaagtgctgggattacagccaccgtgcccggagcccccacgcccggccatctctttcattttataaggacaccagtcactgggctgggcccacacccatctaggttggcttcatcctaattcagttacactggcaaaaaccccatttccaagtgaggtcacaggcacaggttctgggggtcagagcttccacatgtcctttttggggacacacgtcgccttatggcaggtgtgatgtatctcctccagtatggacaaccatctagcagtgggattatgacccagcaggcatggcggggctggtgggaggaggttggactttgcaactggacagacttgggtcctggcaccggctgtgtcacctgctggctggacctcaggataccaactggcctcttatgcctcggtttctcccttggtagatgagggtgacaacagcacgtcccatggggcagttgtgaggattttgtacgaggacaggcaggagccaaggacagctttagatttgttgtcactgtccccgtgcctgccaggtgattgcttttctcagaggatgtgcaggggcaggagccatggaaataacggtcactccacgtggcattaattctcaaaggtggttgcttctcagacacgaatgaacctcctttcctttggttttttcttcagggccctccaggcaaggatggactcccaggacaccctggacagagaggcgagactgtgagtatcgagggtgctgggggacgtggctggctggctctctgaccaccctgcacgtgggcacagccctcgctgcccagcgccatctaggaccctcctggcctgggagagacaggttggcctcagaaaggctcccaagggccgggccggcttccgctgactcagagccaggctgtgaggcagggccagggcagagcagtcatgcaggccggcagcgccttatggcatctgtgggcagaaggcaggtgttggctttgggctggttttggaaactttggtgagaggccacatttaaagacacacacagattatcctgggccgactgaagcctcatgcatccagccttattttccctctagaataatgctgagtgctaccccgcttgagggatacgtcttttaattgagaaagtgctgggaaagggtctacatgttactcagcgtcattcagtcattcgatgctgcaatacttcaagagggcggctgtgggccatgcaccaaccccacccacgttcacccgggcccttccagctccaatccagggggtctggaggatgcctgcaatgtccctttttacactaaagaaaacaagcgccagtcaggtggaagtggcctctaactagtcactccgctgggcacatggtctttgtagtcagagactcccctttgaccttgcccttcactttagaaatgcatatcacaggctacttcatccagaccagaaaggactccagtgttttcagttgggagaaaaagccctcatcagaaatgggatcattttcctggccccatcagcccttcgaaatttggcccagctccctaaaggtgtgtttcaggaaagggtgcaggcacgcctgtaacctggcccacacctacaagcttggggctccaggctctgaatatctggggacgtgcagtgtcgggtgacttcctcgtcaccacgctgtgttccttctccgagtgcccacctactctgtccagcttaaaggatgaattgcacagatgcaaacatttcccacagaggagagtgaggggcatgccaggatcactgcaagggtccctgcagccaggtttctagggatcaaggtctctacaggactctcccagcaaaagcaggtcccctcgtggaatgggtctctgagtgccctgttgaatatattctccatgcctgctttgaaaaaatcccctttgtctctctttggttcatcgtgatgaaacctcttttaattataccttcactggtgttctgcacggcgcatgctgcctgataaatggagattgctttgctcttttgtttatagagaaaaattaaaacatttcttctgagctttgcatatttttctctaatgccttttcaaggagacaagatagaaggttttacatattatgtgcttttctccctctgacttattctggacggaggctggtgaaagaattaagctgcttgtctctgctcagaaagttgcacatgtacttccggctgccttctgccaccccggccacctctctagacacatggcgctggagtgatgcctgtgtctctgagagccacttgggacatagcatctcctccatgggctagtccagacaagccttccagaaagagcttctctgcagtgttgatttccttcttttttaaaaatatgaaacaccaacggtcattatttctcctaaatgtgagccagaaacttatttctcagcaaagggctaaggtcatattctgtcctcaacagccagggtggccgagggccctggggaggccttttttgtttcgtgttaactttgacattagcaaaacttaaccaaggctccgatctcccttcaggctcttgagctcttctccccgggtccactgagcagggcatgcccttgacacccatccaccgttccttacttctgaccccataagtgcaatgaacattagaaacgatcattctagcccacagctgagctgggcttaaagaggcgagccctcctagagtttgcaaagaagctaagtctgggctgggcacagtggctcacgcctgcaatcccaacactttgggaggccgagatgggcggatcacctgaggtcgggagtttgagaccagcccggccaacatggtgaaaccccgtctctactaaaaatacaaaaattagccaggcatggtggcaggcacctgtaatcccagctactcaggaggctgaggcaggagaatcgcttgaatccgggaggtggaggctgccgtgagccgagatcgtgccattgcactccagcctgggcaacaggagtgaaactctgtctcaaacaaaaaaaaaaaaaaaaaaaaaaaagaagctagtctgctgtgggttcatgtggccccgtggcttggtgtgaggttttgcctctgactgctggacagtgagtcagtgagcccaggcctgaggccgctcaccctccagccctagcttggcctcagggccagccaccttctcctccagcgtctagagtttgcctcgaggcctccgggtagaaggtgtgcatgtctccaccagtgtcatgtggcacctgcagatggcttctcgctggcacctgtcatgctctgcagacgtgcctggaaaagaagcttatgttgccttaaggtcatctttctcctttgagggagagtacagaagtcgtggcgacacccacagccaagccaggatcgttatctacgcgtgagcatgcagagcgggcgtgagatattcccgctgaatcaagctaaaaataacgcatccaagctgccgagttatgaaagcagctggccctcgctcttgcctgttttaaatacatgctgaggagcacgcgggcagagtcacccgtcgtgcatcagaggcgttcacgccaaagcaggtcagtcgtcacagagccactgctgagaaacagccagaggtagtcgcgggtccagaaagggcaccaagccaactcagaaaaggagcgtttggtgacatgataaaggcgaatcgcgtcggcctaaagatgcagaggcaggagagcagccagtgagatgagcttgtgtggcttcgttaccctcgtgaaattagtgcaaacgcacggtggctcacgcctgtaatccccgcactttgggaggctgaggcaggtggatcacgaggtcaggagttcgaggccagcctgaccaacatggtgaaatcctgtctctactaaaaatacaaaaatttgccaggtgtgatggtgtgtgcctgtaatcccagctacccaggagggtgaggcaggagaatcacttgaacctgggaggcagaggttgcagtgacccaagatcgagccactgcactccagcctgggcgacagagcgagactctccatctgaaaaaaaaaaaaatgaaacaagagacatgggcctcttacacaaagtctggaacatctactctggggggaagggaggtggggggcaagcgtcctgctgagaacagtgcagggcagggtggcgcaggccactgcagcaccgtcagtgcagtgactctctcttcacagggtttccaaggcaagaccggccctccaggcccccccggcgtggtcggccctcaggtaagctccagccttcccagattccatgggtcactcggtgtcacttgcccacagggaagagggtcccagcccgggcatctgttccctccacgattccggaggtgcaggtactgctgagaggttatcttaggtcctgaatgttggtcagcgtgaggctcgccccacgcaggagcaagcacagatgtgtttgccctcaacacaaacccaacacgcagggcaaggaaggctgcccaaggctcacagggtggctggggccagacctgggccagctcaggagctgggctcatccctgctgtgggtgtccaaggcagccgagtcctcctgccactggtccctgtgggtgtcacgggcctgcgattctaaccgcagaccagtggcagatcagtgtcaggggcagcttagagccaggattgatggcttagagctgcagaacggggaggggtcaccttgtgtcctagaaagcgcacacctcatgtagcggtgagtaagacgtagacctgctgcagccacagaactgaagggcatgtgggctctgcccctggtgtggcttttctcccatccttggcctgtcctgtggctgaatcagcctccctcagggcacatcccaggaaggcaggcttggccgtgcctcctgaaggcgccaggtgggggaagagggccacgcggggcccagcagatgccaggcagtgagcagcgtaccaacacccaccctctagatttttgccgggaagagaaggcttgcaaaggcacttggaggtttggtgtgcccgcagcagacctttgcgtccatgaccagggctgtccttagatttaggaagagattctcactcccttgcaagtcactcgaaacgtctgtggctgacactgattttccccacagggtcccacgggagaaacgggcccaatgggtgagcgtggccaccctgggccccctggaccccccggtgaacaggggcttccgggccttgctggaaaagaagggacgaaggtgagtttctggagccttctgtgtcagctcaggcgtttcctcaggaatcattttgggactttgtgtttttcttgcccttttctgatgaatgggtaattcgtcaaacagacgcttctcatgccggttcactccccagaccgcacgttttgctcacttttccttgattcactccaggagtcgcgctgacctgctcagggatgggcttgaagggggagcgcaggggtcaccaccatcctccaccctctgctctctccccagctgccagccctgctcccagaaatggataaaaagctctgggacttcatgtgtccataacacgtttagcagaaagtggtccttttaaaaacccctcaccccagccaggtgcagtggctcacgcctgtaatcccagcacttttggaggctgaggcaggtggatcacctgaggtcaggaagttgagaccagcctggccaacatgacgaaaccccatctgtactaaaaatacagaaattagctgggtgtggtggtgcgcacctgtaatcccacctacttgggaggctgaggcaggagaatcgcttgaacccgggaggcggaggttgcagtgtgccaagatcgtgccagtgcactccagcctggttaacacaaatgaaactctgtttttaaaaacaaaaaacaaaaaacacagtgaaaccccgtttctactaaaaatacaaaaaaattagctgggtgtggtggcgggcgcctgtagtcccagctactcgggaggctgaggcagcagaatggtgtgaactcggggggcggagcttgcagtgagccgagatcgcgccactgcactccagcctgggcgacagagcgagactccatctcaaaaaaaagaaaaaaaaacagccctcaccccaagagcctgagaaattataaaagtgaaaagcaaacgtgtttttatcccacctcttggtgccagctccaactgcccccttttcatatctcctcccctgggcgccccaggttcactggccataacttgctgtgttagcacaaaaatagcccttccctttcagctcttcaataaggaatgcaacaaaggcaagctctccagcctgtaggaccacagaagagtaaacctgaaaaataataaagtgaagcaaatgaagaaatactgaaaaaaatcacacacccgggtgtgcatgtagatataggaataaatacacatgtgtacatgcacacgtgtgtgtattctagacacaaagagagctctccgagcttggaaaggcggccacgggcatttgacctgctcgtttgaaaacagcactgtgctccatgttggaccccagagaacattttggaagatatcaaagctttactgtacctcagggaaagtcgaggctaaggggtgactttttttcagaaaatgtggtttcgggcttgaagaagttccttaagtgataagtccatttaggacgatgcttttaatgctatttcgaccatggatttctttgtctgagcacggtcttacaaggagccccaaatctatggaaaagatagacgtgccctcagctcccacatggcccatcgtagcccttaagggccttgggaggaaggaccccggaactccgtggagcaggggtagagtcagatttgcacgcagagcccgccagatgagcgtggcttccaggtggaggctcaggctgtgctcccacgtgtgggctgctgagtccagtcacgactctgaaaagtggccaggagaagcccaatccaacccaagtccaggagtgtctgatgagaaggccccgacccttggccttgctccggggctggtgagaggtctgtgtcgctggctccaggagagaaggccccaacccttggcctcgctctgggactggtgagaggtctgcgttgctggctccaagagagaaggccccagcccttggcttcgctctggggctggtgagaggtctgcgtcactggctccaggaaagctcatctctgactctgttttcagggtgacccaggccctgcaggcctccctgggaaagatggccctccaggattacgtggtttccctggggaccgagggcttcctggtccagtggtgagtgagaggccaggcggggaatgaaatgggacaggtgcagccctggaggcctctccccacgtgcccttgaccaaccttttcatggctttgcagggagctcttggactgaaaggcaatgaagggccccctggcccaccaggccctgcggtgagtcaaagcctttgtcccatcctctttcttgaatcctactctccaggtcagaaggggcagtccccgagagcccagagcatgcagctgccccagacccccgaggagcctggggaggatgtggaggggggaaaatggccttcagggagatgcggacggcgcatcccaagctggcagccaggatgacgaagggtcccaggggcacaccgaggaaaggagagtgctgggcagcctggagggcgggaggagccactctgtgttgcctgtggagcatgctccctggaggagcaaggagaaagcctacacacctatcgtgggtctgggctgggccagcaggggaagaaacagacacgggtctgcagggactctgaagatgcacgctaaagccaggctgcccacggcgggggcccactgggcaggatggccctcacgattaggccaggtacccacccatccatatgccagcccccaggcaaggcatcccctagaaaacgcaccccatggaggagcacagcagagaggggagtgggtgccccatgggcatgggggccctggaggggaggggttgccctgcaggcatgtgggccctggaggagagggggtgccccgtgggctctagagggaagggggtgcctcacagacatgtgggccctggaggagagagggtgccccgtgggcagaccctcaaggggagggggtgccaggcttctagaagagggagcccattgaaggcaagcacaccacagggcacactgtcagacaccagggggaggagcacctgggagcttggagttacaggaagacacagagccccgaacgctagaccaggtagtctgtgcttgcaaagggccatagggagccactgtgggctctagagtgagcaggtaagtggagtgatcagctggtgctttacaaagtcacgaccacgcagtctgagagcctttgaagcagactgttttcttgctccacctcagggatctccaggggagagaggtccagctggagccgctgggcccatcggaattccagggagacctgggccccagggacccccagggccggcaggagagaaaggggctcctgtaagtactgccttggattgggggagcccttccctcagagatgctggggtcgttccgtgtctggccttgtccctccccctgtgatgtccccaggggtatttccttgggattggggatggggtggggtctgcggccctctaggacagagcgtgtgtcccatgggaacctggtgacctgcctgaggagcacaggaggagtcctggtgccggccacattctttccgccatcagctgagccagaggagccctgtgggatgatgttgggccggtctcagcctgtccacgcgtgcatgctggtgttccccacatgcgtggacagaggaaggggccgaagacagtcagtgcgctgtggacttggtctccgtccagcctcagtgccacctgtgtggtcgggccacagctgcccactgtgtgaactgttccctgctgctggcccagacccatggctgggctcttcctaggaaaggatgtttggaaccggggagtcctgtttcttggttggggggcaggtgtagagagcagatgtccagcaaagaaggggcaggggatgggtggataacggaaagacaaggcgcctccctctgtgtccaggaaagcccacctgctggtaagccccgaattttgcaggctttgtgaagcctcgggagtggggaggagcatgtcttgaggccacccagatcttggtctccaagaaggagatgagcgagcgccctttttgcctagatgcttcctgctagcctgctttcgtgaataacccacaaaatgccacttaccgtccagaagtggtccaccctgacccgtatttggcttctgccacacaattttgcagtgtcccctacctctgcattcaatcagctctggagaccaatttaatctcaacttctccttcccagtacagagggtcagaatgagcttgagttctccaggggaattggcagataatcggtgcagaccatctcaaattgagttaggtctgagtgctgattgttagaaagctgttttctttctctttttttgagatggagtcttgctgtgtcacccaggctggagtgcagtggcgcaatctcggctcactgtgacctccacctcctgggttcaagcaattctcctgcctcagcctccccagtagctgggattacagatgtgtgctaccacacccggctacttttgtacttttagtagagatggggtttcgccatgttggccaggctggtctcgaactcctgacctcaagtgatctacccgcctcagcctcccaaggtgctgggattacaggcgtgagccactgcgcccagccagaaactgtgattttcttgtacgtttcactctcagtggctcatgggtggcaggaacagcctacattccctgggcaggaacttccctggaaaccacattggaaacatctgggccattgagaatctgttcaatacattattggcaattttggtgtcttctaatcatttccagtgaggcacccaggacatggatccagctggattctgtgccagaaaactgaagccaactgggcagtcagtgtatagagtgcacacaaagtcagctggaaatggcttggttcacagtttcaagagagtaaatatttgagcagaaaccttgcaagagttgctctatccaggcagaagctcgtcatcctcccagaatagctccagagggaaggaaaggccaagcaaaggttggacgtctctgagaactcccgacctgaccaggaatgtaggacaggaagcttccacaaaagccccacacgtggtctttgcattctctggcttaagtagggtagacatttctatgaataggagctcagtttgaggagcaggacatgaattgtggagggaggaatggtaagacgaaatagtgatggatgactaaatcccggctacatttagaccagaacattgaatgtacattctctattccatgtttcccttcccaatgtgcacaccctccttctgtgtatctgtcggaagatagggatccctgtctgcagtgagaaaatataggctgctcacagagtgatgcgatggctggtcaaactgagcaaagcaagaacttaagaaggatcatttgagattaccaagcaggcagttaggaggaaaatgaatcaaagttacaaggacaggaaaaatagtgtgtgcgtatgcctgcaagcatgtcctgtgtgtgtacctgtgcgtgcatactcatgtatgcatgcacatacatgtcagtgtgcttctttatatgtccttgtgtgtacatgttggtgcatattcacacgtgtgcacatgttggtgcatattcacacgtgtgcacatgcgagtatgcttgttttgtgcacatgcatgtgcatgcatgcatacctgtgtacataggcgtgttcacatgtgtgcatgtatgcacatgtgtgtgcgtacatgtcttcatgtgtgagcatgcatgtccttgtgtgtgtgtgcagggagagtgtctgcagagaatgtaaagaatcagaaagctggtgaaagctggagctcaggctatcctggtgactgggcttggctcccggtcactagcttagacaatccacatacaggctcaagaatttggccggctggatttggatcctgtctctactgctcactaactgtgcctcagtttccccatctgtaaaagagcagcctttcctaggatgagtgtggattaattgaagcgatgcaccagaagttcatggtccaggggcgggctcagagtcggccctcagtggccctggctgaaatccattaggactgtggggacggtcaccctcaccaactcccacttcctgccagcggatccctctcttgggtaatgagctggtggggggatgttcccaggttggagccacgtttgacctgagatcttctgtattctctagggcgagaaaggcccacaaggcccagctggccgagacggtctccaggggcctgtggggctcccgggtccagctggccctgtgggtccccctggagaagacggagataaggtaaggcaaatccagagtgacccatggctgggcctggctgggcagacgggtgtgggggagggtggtgaatttaaaggacaggatgctggcaggtagagcggctcagccagcggagtgatgccacacccaccccgcagtcctggcattaggggatgatttcacagcagcccactggtaaatggtaatacacgccgtccccggcacgctcgagggacttagaaaccacaccctcctgtgtcattttgaggttgcctgcaacatttgctgtgagtagccacagcagagaaaaatgctccccggtccccccgaataatttcaaattccgaaactgcggagcccggtttaatgaggttttgctcagtatctatttttaaatgtctccgcttgaattatccaggctcccgttcattaagaatgtgctttataattccaaaacgatggctgcaggagcttgcattttatccttcatttaacgcagacagtgaaatttcgctgtgctgtaactttctattgatgacccctctctggggacatttctgactttgtcacctctgcatggataatgccttacatctccgggcgggagacagccttgcaccgacaggaacaacagagaggattttaataacttcttcggcaacatagtaattgagttgcctgttgttaggttgtcatggtagtggcccaatttgaaaaacagagtaaatattttcaatatgacttttcccacatcttcaagtctactaaaagcctgtcgagcatcagatcgagacctcgtcccttttagcccttgtattaaaaaggaaatcaagctaatatatggaaacatttattcgtaggaaagttttagggccacctggaaaggacactgttcttaatctccaagaaaaattcattacggggaacagaaaaggtccaaacggttgtcaagctttctaaccgaatcccccacaccttcccctagggagagatcggggagccggggcagaaaggaagcaagggggacaaaggagaacaggtaagtattggcacgggggcgcgcggcagcccccaggtcccggggggcctcgtcgcaggctgtaggccgtgtgccatgcacgttctcttccaacgttgctgatgactagcgggacatgctgtgaaaatctcccgtgcatgtgtgttcccacaacgtgtgtgtgtgcacacgcgtgcatatctgggagtgagtctctctgtgttagaatgaacaggaagcatccaccggttttgcgaaattaaataaatggagtgtttctgtcctagagggcttgggttctgcagacacacccattgccctctgaggtgagggaaccagaatgctccggcagagacagcaccattgaccaaatgcctgttcatttttccccttttggttttttcatctgttcagaaatcctagtgggttcttgcaaaaaccccatgactctgctaccagctccctcccgatgagtgacatgtcttcttatcctgtacagccaggcctttcccccagtatgttgattcctaggcaagcaggatccgtgctcctgggaggcctgccacagaggctgtgtccttcttccagccgtgggttgggctaccagggccaagggcactgtaccctccttgcttgcctccttcccatggtcccatgcgggaggtctcttgaggatggcacagcaggggacatggtgctgggcgcaagggctccagaggagcttgtgatcctggaccctcactgttgaagggggcctcacgtgcccctgttgtgggtgcatgatgggagctgagatgacacacggtggtctcgagagacattgggggcagctctttgccatccagaaatgggctcagggtggaaccaagatcctcatctgcttcccagagcctgcagcaggcttgcatcgtggtgcaaggaacgacacatttggagactgaactgacgacgttggatgcatcagtccccgggctcaggatgcggtccacccctccctcagccttatccacgatccaagaagctacctatgtctctgtcttgttccccgcagggtcctcctgggcctacaggtcctcaaggccccatcggacagccaggcccctctgtgagtatccatggtcaatgaccttcgaaaagccccacgcccccccagagctgctggcattgccagcatcctcacccatggccggttatttccctgcagggagctgacggcgagccggggcctcggggccagcagggccttttcgggcagaaaggtgatgaaggtcccagaggctttcctggaccccctgggccagtggggctgcaggtaactgtggggttctcaccacaccgggctcctccgcttctgacgccccctgtgtcttcattgtgctctctcctcttgtctttttaagaatggaaaactaaagccaggctgcagggggcctcctgggcctcctcattccaactggaagtgctgtagcttcccagaattccagacatgcccgcatttaccacacttcagcagtggcatttatttctgtgctcattgtggaaactgatgattcgtgagaaacatagtaacagtgacttctaaatgcacctcctagagatgacaacgataaacatttgggcatgtttcatggccatgccttttaaatgtgtgtattctcatgcacagaggcgcatatgtaattgtatttggtgtttgacaatgaatcatgtcataagtcagagagaaagtttgttcccagctttccccattttccatcctccattcccgttttatgttacgagtgtgttgaatgccattacacatgactttctatttatttggaaaacatgatttttagtcactgcacagtaagccagcatctggtggtgacataatttacccaggcgtcccctgctggctccttaggctttattgttttatgggttcctgccataatcacctttgtcgtaaatctttgcaatcttctctgcttatttcctcgggccgattctgagactgggaaccccgggacgtcctcgtgggtagctatgcacagagaagcaccttcccggggcttcgggggctcagtggtgctgtgtgggtggaggtcgtgaaagctgtgtgtgtgtttgacatacacatgacagaacagcgcttaactgggaagtttcctgttctcagggtttgccaggacctccaggcgagaagggtgagacaggagacgtgggccagatggtaagtgtgcctgagactccaaggccttgccgtactagcggctcatgttttggggaaacatttgcgtttcctctgggctcagtggtctctcccttttcctagggccccccgggtccccctggcccccgaggaccctccggagctccaggtgctgatggcccacaaggtcccccaggtggaataggaaaccctggtgcagtgggagagaaggtgaggctcgtgcctgctctggtggcagatttgcggttgtttgaggagtgtgtgtgtgtgtctgtgtgtgtgtgtctgtgtgtatgtgtatgtgcgcatgcacacgcttgtgggggtgcatacacgtgtgtgtacctctctgtgtgtacacagagatgagaagtactcatttctgtgggcatggctggtttattcctatgaagggcattttgaaatgtaggcagatgcttgtgaaatggaactgggaactctgactgtccatttgtgacagccttttgcagaatttccagacgatgccccaccagcaaagcccctgcctcctccaagactcagctctggtggagatcatctattccttaaataactggtgtttctaagcttgcagtttccatttcagccgaattattttctcaaatgggtcctctccatttgatctgattggttttggagcccagactccatgagcgtcatggacccagtcgtgtgtgtgtgtgtgcctgtgtgtgtgagctcctgtgtgcacatcggtgcatgtgtgtgtgcctgcatgctgggtgggacagcatttgcctgactgcaaaagcacctctcccagttcccctggacaagagggaagacagagtgtacatccatgcacttgagccccctgtgcaccgtttccagagctttctttctgacatcaatcaggccattaaattggaagacgccttccaccgctgctcattttttatgatacagaaattaaagaggaatatgccctgctgagaccacagggtgatggtgtgcggcttctgctcagagaggcggtgttttccttggtgtccccgctgtagggcgcatgtttctgttcacctgctgccactgtgcatgccctcttccctgcgtccctctggcctgtgtccctgaggactgcgtgcctgtcctcctgcctcggccctggccatcccccacctggagtgccatcctagccacttaccagcttctcatagttgccctccacaacccttggagcagcgctccgggaaagccttcacagacagtgttgcttgcagtctggacactctgccctgtatccatcacgtgcctgccacattcctcacgcacctccaattctgggagtgtgtggggacagcactccccagaaacccctgggtcctgggtgcccaggggcaggcagacagcaggcaggatttggcaaatgcttgaaaccgtagcactgcgttcatcgcggtgctcaccgctgccataaccacatgcactgtctccctagggcgagcctggcgaagcaggtgagcctggccttccgggagaaggcggccccccggtgagtgagcgggcgctgcgggaggggtgggatatggccgagcgggtgtgtggacggggtgctgggttggaggctctggctctgccttagcttttccatccacgaaatgggagttgtaacccctcttgtgcccatttcatggaatgaccgtgaacaaggtgtgtgatgtgggagtcagcatgtacacgcagacctagcaatagctacctgtgcccagtggcctgcagtaactctaccctctgtagtgtttgctcctggccccttcgcggggcagctgctgtcacctcgtccccccggaccttgagggccagactaggaatatccaggccttctcaggccagatgaatgttcactatgaggccagcccaaaggtggctttcaggcccaggaccagctgggtggactcgggtcttctggttctagctgctccctccccatgagatccgtggagtctgtgggcaccccttgtggtcttcactgactgatgtctggtccaggagtcagtccctcccacccagagctgaatctcaggctttgagggccccagaaagtgaaggctcctcaggtccccctcagggtgcacacaggagctgattctgcccagggcttggggagcgacctggcagccagccccctgcagggctcagcagatacttggaaaggctggtctgaatggggtgagaaaaccggggaggcccaccttgctctgggcggcgacgtggttggctctgaggacttgacactggcctctttcctccagggacccaaaggagaaaggggagagaagggcgagtcaggcccttcaggtgctgccggaccccctggacccaaaggccctcccggagatgatggtcccaaaggcagccctgtgagtattccagacacacctcaggggccctgcagcaggggcggggctctgcactgggatcattctgactcactggcggtgcactctgctctgagaacagcttcaagaccattccatgtgttgggtaaattttctagacactagaggttttcataccagctactgaaccaaaatagtggagatgagacagggcgtggactggaggagaaagccctgagtgattcttctctgtgggccaggcggccggctgagatgcacgagtgacagccaggctttgggaagttgcccccgcccttggccggccctgattttgcatcaggaggggcttcggagaggcacattccggaagtctgaaggtccaggttctagttgcagcctggagctcccaggaatagacctgtgggcggaacgcctgccccttgcttggctctggaaagcaagagaccagctgacccctgccatgcccactggccaggcttgctggctctgggacatgctgcacgtggaagggtctctgggccataaagtgcactgggttgtcggaactgctggaaagtcttaggagctggacggtggcaggtggccatcttgaggtggtgacatgattggccgtgtgtggtctcagtcaggttgctgatggccttggctgcttccttctttcttcctttcagggcccagtgggttttcctggagatcctggcccccccggagagcctggccccgcggtaggtgctcaagagggcaaagccaccggatcccccacagtgctggcctgcctctgccagccccatttcccctctttctggtggttctttgtgatgaactcccactggggcaggcaatgtcccaaaaggcactcgtgttccggtgatcagagcaagaaaacgcctttgaccccactgaccatgctctgtgctggcaccagaatggatttgggttttgggaaggggctggagatgcattgggaactggtgcatgaactcagggtgccatccggggttcagcaaggagctcgcttttgcctccatagggtcaagatggtccccctggtgacaaaggagatgatggtgaacccgggcagacggtgagtccacaatctgggctggcttcctggtggaggtgtcagtgtattcttgggaccttgcagcttgcttgactcatttctgggaaaaactccaacctagttgatattgattcctttatgatatcgattcccttatgatattgattcccttatgatgttgattcccttatgatattgattctggacagtgacagagctcatgaactccctctgagatgcacgtgctgtctcagcagcaggtttgcaggcagccccagggcttccacgacccaccatgggctcgcccgggaacgtcagatcttacccacagctctgcctagcagggccagtgcctctcctcaccaggcccttcctgccttaccttgaccgagatcacactggacgttgcatctgacgcttggcgttgagtgttttaaacaccgcttcaagcccagaacgtctttctgggacggatcgacccccatgggccctgggcaggactgggcctggaggaggcccctgaggccttgcagatgcccttgccccaccttgcacccagcctggccaagcgcgggggactgcggacctgagggcaaaggccatgtcactgagttgagaggagcgtccactcagagaaggggttagggatctagcctcgggctggatttccctgacagacacccccagtccaccacttcccggcctgtgtcctgggacgattcttgtccccccttctgtgaaaggggatgccagtgcctcgtccctgcccaggttgtggtggggaccgaaccgtcattgtgtatcaagagtcagcactgtgagtggggaagttctcttccaaaatgcagaaaacccgcaggatgggagttggggttccttacgctgtcacagcccgggtgcgacactgtcttaggaccctctgtgctagccccaaaagaagagagaggcggccgcagggctggccgaggagtaaatagactgaaatcgccatgtgttttgcctcaattgagtctaacgggccccaattcctcacactctgttctttctcccaataccagggatcccccggccctactggtgaaccaggtccatcggggcctccaggaaaaagggtaaataatcctgcaggcacatccttgctgtcaaatccctgcatgaaacacccccgcccctccccgtcacctttgcttgggccctgggtgctctaagctgcactgatgaggaagggctcgggtgtggcatgttctccacttagcctcggccacatcatcacctaatcacaggcttgccaggtcgacgcagctgctccttttaggacaggccgcctgctgacacggtcagtgatatccatggtgggagaaagacacccgcaaagctgcaaaggtccttttcccctggctcaggttttactgaaaagccagaacaaatgagaaggcatcttttgcagattgaatggtccagccacttgctggtggggcagtaaacagctgcctggtgcacccaggacggaggccacacacaactcgcggcgtgcactgcgcctccccacgtggcctgagaggcctttacctgggactggagtccataggactcatgctgaggacccgtgtcactgcgggtggcccgggagcagcctccatgaccctgcacccctgccctgcagcccggcacaccctgagcacctgcacccgagctcgtccctctgcccctgcaggccacacacacacacaccctgagcgcctgcacccgagctcgtccctccacccctgcaggccacactcaccacctgctgttctcttgcttctttcagggtcccccaggccccgcaggccccgaaggcagacagggagagaaaggggccaaggtaacgtgttttggagccaggctgtgaccgcgtagacctcccccaggggagcccagagggtggggagtggacaagcgtgtgggcagagatgtccatggaggctgagagtggctgccccaggggcacctggctcatggcctacctggggaggagacctggttctctctcaaggaggcagccaagtggtggccacaagactggggccgtctgccttgcccacctgagggaggaggcgggtggtgggtgcgggattcagggagcccaaggctgagtagttatgtcccccggagccctgcgacctcatgcctggtctttgagtcggccagacctgagccgcctacctctgaagtggaccgtgtccgatggtgaccgtgtctgctgcggggcccgtgcagaagatgggacgccgtcacccatgcagttggcttggggcctggcccagagcacacgggaggctattctgtcagtgaggtgatggcggcccggcctggcactgtctgcctccctcctggaggcgcctgttgttaaggagacgggaggttgtgcggttccatccctgctcgggcagtggcgctgtgacacccggtctgtggtcggcgcagtcagcggagacgggatccctgctggcctgggagatgatcgggatggagacttgaccagggcagcttccacaggcaatgaaatgtggagaattagggcaaccccggatatggggtcacctgggactcctccagaggtgcccagggtttccgagcagtggtcctgggccagggtgcctggagcctagagctccggacctcattctgccctccgccgtcctgcagggagaagccggcttggaaggccctcctgggaagactggccccatcggcccccagggggcccctgggaagcccggaccggatggccttcgagggatccctggccctgtggtgagtaggctgtgaggggcagaggggttgccgagtggagggacgggggaccagcaactcatgcagagcgtctctgtgtttcagggagaacaaggtctcccaggatccccaggcccggacggtccccccggccccatggtgagtcacattcctcatggtgagcatagcgggtgggatgacttcgccacccaaagccccaaggatgaggactctgatccccctgcctcctcccacagggtcccccaggacttcccggcctcaaaggagattctggtcccaaaggtgaaaaggtaagaggggcctccctgccccagcaactgtgactcggggccttcaaatttgtggccgtgggtctcaaactcaacaagctcttgatccgtcacctaaatgtgtcaagcacctgctgcaggctggtggtggggaacctgaggggtgacaaaggaaaatagacacgctgtgtttgaggcttggcccctgcctctggggggtcctgagcagctcgggagatcccggaggcccctgcggtattgacggagaaccttccagctaggcacagaggccccggctgatgggtgtccaggatcccaggttgctgctctccctgggctgagcggccccagatcctttccgcaggaggtgtgaggacatttctgcagtgggagcaaagcccttttatttttctaactgctgggaattgttttccacttgcattgatttatttacaaacataaaaggtactcaggagtgagatggttgtatatgaagcagaaggcagtgagggccctctcatttccactctgacgtccgccaccactgcccccagccccaaggcaaatgagagctggggctgccttgcgaggcttgccctgggttcctagaagacaaacatagacagcgagtgtcatggattcttctttttttagaaaaacaacccatgattgtaatatctataatactctgcatctttctttccgtgtcagtccacaaactttgttttagttccgtataggagcaggcgttcggatttgccataggaaattggagagcgtatacgaagagaaagacagagataaacattaccactcaggaaaacccctttatcactttggtctgtctcagtgtctgtggctccctgtctgtttttagacgtgactgtggccagcgaagggccacctcggacctgccgtttcgtcacctggcccctctgttgagcctgttccccttccaggggaggctgaccatgatgtaaagcttcctgtgccatggctgtgctgcgtgctaactggcccaccgtggccgagcatgaggcgtggctccctcaaatgccccttcctgtcttcattttcccacagggtcatccaggcctgatcgggctcatcggtcctccgggtgaacagggtgagaagggcgaccgtggtctccctggcccccagggctcctccggtcctaagggagaacaggtgcgtgagatggcacttcttgcatgtgggctgtcgagaggcattttagatccctggggcaggcacccaggggacaggaggcccatcagagcccggaaggacgtccacacgtcggttgagtccggtcatcctgcttggcagatgggaacactgacgggctgggcttgcccaggtgcacagtgagctgggcagagccgtctcccagctccatgccctgactggcaggcggggcttcctcctcatgaccgtggtgtcccccagagctggagggactcggaagtcaggtcattctgcctggttcccagccctgtgggagagcctgtcacccaccgcttgcccaggaggtcactggtgacaaccagccgtgtttgccagagctgcgggcagagtggctgttctggctcctgcttccaccttgtccccagctgcccccaaactgtagctcattggagtttgcagcctctgcaaaccatagccaaggaaacgccatgcagagagcttcactctgtcccacaactctgagtgacttggaagtggcctggggagggtgacgtgtgccatggaggcaggagaggggatgaggtgacctgtagtgcctctgtccttcccccatgagggccacgggtccttattcctgtgtgggaatctttccgtcccgagcaaggtgtgacggacacacacacgcacagtatgctgtgcccacccacgcccatgcctcataggatgcgggggacagggcaggagcaggcagagcccctggaggctgggagtaaggtggcaccctcactatgggcccggggaaggttgcaggacatggctgaagggtggagctcattgcaaaccctacctcactggccagtgtcctccatgccattgactgttttcctctgccggtatccccaggccacagcagggtcgtcggaggagtgccgcccagggtgtggtggcccggcaaccacgagaattagagaggcatccagggtccccacggccagcggggaaagcacccctgtgtccaccctgtttgctcacctgccctcaccccaaaccatggtcttggcggcattgctgatgaaggtgtcgggttggtgtgcaggcttgggtagttgtggggtccttacaatgagccacagcccaagttcctgcagggacaaggtgaagggagggaagcgctccctccccagtgaaatacggccatcagccctccgctaccctcgcccccagcttctgcccggagagagctctgagtggaatccagggctgtagggagagaggctgcaggtggctccagctgcccgtggcaaagctggtcaaagctgttctgtgccagcagctcagtctgggagggagtcagtggggagaaggggtctgagcggaggttccacgctccaaggatgcagaaagcacatttacaggcaggacaggacagtcagcatggatgggactccctgcccaacccctccgggcttagttctagaggggagactaacaccatgagcaggaaacagcaagaggggcccaagccagggccacaatgtcagggcagtggtttctgtatttccaaatgaacgtgaaaagaggtgctcagcctgaagtcctcggtggcctgggggatgagagtgagttcctggcagcccagccgggggagcagtgccgagggctggcagccttggggtggatgctcaggtcgatggctcccctgacatgcacagcccaggatcagaaagcagccacaggaggctgctgaggggccaaagggcataccgtggggaagggacaggggagccgaggggtgtggctgggtagcagggttgcagccccgcagctcctcctcgtctgaaggtgataacctgcattttctggtccttttcagggtatcactggtccttctggcccgattgggcctcctgggccccctggcctgccggtgtgtatctgggaggggcttggtcattcctgggagggcagggagggtggggataagccttggggcctcagtgtggagctagagaattgtggaaaagtcacacgagaagctggaattggggcctccagggtggatttgcccattaactcaacattggggttccaggagacagaagaaaggaagtggcgttgcccggccatggtttttggtggggaagacagggacaggaaacggtggccatttcagggaacgaggccacttgtctgtaggcatctggggagggtgcggaaggtagtagttggctctccagccctcccaattcccaggagcccggccagcctggcccagacaagagcagttagctgccctcctctggcaccgctgcctgggtctcacattgctgggagacccagcattcccagggcatccccacagccgctgggctgcaggtacacatggcccccgggggcccctggcacgctgagggctggcccctgctgtgtgctatcagggctggggggtgcattccatcagccccttctgagccaggacatgctcttttccgctgcgccccccccgcggctgtctgagctggggtttcctagccagggtgggtggtaggctggccgggggcaggtaggaccaccctgtgtctccacgaggggtgagcaccagccaggccccgaccctcctcccactctagccgggcaaatacaagcatagactcttgagggggatgcgggtgggagaggggcgaggggcgagaccaggctgggcaggacatggagcacggtggggctggagctgagacccggcttgctgacgttctgccctcctctctctgcagggtccgcctggtccaaaaggtgctaagggctcctcggtaagtaacatgctgcccagccaggccaatgcctggaaggtaggggagggcgacgggtcccctggcacgggaacaaactacccagacaaccgtcctagctcaggccctgctgctcacgatcctcccatctttctacactgacccatggcggactgaggcaggtgggctgctcgccgcctgccctaggaagggctccatccctctctgttctcatctcaaggatccaggagggtacaggggtctctgccattctcttctctgctgtggctgatagggccacctcccccacataggtctccagggaccattctagagctgaaggtggattcaaagtcccctcatacctctgtgaccaagggttgattcttttctttctccccagggtccaactggcccgaagggtgaggcaggccacccaggacccccaggccccccggtaagtagcccttgaagcccagaaagcgggacgggggctctggctagctccgagggaattgagaaagcaactgtgtgtgtgtgacccctcctgagactcatgaagcccatgtggcatgcccgggccttgtccctcgcacgcagccggggaaatgagccacacaggtctatcacaggaagcttacaggccaattggccctgagaagaacagctggccaggagagagaggatacacgtgtgtgctgtgtgtgcatgcatggtatatgaatgtgtgaacgtgtagtatatgcgtgtatgtgactgggcacgtgtgtgtgcatgtctgtatgtgtacgtgcatcctgtatatgtgcatgcatgtgtaatgtgtgtgtacatggtttgtatgtgcatgtgtgtgtgcatgatgtgtgtatgggtatgcatgcatatatgtggggcacatatgtgtgtgcatgtgtagtgtgtgtatattgtatacgtgcatgcatggccgtgtgtgtgtgcatatgtatatgtgtacatgcatgtctgggatatatgtgcatgtgtgtgtgtgtgttgggatgggggagcactagacaaggccctggaggtgaaaggtgaagcccagtttgaaccagggcatggcgagtgcactattggacacccccctttggttgtggagtctctccaactcccatcgtcatcttagctgtggccttctggaagtgaatggctctttgcatcaggaggcattcatgtggccccactgtgttcagccccagctagggctgcagaggccagactggggagacctggtccctttcctcaaggcttggccttttgtgtggctgagggcaggatggcagatgcaagcccaaggctgcaaactgttaagtttcagctctagagagaaaggagaggtgctccatgctggcaagcacctggcagtggggatgggtgtggaatgttccagagactggaggaagggatggaaacagttctaaggcggacagatgtccatgtagcccaggttgccaggccccagggaacccctgcagatgtggccccagctgtccctgctctgctcatatcctgggacccttcccatcctccatcacccaccgctgctcctgttctgtcccccagggccccccgggagaggtcatccagcccctgccaatccaggcatccaggacgcggcggaacatcgacgccagccagctgctggacgacgggaatggcgagaactacgtggactacgcggacggcatggaagagatcttcggctctctcaactctctgaagctggagattgagcagatgaaacggcccctgggcacgcagcagaaccccgcccgcacctgcaaggacctgcagctctgccaccccgacttcccagatggtgagggcctgggggggcaggggtggccccccaaagcgggcatggacctgcaggacacatggagtgtggcaaggacagttcagccaggcacagcggaagggacaggacgggcagccgcagcctccccatctgtggggccggggtgcgcaagagcctcccctcttgaactttatggaggcatctcagggtgaggccgggtgcagaggccaaggctttgaggtcagactctccaggttctcatctggtcttaggcattttctggcggggtgacctgcttgaacctcgtgttcctgacctgtcaaatgggaacagaaacatctcccaggaagaggacagagttgcgtgaggcagtgcctgagaggctggcacagtgccagtggaagtaagggtcagtgttaggaccggcagcagacgctgtgcttgggcaaacggccttcaaactccgcgatactgtaaaaacacatccttctcctcaccatcatagcctcaggcaccaattgaaggataaattcccattagcttttcttccccctgggaagtttgaatgttccccctgcaagattcgagggatgttcatggttccagtagactctgatcctacatgcatgaatttccagagttccttccagaaccctctctgcatttctgtccacccagagagtaggccggaccccaaccctcctggccaccagaacacgtacccagttgcttcatgcaccagctgtgttcttggtgaatgagtttgtccacatctctttatgggcccagcaggagaagcaaaatgcaataaagtaaaccccagaaaggcccgtgttggcggcattcctggggcgtgcattttaactgctggactgaaatgtcacagcggcttccggaaccatccagggagcaatccttctgactctgcctgcctccctccccgtctctgaaatccaggtgaatactgggtcgatcctaaccaaggatgctccagggattccttcaaggtttactgcaacttcacagccggggggtcgacatgcgtcttccctgacaagaagtccgaaggggtgagtagctgtgtccctccatggccccagcggggcaggcgtcacagacagggccatgccgagggcttcaagcatttcttgtatatgcagctttaagactgaaagccagaaatgaatccgtttcatcagtgaaactgttctttcagaagtagacctgaaattgttttaagaaattttttagtaataaaataggtttgtgcagcccggggtcaggaagggttggagggctttccacctggcatcctgccgtcccagggctgggacttcactcactggttgataaaagcttttctccggtgactcagtggtcccactgacctgagacccccattaaaaccctttaaaggaattgggagcaggtacaataacgtgagcctgagacatcttccggaagctgccctttgcctcaattcttattatccagcctgtttctgtgggttggccctggtccctcctgagtgctttgttttgaagtctgtttagtgaagaattcggggtggggagctgggctctgttgagattttgtggcatgtcacttaaatacccacctctgtggcctttcggaggcctcagcgctgtagcaggagtttgtgtgcatgtggatggtgtgtgggcacatgtggatgagtgtgtggatgggtgtgtgaatggtgtgtgtgtgtgtgtagatgctgtgtggttttgtagttggggtgtatgtggatggtgtgtgtgtagatggcatgtggatgatgtgtgggtgcatgtggctggtggatgggtgtgtgtatgggtggtggatgggtgcgtgtggctggtatgtgggggtgtgtgggtggtgtgtgggtgtgtacatggtgttcgggtgtgtgtggctggtgtgtgggtgtgtagatggtgtttgggtacttgtggctggtgcaggtgtgtgggtgtgtggctggtgtgtggatgtgtatatggtgtgtgggtgtgtgtggctggtgtatgtgggtgcatgtggctggcatgtgcatgcatgtagacgggcgtgtgttgctatccctcaagcatgcacctgaggcaggtccagccttggcccaggcgaggactgagtctccctgttgctcctggaaggtgaccaagcctgcagctctcgtgcccctgcatcagcttgaacggcctctccttcatgagctcgcagttgtcgcgtggccccaggcaaaggccgcccatttctggggccgcagcggtttgctgtgcaggtccagacctgtgcgcccctgcagcctctgcttcctaacaacctcagtgccccagaagcagtttcctgccaggggaagagcagctacgttctccccagggaccgccatccccttacccctcaatcacgccctgaccgtgctgagctcagtagccactttgggttaggagcccactggctgcagtggaggctgcacatggctggagatctgtggggctccaagtgcaggggtcccctcccccacctgaagttttaactccttgagaacctgccttcctagtgacaaaccctgttcagagagaatccaaacacgggggccttccatctcggctctcgtttccctcagtctggccagaggccccgcgtggaattcccttagaaaagaggtttctcggccctccttcgcggcctgcctctgcaaatgggtggccttgccgctgtggaaatcacgggccagactcctccaaactcagaggtttcctgggaagccgcggctggtgttcacggcacagcagcgtggggctgctgagcgaccccaggctcccccagtgttgaccagccaggcgtccacaggctgcagcctcgggcctgggctacagctgcttggccaagggcaagtggagacgctttccgaggtggcccccttggacccggaggaggctcacagcagaggctgggggagcccgcgcttgcccacatcccgggactcttccaggaagaagctgccttcacgccgcctgggcttggcattgacagtggcagatttggaaacgagagagggtgggagagctctgggtggcgtgagaggcagatgggacacccctttcctccaggggatccccttttctggccttcttggcacaaggccagctcaagaagaaggctggggggatcagccagggatcagtcttctgtgtcctcatggcgcacaacgtgagccccagtcagtccaggctggggacaggccggccctgggggcccttccactccacgcctgcagcaagtgcaccctcaggcagccggggctccccttgtcctgtttttgggacccagcgtgcaggtctcccctcagaggaatggctgctcacccacccatccatccgtggcgtcactgaggcctgccctgctgggcccagcctgtgtgtctgcagcctcggcctctgtggaaagcaggcctcaggtgggagccctcccaggaagcgggcacaagtagtgccccatggcagcgtgagctggctgcacatgatccaggcaggcagccgaggagcagccctcacccgcacacgtctcagtccccaggaaggttctaccacacacacacacacacacgcagatgcacactacacaccacacgcacagatacaggccacacaccacacataccacacagatacacgatacacataccacacaccacagagatacgcaccacacacacaatacacaccacatataccacaccacacatcacacagatacacaccatacaccacacacataccacacacacgataaacaccacacataccacacacacacccataatgcgccatacacaccacacataccacataccacacatagatacgcaccacacatcagacacacagataccacacaccacgcacatgatacataccacacatcacagatacacaccatacacagacattacacacagataccacacacacacaccacacatcacacagatacacccataacacactacacacacaccacacatcacacacagaccacacattataccacacacacagcatacacagatacacaccactcatcacacacacagatgcgtaccacacaccatacccttcacacagacataccccccacaccatgcacgcgcacacacacacgcacacagtctggtgccgcagcagccaggcaaggctgtgaggatgggatgaggatgccccacccctcgcctgcagtaaatgctggcttttattaccattcccttggtccatcattcattcattcattcgttcattccctccctcagtgagcgtttccagcagtgactgagcaccaggcgctggcctggggcctaacatgcaaaacgagaggcagagcgcacccttcctgggcagcagcaggggctggagggctggggccaggctcctcacatggcctccagtctctccgagggctggggccaggctcctcacacggcctccagtctccccgagggctggggccaggctcatcctcacgcggcctccggtctccccgagggcccaggtcaggctcctcacgcagcctccggtctccctgagggctggggccaggctcatcctcacgcggcctccggtctccccgagggcccaggccgggctcctcacgcagcctccagtctccccgagggctggggccaggctcctcctcacgcagcctccggtctccccgagggcccaggccgggctcctcacgtggcctccctaagggccggggccaggctcatcctcacgcggcctccagtctccccgagggccccggccaggctcatcctcacatggccttcagtctccccaagggctggggcccggctcctcacgtggcctctagtctccctcaaggcccaggccaggctcatccccccaaggacctgggccgggctcattctcctgtgacctccagtctccccacaagggccggggccctcaggctgcactgaaggcgctcggtgggtcctccctgcagcccccccggcgtgaggatgcaggcgcgggggccgggaaagcctggggccttgctctggaggccggagaagtaacccttttgttctgtttctctccctccccacctccccgctgcatgtttaggccagaatcacttcttggcccaaagaaaacccgggctcctggttcagtgaattcaagcgtgggaaactggtaaggtggcctctggcgtctttgcggttgtcactttaaacccgcccatctcgtatcttacagagtaaaatggcccgctggcccaaagagcagccttccacctggtatagtcagtacaagcgggggtccctggtaagtggccacctcggcccggccacctcggcactgcctgcttgcggcacggctggctcgcggctctgcatggcacccatcgctgccatgtgtgccacaccgctcttgccaaaccgctccacatcacgtgacagcaagactcagctaggtgtggagtcctctccccagcccccgccaccctgacaagagtgtgtttctgcctggagtaggcagatggttttccgtttctgtgtagggcgcgcagagctgggtgtgggccccagcctgagctgatcctctgcccacagacggtgcagccccaggcacctgagcactgaggtcagacgctccagaagcaggagcgctttcactgtgtctgatggcagggcagaggacacagatcccagaccacttaagccattcagagctccttctaggacctgcaccacggatcccctctccccagctgctcagggctgagggctgtctctctgcccaccgggctgcagattcccagttacactgcacaccactgtacgagtcacgttttcacttttggggatcgagtcttacagaatccatccctgaaaggaaacgacattggcctcccaggaaagaaccacataggaggttcttctggccggtgtagtgcccaagagccagtttggacacattgatgtgaggacagcggctgcttctgccgcgtggagtgcccctaggaaccccaccggagtttgatttgggccctctcctggaatgaagagcagagttctgtcttttctcccagcaagttaaaggaccaaggttccagaacacaagacgggttccgggtgtcatttatggcccagattctcctttccctcccttcttgggatccagtggccccactcccaggtggtcctcaaaggagggccttgctctcagaaggcagcccgtgggttctgcggcttgtagcctgaccacttgccatgggttgctgcaccctggcaccagccccagcctccctgggtggacacagagcactggccctgagccgcctttgccctgtctgcacctctgaagcccctcgtctcataacctgaaggcattcacagctgattattcatctctcgtgccctcattgttgttggtttgaaatcatataccagctcctttgcagacactccgagggtctgtgctcaccgtggctgtgtttctggaggcttcccgttttgtggtttgccgtggacttgcagtcctctcctcctttcctctcctgcttttccttttccccgcctcctctgtgctgtgttccaaaaagagctgctggcatacagaaggacctgaaacacccggggacagggagggcccgggaccagggctgcttggcccggagggacagagcgtaggggatgctgatgtgtgggatcaggcaaggaaggggccctgggggtgaagctgctgggggccgaggtggcagggtccattctgcagtcttgcgggtagttaccgcctgcgcttggcactgccctctccccgcaatgacagctctcagcctccaaaaagagcctctcacagcatcctccaaaatgggaaaagcagaaagagcctattttcctcgcttggaggaaatggctgtgaaacctcatttgcagccttcagcccgagtagcccatttccacctctcgtcctgttccacagagagttaatgaaggttggggtgaagggacgacccagggaacacatcagcttactttaggatctttccacggccttatttctagctctgtgaatatcatacgtggacaagaggtagatgggggcctctcaaagatacccagatttttcagccaggtgcaggggctcatgcttataatcccagcactttgggaggctcaggcgggcagattgcttgagcccaggagtttgagaccagcctgggcaacataccaagactccatctctattaaaaaacaaaatgcaaaaatgggctgggcaggttggctcacacctgtaatcccagcactttgggaggctgaggcggatggatcacctgaggtcaggagtttaagaccagcctggccaacgtggcaaaaccccatctctactaaaaatacaaaaattagctgggcatagtggtgtgcacctgtaattccagctactcgggaggctgaggcaggagaatctcttgaacccaggaggcagaggttgcagtgagctgagatcgcgccactgcactccatcctgggggacagggtgagactccgtctccaaaaaaaaagaaagaaaaaaccagaaatgggaattttatctgggcagggctacccacactgcaccatactgagagaatactgcagagaatccctcccaccaggagagcagggcctcactgtgggaccctggggttccaatgcagggcagcgtgccccatgccccgggcccccctgctgccccatgggcactgggggcttcaggtccttctgtgtccggtgctgcccaccgccgctccctgtggtgcacactcttcctcgagtcagtcacgttccctcccagaaggagcgccggacggcccagcctgtcggttggtattcacttttcctcctcaaggtttgcccgtaaggttctcgtggctgcgtctgaaagcgtggagttcgccgatagccctgggactgcagcgtgttccctcgcccctgggaaggcccaggccccaggccagctgctcactttgggctttttctagtggcatctgttgaaaaagtgggtcctgcagtgtgttcaccctcttcccactcccggtgcccaaacactcttggcaatactgaagtcagttcccttcctctgttcaatggggctctttcggagcaggccagaggcagggtccaaaacacaccaccacgaggcagcggttgcataggagtgggcagagcaggtctcaggtgctggctttagcctgcttcattccctgatgctgcaaacaggacaggctgccctgcccagccaggccttccctgcagagagggtccttcaaggtcctgcctaggccaggagagatgtgtgcttcatttcggggagctaagatgcatcgatgtcccctggaagtgtcaggtttttcagaaaccttgagttggcaacagagatgcaaaagtgagatgcatcatggctcaggatgccctgcacgggccttgcacctggtggagctgagcagcccagtcctggatacccagctagtgatgctggagaggccacctaagaagctgcacattgtcctctgatgccttccctggatttgtgcagagactgggagggctttcagggaggatcagtgtcatcagagtcccgggctgacctttggcacaggcagggcaggcagatggagccactcctgtctcaggaagcctgctcactgccctgaggagacgcttctgggaaggggaggagtggtctttcttgagtggccatgccagacatcatccgggacccctgtgcctccaggaggatccccggtcaccccagccatctgcacagccctgaccctccctcaggctcgcctcccctgagcacctcactacagctggcccgctcactccccgaggcctcgtgccccgtggctccagctgctcacagtctccctggccagggccttgtacatcctgggcacccagcagatggtcgtttgttcacataatcttgtgagcaccttcctttgctggtgttggagcatgatgatagggacagggggccagagctggagtggagggacatcgggagggctgggatacagatcagggtccctaagccagccctagaggctggaggtggggaggagccttccctaggagcagtggtctaggctgtgacccaaaggacagcagtgggggcacctcctgccaggtggggagtgtcccaggccgagggaggagccgtgcagtggctcaggggcagaaggaggacacctgctgtccagggctcagggagaagtgtggtgcagctgggagggggctctaagacctcctcctctcacccccagggaacctaatgcccctctctggccctgcacccctctactcaggggaaaccagggctcgcctgctgctccaggtgccccgacccagcgatcgggtgcagagctctgcgtttcaggaatgagaggcaggtcttcatgcaagccatatttttgagaatggttctctgttcactcaacacatacaaacctggcagacccagatcaccatctgggatggaggcacccaggtggcagaaggggagaagaactgtgggtggacgtgcagggagagcagctgcagctggcactgcagtgggtgctggcccaggagacactggctgccgttcaccatgcagcaaagctttatcaagcgcacactgggcagccatggggcgggtaccacggccagtaacgagcaagaaggatgccatcctgccctctctgaacttatagtctgctagggaagacagacactgtgacaaactaaggttggggagggcagccacagagtaggtgcaggagcatctattctgggtaggcttcctggaggaggcagcacaggtgccgagccctgaaggataagcataagccaagagaagtgggtggattatttaaggccctgaaggacatgaggcatggttccctttgttcctgggaacacgcaagagagcccatgtgcgctggcctcggccgggtctgtgggtacagtgcgtttccaggtagttcccccgagaagaccacagtgtgagtgaagcccagggcagtgcggacgtggggctttgttgctgtgtgtgtccccaccctgctgagccccaacacccctgtccccccagctctcctatgtggacgccgagggcaaccctgtgggtgtggtacagatgaccttcctgcggctgctgagcgcctctgcccaccagaacgtcacctaccactgctaccagtcagtggcctggcaggacgcagccacgggcagctacgacaaggccctccgcttcctgggctccaacgacgaggagatgtcctatgacaacaacccctacatccgcgccctggtggacggctgtgctgtgagtatcccgcgccgcgcccagcacccctgctcacgcctccgtggggctcgctcctcactcagcacgggtttacctgtccccaagatgcctgccagagggcagtgagggccccggaccagactctcgccccaggcagccccacagttgcagggagactaggaatcccaggcctatgcagctggagctccgggaacttgggagagttctgtgggttaggatgggaaatctgagacctggccggaaaagccaggggcgtgggtccctcgccccatccagggctgtggcgtggagtgaggaatggaggacccgttgtggttccagtttggagctgggagcctccctctccttggacagggctcttctgggagtggccagaactaagctgggcctgttcccgagagcacggccgtctggaaacactgcagacagttgccagctctccggacagcccggcccatgggccctctccatgtggggagagctgttctggtcccagacaagggaatggaggccggagcggcgggaggcttgctgagacctcacgggcagtcagggctggtattggcgctcatacccatgggccttcccacatgcacgcctttcccctccctactcagtgagctgggctcacctccgctaaggtccccttgagactgccagggccatcgcacaggtctgggatgtgcccgcgtgtcctggaggtgtttagggtgcagctgtgccccaagagcccaggcctgcgggagcctcagacatgtccccctcgtgtggccttttagaggctggaggtgggaatcgctgagaattccagcctgtgggtcttcctgtcactgacattggagcctgttctctccaccacttattcttgagagacctgcggaaagcagcccttagcgcctcgctcctttagtgtttgtagaaaggcacgcctgaggccgggtaaacgggaagcggtttactccgctcccagctctgcaggctgtccaggaatcgttgtgtggtgccagcatctgcgtccagtgatggccccaggctgcttccagtcttgggaaggtgaaggggccagtgtgtggaatgcacaggagagaggaagcgagggggtgccaggccctttttaacaatcagctctcatgggaactagtagagtgagaactcactcattaccccgagggcagcaccaagccccgtgacccagacgcctcccaccaggcccacctccaacactgggaccacatttcaacctgagatttggaagggatgaaggtccaagccatggcaccggcccaggccagctcctgaggggaacggggccggcgttagggccggccctgcagggtgccctcttctgagcaacacggatgggtcctcagtgtgaggcctgggcaggcaggaaagccagagggtggtgccgactgagagtgcaaggcctgtctgtagccctgggagcagagtggacctgggttccaatcccgcctccccctgcccagcatcgctgcggagcacctggccctcacccataggacgctcagctccttttctctgctgcccaagggctgcactgagggttaaagctgtgtctcccagggccatcccgcggccaggccgtgctcagcgggggccgccctcaccaggagtgctcacctctcctcccggctgctactgccttctgcgattggttggggtcagtacttcggatctgactgtggaatatgcagaactcatccctgtgtaaggttgatggatccagatccctggaaagaggcatttaaaaatgccagggaccttacccgtcctccccaaatgagtataacatagcacctgcctcacagggctttctggggagcatgtcaaaccatgcctttagagctcggaatcgtgtctgacccactgcaagccctggatgagcagccagttcctgtgaatatttttagataacatggaccacaaatgtaaggcagtaaacatggaggtgaagagaaatcaggaaccctgtaaaggcgaggcaggacctggagggacagcctcctgagtttggctttgagcttcctggcttccatggcaaaaagggaaactagctggcccagtgggtattgtctggtaaagggagaggaacagctttccagagaggggaatgttccctggaagacaatgctagaaagatggatcccacgaaggacccttggaggttaaagggcaggccagacccctgctccctaatctggctaagagaggcttctgctgcttttaagaccttcctggaagatccaacttcttccatcccagttcctcttgaagctcctgcccctactcattccatcagcaaagcccacttctgcgaggtcccagaagtcttcggcaatgctttctgactcagaacctgacttcctggctccacctgcatcctgggatagggtcaagctgggatcatttaaattccacaagcagagagggctcttgctcagcccagtgtctcccggtgatgagggtgtgctgttggcatctggggaagtgtggccattggtttgcaagacattccactttgccagtctcgggtgtgccaaacgcctccagaaacactccccacgtccgaatgcgaaccaccaatacaagtgttcccttctttctacatacgcaaaacctgaggcccagagagttacggcgactcgcccaaggtctccaggtgtgacagagctgaggctcctaattcccactgcagcattcttctcaccatagccccttcctggcatagctgcaccttgaatacctcagttgacagtgatctcactacctcctgagacagcccaggccatggctgcagagtctcaggatgaggaagctcttccgagaactgggctcaagtctacttgtactatccgcccatcgcctcctgggtctggtcccgtcagccatgcagagggaaccgggttcaagagcagtttcccagcccaagccttctgacatcaaggcccgacggctctctgatggtggacagcaggctgtttggcattctcggcctccacccactagatgccagtaggagccccctaccgagtgacggcaacccagaatgtctccagacacatctcccaggggcaaaatctcccccatggagaagcacccttctacacacagaactaaggtgtgaagggagcgcagagggttcacctgctgcaagggcaaagaggacctgctccttcctgtctcccatggaacccaaagaagctggcacttctggggtgagatcaggaccctcaaagccgagaaccaagtgcagctgccgtccagaccgcgccaccttctcaggcagtcagcagcgtgggtctggttagccgcccagtgctgcaagtgccaccccaaaaggagaccctggctcactctctcgcccccttccccatggcaggcgttcctgagttccacaactgtccttggaagtgtctctgcgtgcagaggagggattgggatcacggggatacccagactgcactctgggcagggagaggagaagcagccccctccccagggctgttctacttctggaaagcaaagattctgactttgaaaagatggagagagaatggcccaaaactgcctaaccccagatggcaggggcaggctctgcggccaagctggacaggtggtttgggtggaaaggtgggcagtggcagcagcgtggagctggggtgcggggcggccatgggggtggcatgcagggacgctggcccggactctcaggtgccctgctgaccccagtccctgacaagcccaaccacaatttgaaaagtcacaaccgtctcatttaattacggaggctgctgcaggaggccctgatgccccgaactcgggccagcggcaaaagccctgcctcagcccccggaggtctgcatgattcatattgtaataacggccgaagaaattggaattccaacgcgggcatcgtttggctggggcgcctgattgacggggccgctgagcgggcccagtggagaggcacaaatcacctgcaagagggcccaggcaccccgccgcataaatcctggtgtttgtgcagctttcggcgcctctggggggccgttctggcctgtaatggttatttatacccctggaataacggggtaacagagcggctcgcagcggcctactttaaatacgcccctctctaagcactctgataattggagcagaggggtcccataaatcccatgaaatcacccgacagctcagcaaatgctgcccgtccctctggggagagactggtgccatcgctgagaagggctgtgaccgacgccactgctgagatgaactgcttgcccagcctcccaggggtggatgagaaaggccgggcagcgccctgctggcttgctgacctgtcgccgagctcacttggctccccaggacagcgccaccttgcagtggcccagtgaagccaggcccaaccatctcactgcactccctgggtgggactgggccagggagcagaggccggaggagaggcaggcagggtggtctctggctcctcgccggtggggagggtgaggaggttggtaccctcagggttcacccctggagggtgtggatggccacctctcattgaatatcctgtgtccagccccgctgcccacctatccttcccagccaccgcagagctgcaactggcccctgccctccgttccacaggagagctgtggccacccccaggcgggcttgtgggacagcagcatcccagctgtgttctgcagggctgagctggccacagggtgccgtctgccccacactcggcattctgtggaactgtgtgttttgctgtcaagtccgggggtgccccatggcgaggtcctttaggacagcgtttctcaaaggccagtcatgaccacgcctatcagaattgtctgagacacccattttttaaaatgcagattccgagtcccaccccagccagacggagtcagcctctctgggcaggggtcagagctgtagggggttaacaagctccctgagaactcgcgttctctctgaagttccaatcccaacttgaaaatcatgccaggctgagccagctgcagtaacagaaaggtgttcctatcaaggcagggttgtgagaagggcagggtcaggggagaagtggacattaggaggtgaagtttgggactctcatggataatagcaggaacgcatgcagggaggtgagcttcattccttctcacagcgcctctgtgatgtgagcatgcccattttccagctgaggaaactgagtcacagaaagcgtatcggttatccattgcttgtaatcaactagccccccaaatttagcagcttaaaaccacagatgttcgttacgtcaccccatgtccgagggtcagaagcctgggagaggtgcagctggctggctctagctcagggtctgtcttaggtccattcgctgccacgacaaatctcgccagctgcgtggctcataagcaacagaaatttgtcgcccacagttctggaggctggaagtctgtgagcaggttgctggcaaggcaggctctggtgagctcccctctgggctgcagatagcagcttctcactacaccctcacagggtggagtctctcgggtgcctcttttataggggcactaataccactcatggggttccaccctcaggacctcctcaactcccatcgaacggccccacctcctaataccatctttgggaacgggaacattaagatcatagtcagggagaataaggcccttcaaggccacgccctccccataggtcagggagcagaataccgggagagctggagctgctgtctgctatccgaatctccggcctgggagtctgcgctgggccctctgcagggctgcatcctggggtcactgcctcccatccgggagggaaccctggctggcccctacttgtttatctgatcatttcttttggggatggggcagtggaaggagatccttcccaggcccagatccagctgcgactgtaaatccagtctgggtctgaggtagcaaaagccatctgcccaggatgcgtttgcaggctcctggtttgcgggaaaggtgcggcctccagggcccttgtcttgggggaagttgacgggacagcagggccagctcagcctcagttataaagaacactgggagttatatttgggtggctttggggagggaccaaagaatctcacacctgcgctgcctgtgttctgggagggaggcggcctctcctaggcttccatcccacatcccagcgcccagggttgtgctgttttgagcaagggatgggtgctgactcatcctgcaggccaggttcattgcactacccctgccctctgtgcctcagtttacctaagactcctctagaccagatggtgtggaaggtccccaccccttcccatacttgtggaggtgaagacccagcccaccgagtgcctaaggcagtgtgtggcaggtggtcgtaggggggtcttacttggctcaaggctctgccggtgccgcctcggactccttccttttcgaacctggagcccccgtttgattttccagtgtgccctgcttgttctgtagctggccctgggtcctggggaggctgcctggaagtgaatacctggggcatcacaaggagtctggactgggcacggtgggaaggctgatcagcttcaatcctgtgtgtgcctcagccacccctgaagccttgggagggtcctgtcgcctcgctgatgcccacaccaccccacctccgacctgtgcagggggactcttgggacatccaccggggttaaatgcatgctctgatcagccatatttcctccaacacttgcccgggcaagcgcagccctgggtaggagacaggacaccagcctgggttttggagccagacagattgtggggggtgattggtaaaccccaagacccccaactgttcttaaccaccggccatctgtctccctcttccccagaccaagaaaggctaccagaagacggttctggagatcgacacccccaaagtggagcaggtgcccatcgtggacatcatgttcaatgacttcggtgaagcgtcacagaaatttggatttgaagtggggccggcttgcttcatgggctaggagccgccgagcccgggctcccgagagcaacctcgtgacctcagcatgccattcgttcgtgagtgtcccgtgcacgtcctgaccctggacagtgaaggcttctccctcccctcccacctgacttcatctacgcctcggcaccacggggtgtgggaccccagcccggagagaacagagggaaggagccgcgcccccacctggagctgaatcacatgacctagctgcaccccagcgcctgggcccgccccacgctctgtccacacccacgcgccccgggagcggggccatgcctccagccccccagctcgcccgacccatcctgttcgtgaataggtctcaggggttgggggagggactgccagatttggacactatatttttttctaaattcaacttgaagatgtgtatttcccctgaccttcaaaaaatgttccaaggtaagcctcgtaaaggtcatcccaccatcaccaaagcctccgtttttaacaacctccaacacgatccatttagaggccaaatgtcattctgcaggtgccttcccgatggattaaaggtgcttatgtttttgtgagttttaagtaaatatttgtattgtattgttataaatgttaagtgtgcctggctttcaatcatgcacggaaacccagtctcagtcccacggacagaatgggcgaggcatggattctgggttgcagtaccgttctgattagaaataggaagtctccccacccccgccctggccaagaacgtgcaataaattggaagtttgccccggggcagcaagaatttatgctgccattgaaaagcaggtaccagtgccccttttcagacagtttttgattcgctctagactttttttttttttaatagggaaaaaatttgataattttcttttttctacatgcacttaagactaaaacacaggtttggattaattttatttgcttcctttttccgcttttcttcccgcagagcctgatgggagaatgtccagggcagggaaaccacattttttgtaggtgataactcaatgaaaattggtgcttattttttacacttctctcttgtggctctcttgtggtgctatctatctgttttaaggtctccttgaaggcgcactggggaccctggccatgcctcgttctccctgctttctttatcctgttattgcctccacagtctgttgccaaggactctaagatcaatgcacgtcactttcctttccactgggcaggatagccaagcacactccctcctgcgctctcccgccccggtgcgtccactcccgagggctgttatgaggactgggttgtgcctacttgatttgaaaacacacacaagcaataaaaagcctcttcctgcattgtctgtggtgtgaccatagcagattatatttggttcctgaatgtttgtggtgctaatttctgtgtttgttccaagccgttcagtcatgccatgcgctgcctcggtagatggagtaatgtacaatgaactccatgagtctctccagggctgcctgcagcacgtcttttccaagtagcctatttggattcccatctcaaatgtcctggatgcgagcgtcagcggctccagagctcggggcgggtgaggtcccctttggggaaccctttcctggccatcgaggtcggggggctgccgtctgtgggcaggaggacccgaggggcagccaggaaaggcgatctcttcactgtgaaaagttgcccgggtgcagcgccttttccttctaccatgggaaatgcaggctgggcccttggggtgagcctgcggggctctggtgctgtccccgacccccaccaccaccagaatgcagttccagcttaggaagccacaaacaagccacccaggaggaacaaaacaccgccagcgtggattttccaaatttccctggaaagtaagtctcgctcttgccaaagaaaagtctggcttggagagtctctggagcccaggatgccagcatgtgccaatgactgtcaccttcatctcttcaaaagaaaagccatagccgaggactgtcccgcgacccccgtggactgcgtctaggtcatgtgattctgttttcatttctcatcccatccaatttgtccttttctcctgtcattttcttcctctgtggtcccttcaaagttgttataatttgtactgaacttcaaaatgtgtcccgttctccccagaccactctagccacagtatattgcaataaaattacttcttatatttgcagaaattcttttggtgtaattttattttttcctctcaatatatataattggacaaacgctggcaaaaagaaaaaaatggtaagcaaaaaacccaagataaagtttcgaggacatcaggccttttgaaatacaatgtcaaatgacacattgtacggtttcaaaaaatccgctagacatgtcataagttttaactgtaatgcccaggaaaggatatcttaaaatattctaaacttgtgtaacaaaggaataattaactgtaatagtttttcaataaatcgagttgggtgtttccaccgt

SEQ ID NO: 69 - DNA, 11560 bp, Homo sapiens
ggcaggcccctacagccaatggaacggccctggaagagacccgggtcgcctccggagcttcaaaaacatgtgaggagggaagagtgtgcagacggaacttcagccgctgcctctgttctcagcgtcagtgccgccactgcccccgccagagcccaccggccagcatgtcctctgctcacttcaaccgaggccctgcctacgggctgtcagccgaggttaagaacaaggtagggctggagggcctccctggcctggcccacacgtcctgccaggccagagccctgagcttggggtcccttgaaccccctcctgcctatcctatgtgacttggaaactgagaggggaaaagggagtgatatgggataggggctgcctgtctccccctgaacatcccggagcccccagctatggttggggctggaatgggggggcacacagccacacataaacagagggggtcagtccattgcaaagatacccacctgatcagtcttctgttaacccttcgtgttcttggggggaacaacatagggggaagacttgttgatttttccatatcccccggcctgacaaagaaattggggagcgcttgagtgctggggtacctgggaagtgacgccgtgaaagtgtgggagatcctgaagacagagggggacggtgaaaggcaggaagcgggcatcagaagtgcggcaggggtctcctgactgtggagctaggaagatacctggacaccaccttcatgctatggttgggtaaactgaggttcggagaggagaggcaaatagctggggtcccaggtaaagcaggtacagcgctcggaccctggactcaccccccatacaccaggatgggctcagcttctcccagctggagaactttaagtttccagcccactggaatcgccccaacagtattgccgagggaggagttcctgccccatttgacagaggggaacactgaggctcagggtggcttttcccagggtcccatggtgaggaagtgggggactgggttggaacctgggtcgagggatctcggggctggaggagggggctggtggggggcgggtcctcgggcgagagacagatcccagcgccgccctcctcccccccagcgccggccccagagccgcgcagagccgcgcagagacgccgcgccttataaggcggcctcggggagcccgggccacgctatataagggccggtttgctttataaagccgggctggtggcgtggggggcggcagggccagggccaggtgagggggccgcccctcccacctccccccactcacccgggagaagaagaggcagcccggtcccctaggggctgggagcctggctgggcttgggcggagggttctggagaaatgggagtggagtgggggaggggggggacagtggagagagggaaaagcagggaggtggggggagaggcagacagagatactgggagcctgagacaccctagggacagacgggggagggcgagccaggagcgagataagacctagacaaggatggaggggcagggagaggagacagagccccaccacccccaccccaggcaggaaacctggagacagagaaagacctagagaggcagatatacaagacccaggagccctacccctggccagacagggactagccacctagagagatggggacccaagactgggccaagaaaagacagcgctggggaagagagagacagaggagtcggggggataagagggagagagacatacagacgtgcaaggggtgggggctaagacagagacaagcccccaccactaaccagagacagagccctggagctgaagacctgggggacacggagagacagagatgtatgaccagcactcctctgcaagccagcacccagggacacctccttagacatccttcttcccttcctgaggtgccctctcttccaacagggggcacagagggggcagggctagaggaagagaagccccaagtttggcctgggcgaaaaaccagggtgccgggtgccacccctctagctcagaggatccagctccccacaccccacccctcatctacattccctggtgccaaacctcagaatgcccggaatggccccctgggcaggtgccacctcagccctggctctcagcccgccccagcccccatcccccaactatggatctggggcaaaattgccttagttgggaaggacgagggagatcaggctctaggaagttcagacaggacccagggagcccaggctgcccccaatgcatcctcacccctttctctgtgccccctgccctcccctcgccccagctggcccagaagtatgaccaccagcgggagcaggagctgagagagtggatcgagggggtgacaggccgtcgcatcggcaacaacttcatggacggcctcaaagatggcatcattctttgcgagtgagtgaggctctcgaagccgagaccctgcaacatcccccaactccatgcagcccctcaacccccaaaacaaccatgatcctggaactgagttgaacactttctattggatacctttggggtggccagtaatcattgtgcccatttaacaggcacagaaaactgaggctcaggtgaaatgcattgcaccaagtcccacgtggtttcaagggaaatgactctagaatcttaaccaccatgctatatagggtaggcccatctgtggccgccagagtccccagaaagagcggtcacagctaaaaggcagcagccaacagctgttcatggctggcttggtgatgtgaggagagatgtgcagcaataattaaaggaggccctggttttctttctgttttctttttgtttttttgagatacagtcttgttctgttgcccaggctgcagtgcagagacacaatctcggctcactgcaacctccgcctccagggtttaagtgattctcctgcctcagcctccccaatagctgggattacaggcacgcaccaccatgcctggctaatttttgtatttttttaaagtagagatggggtttcaccatgttggccaggatggttacgaactcctgacctcaattgatccacctacctcagcctcccaaagtgctgggattacaggcacgtgccaccatgcccggttaatttttgttttttttttttttttttcagtagagatggagtttcaccatgttgactaggctggtcttgaactcctgacttcaagtgatccacctgccttggcctcccaaagtgctgggattgcaggcacatgccaccacgcctggctaatttttgtattttttttttttttttttagtagagacagtgtttcaccatgttgaccgggctggtctcaaactcctgacctcaagtgatccacctgcctcggcctcccaaattgctgggattacaggcatgagccacctcgcccgaccttcttcttcttcttcttttttttgagatggagtcttcctctgtcacccgggctggagtgcagtgacatgatctcagctcactgcaacctctgctttccgggttcaagtgattcttgtgtctcagcctcctgagcagctgggattacaggtgcccaccaccttgcccggataacttttgtatttttagtagagacgggattttgccatgttggcctggctggtctcgaactcctgacctcaagtgatccacccgccttagtctcacaaagtgctggcattacaggcatgaaccactgcaccctgccggccctggttttctcctcgcctcaaaacctcattgctgagggaggtgaaaaccctaacagctcccaagccccagttccactgcaatcttttttttttttttcagatggaatcttgctttgtgacccaggctggagtgcagtggcatgatcttggctcactgcaagctctgcctcccaggttcaagcaattctcctgcctcagcctcctgagtagctgggattacaggtgcccgccaccacgcccagctaatttttgtatttttagtagagacggggtttcaccatgttggtcaggctggtctcgaacccctgaccttgtgatccacccacctcggcctcccaaagtgctgggattataggcgtgagccaccgcgcccggctccactgcaatcttaatgcatagcagggccctaaacccagcctgcgcccgatctgcatttgagtctgacccagggcagagtgactgtgagtggcctcgggaagactttgaaggtgcagcttcatcaagtcctagatgctgggaagaaggggtgtggggggtgtttaccttgttccattcccatccactaggaacaaggaattggcaggtggggaggtaggcatgctggtgtcccagctcaggcagaggactgctcagacgtcaaacagtgcagtcccagcctgggcaacatagccagattccatctctacaaaacatttttgttttaattagcttggcatggtggcatgcgcctgtggtcccagctactcggaaggctgaggtgggaggatcgcttgagccctggaggtcaaggctgcagtgagctatgatcgcgccactgcactccagcctgggcaacagtgaaaccctgtctcaaaaaaaaaaaaactaatgtaaacgacaagttgatgggtgcagcaaaccaacatggcacatgtatacctatgtatcaaacctgcacgttgtgcatgtgtaccctagaacttaaagtataataataataataataataataataaaagagtgggccgggcgcggtgactcacgtctgtaatcccagcactttgggaggctgaggcaggcggatcacgaggtcaggagatcaagaccatcctggctaacacggtgaaaccctgtctctactaaaaaaaatacaaaaaattagccgggcgtggtggcaggcgcttgtagtcccagctactcgggaggctgaggcaggagaatagcgtgaacccgggaggcggagcttgcagtgagccgagatcccaccactgcactccagcttgggtgacagagcgagactccgtctcaaaaaaaaaaaaaaaaaaaaagacctaatgtaaatgacgagttgatgggtgcagcaaaccaaaatggcacatgtatacctatgtatcaaacctgcacatagtgcacatgtaccccagaagttaaagtataagaaaaaaaaaaagagtgtagtgcagtcacccacgcactccggtcattcactcattcattcattcattcattcacaaaagaagcatttatgagttcctgctgtgtgccaggctctggcctaggcactgggaacagtgaacagaacagactcgactcagagctcaaggacttttagtccagttgaggagatcaatcatataattgatcaaataatcacagatttgtggtcgtaagtgtcctggggaaaactcaagcggaagggaagatgggagggtcaggtatatgtctgcgggtggagagtctgcagtttcctagagagtggtctgggaggcctctctgaagaggtgacatttgaacagaaccttagatgaagtgagggagggctcaggggacctgaggcaaagcagagggggccaccagtgcaaaggcgtgaggtaggatcgtgcttggggtgttcaagaaacaagaaggaggctggcgtgacgagcaccaaatgattgagcagaagtggagatgaagtcgcagagtgaactgagagtcagatggtggagggcattttatttcatttatttatttagagacagagtcttgctctggtgcccgggctggagtacagcggtgcaatcatagctcactacagcctcgacttcctaggctcaactgatcctcccaccccagcctcttcagccccagcctcctcagtagctggaactacaggcacacatcaccacgcccggtgaagttttcgggttttttttttttttttttttgtagagacacgggtctcaccatgttgcccaggctgatctgaaactcctaggctcaagccatcctcctgtctcggcttcccaaagcactgggattacaggtgtgagccactgtgcccagttctacagagggcattttaggcagaggacttaggatttcattctgaaggcaatgggaggctcctggaggatttggaactggacggtaacttgaactgtttaaaaaaggccattctgggccaggggcagtggctcatgcctgtaatcccagcactttgggaggctgaggtgggcatatcacttgaggtcaggagttcgaaaccaacctgaccaacatggtgaaaccgcgtctctactaaaaatacacaaaatttagctgggcatggtagcaggcacctgtaatcccaactacttaggaggctgaggcaggagaattgcttgaacccaggagacagaggttgcagtgagccgagatcccgccactgccttccagcctgagtgacagagcaagactccatctcggaaaaaaaaaaaaaaattctggctgctggatgaagaagggtgggtctgtaggggatgaagtggaagttgggagctcattacaagaggccaggaaacagactctggtggctgagacccaggtggaggtggcggggagcagtgggtggttttctggactcattaaaaggcagagccaaagaactttggagggactggacatgaggctgagagaaggagaaagggggagttgggggcaagtccaagggctctggctgagcacctagaagggggcactgctaggcagggaaggtggagggaggggggagtctggagggggaagctgcatgtcaggagtctggagcagggtgagtttgatttgagacacccaggcacccatggagagagctgaatgagatggtaagaaacccaagctgcagggagatgagggagttgctggcatatggaggcacttaaagtcaagacactgaatgaggccaggtgctgtcactcatgcctgtaatcccagcgctttgggaggctgaggcaggaggatcgcttgagcccaggagttcaagaccagcttgggcaatacaaatacagtgaaaccccctctctaccaaaaaaaaaaaaaaaaaaaaagccaggcatggtggtgcgcacctgtgatcccagctactcggaaggctgaggtgggaggatcgctggagcctgggaagttgaggctgcagtgagctgtgattgcaccactgctctccagcctgggcgacaaagccacaccctgcatcaaaaagaaaaaaaaaagaaaagaaaagaaaaaagaggcgagatcattaaaggagtgagtcagagaagaggcccttgtgggcttcctgctgtctacaagagaaaaggatgctgagacacgcctgccagtgaggcttcggagatcccagagactcggacacaccttggataagcaggctttctgactgggacctgagtctagctccttggcatcagtgtcccatttgtgtgtgtgcttgggtggtttggaggggctgcagctgagagctgactgcagggagaagtgacgctagggtatggcatggccccttgtggtcatcccgtcaccctcctcctgctgggctgggctggagagcgggagtgggggacacctttctttcttttttttttttttttgagacggagtctcgctctgtccccaagctggaatgcagtgctgcaatctcagctcactgcaacctccgcctcctgggttcaagtgattgcctcagcctcctgagtagctgggagtacaggcatgtgccaccacgcctggctaatttttgtatttttagtagagatggggtttcaccatgttggccaggatagtctcgctctcctgacctcgtgatccacccgccttggcctcccaaagtgctgggattacaggcgtgagccaccgtgcccaaccctggggggacacctttcttaccccttccccactcttctcagattcatcaataagctgcagccaggctccgtgaagaagatcaatgagtcaacccaaaattggcaccaggtgagcccagacacaatctcttccatccttgcccgcaagcccctcagacctcccctccccacccagtgaccaccacctgcccccctctagctggagaacatcggcaacttcatcaaggccatcaccaagtatggggtgaagccccacgacatttttgaggccaacgacctgtttgagaacaccaaccatacacaggtgcagtccaccctcctggctttggccagcatggtgagtgtggttgcaggctgggcagggggtggtgggcagcctgggctgggatgcaggtgtggccacttgtgctcctgagcccagtgaaggtggcggagcggggggcagggatcggggagcaggtgctgtcaacagcgtccaagggggccgggcgcggtcgctcacacctgtaatcccagcactttgggaggccaaggtgagcggattgcttgaggccgggagtttgagaccagtctggccaacatggtgaaatcccgtctctactaaaaatacaaaaattagctggacgtggtgacgcatgcctgtaatcccagctactcaggaggctgaggcaggagaatcgcttgaacccgggaggcggagtctgcagtgagccgagatcgtgccactgcccagcctgggtgacagagccaagactccgtctcaaaaaaaaaaaaacaaaaaacaaaaaacagtgttggccgggcacggtggctcacgcctgtaatcccagcactttgggaggccgagacaggtggatcacaaggtcaggagattgagaccatcctggctaacatggtgaaaccctgtctctactaaaactacaaaacaaaattagccgggcatggtggcaggcgcttgtagtcccagctactagggagactgatgcaggagaatggtgtgaagccgggaggcggagcttgcagtgagctgagatcacgccactgcactccagcctgggcaacagagcgagactctgtgtcaacaacaacaaaaaaacagtgtccaaggggactgtgcagcctggaggcccccttgtcagtccctgctttccctgccccacctaggcgaagacgaaaggaaacaaggtgaacgtgggagtgaagtacgcagagaagcaggagcggaaattcgagccggggaagctaagagaagggcggaacatcattgggctgcaggtaccgccctgtcctcactgcgcagaggtcatagaggccaggagggcaccctgatgtctgaaggcttttggggacaggatatttggcattaactatactataggccgggtactgtgcttatgctcatcttccattcacaaactcactcactctgccaacaccccagcagacaggtgcttgttatcaacataccctttccgcagatgagaaaactgagacccggagaagctggctcgcttttgcacagatcttccagctgatgcgtggcaggctggaacttcaatgctagaagtcagtcatgtgataggcccactctgggcctcagtttccagtctcgaaaggatgcctcaggcggggtgcagtggctcacacctgtaattccagcacttggggaggctgaggcaggaggattgcttgaggtcaggtgtttcagaccagcctgggcaaaatagaacccccctccaccgccatctctacaacaaatttaagagtttagccaaatgcagtggtgtctgcctgtggtcccagctacttaggaggctgaagtgggagaatcacttgagcccaggagttcaaggttacaatgattgcatcactggactccagcctgggcgacagagtgagaccctgtctctaaaaatgaaaatgggctgggtatggtggctcatgccagtaatcctagcacttcgggaggccgaggcaggcggatcacttaaagtcaagagttcaaggccagcctggccaacgtggtgaaaccctgtcactaccaaaaatacaaaaactagccggtgtggtggggcacacctgtagtcccagctactcaggaggctgaggcaggagaattgcttgaactcaggaggcagaggttgcagtgggccaagattgtgccgctgcactccaacctgggcgacagagtgagatgctatctcaaataaaataaaataaaacaaaaaaatagaatagaacaaaataaaatataaaaataaactaaaaaatgggccaggcacagtggctcacccctgtaatcccagcactttgggagggtgaggtgggtggatcacctgaggtcaggagttcgagaccagcgtggccaacatggtgaaaccccatttctactaaaaatacaaaaaattatccgggcatggtgatgcccacctgtgatcccagctactccggaggctgaggcaggagaattgcttgaatgtgcaagatggagatttcagtgagctgagatcatgtcactgcactccagcctgggcaacagagcaagactccgtctcaaaaaaaaataaataaaataaaataaaaattgaaaaaaatgataaagcggcgcctcatcctctcccatcagctatgcctcatggcccatgatgaggtctgtaattattggtgtgattctccttctggcttcctagatgggcaccaacaagtttgccagccagcagggcatgacggcctatggcacccggcgccacctctacgaccccaagctgggcacagaccagcctctggaccaggcgaccatcagcctgcagatgggcaccaacaaaggagccagccaggtgagtgggggcccccgggacacgccgtcaaggcccaggaccctggccaccccacggcctgaccacaccacccttcgcaggctggcatgactgcgccagggaccaagcggcagatcttcgagccggggctgggcatggagcactgcgacacgctcaatgtcagcctgcagatgggcagcaacaagggcgcctcgcagcggggcatgacggtgtatgggctgccacgccaggtctacgaccccaagtactgtctgactcccgagtacccagagctgggtgagcccgcccacaaccaccacgcacacaactactacaattccgcctagggccacaaggccttccctgttttccccccaagggaggctgctgctgctcttggctggacccagccaggcccagccgaccccctctccctgcatggcatcctccagcccctgtagaactcaacctctacagggttagagtttggagagagcagactggcggggggcccattggggggaaggggaccctccgctctgtagtgctacagggtccaacatagagccgggtgtccccaacagcgcccaaaggacgcactgagcaacgctattccagctgtccccccactccctcacaagtgggtacccccaggaccagaagctcccccagcaaagcccccagagcccaggctcggcctgcccccaccccattcccgcagtgggagcaaactgcatgcccagagacccagcggacacacgcggtttggtttgcagcgactggcatactatgtggatgtgacagtggcgtttgtaatgagagcactttcttttttttctatttcactggagcacaataaatggctgtaaaatctc

SEQ ID NO: 70 - DNA, 61344 bp, Homo sapiens
gcgcagagcgggcagcaggcaggcggcgggcgctcagacggcttctcctcctcctcttgctcctccagctcctgctccttcgccgggaggccgcccgccgagtcctgcgccagcgccgaggcagcctcgctgcgccccatcccgtcccgccgggcactcggagggcagcgcgccggaggccaaggttgccccgcacggcccggcgggcgagcgagctcgggctgcagcagccccgccggcggcgcgcacggcaactttggagaggcgagcagcagccccggcagcggcggcagcagcggcaatgaccccttggctcgggctcatcgtgctcctgggcagctggagcctgggggactggggcgccgaggcgtgcacatgctcgcccagccacccccaggacgccttctgcaactccgacatcggtaagcgctcctggtgccccgcccgagccccacgctgcagccaggactgcagcgctgcttagggaggcagggcgagccccactcctttcctctgccccaggagaggggcagacggggttggggcggagtggagaaactcgatgtccttgggcgggggcgctggcatagctgagaggggaagatgccctgcagaggaaactcacagtggctgagggagcccctggccgcctttgctttcctaacttaggtcgtgaggttcctaccggtccttttgacatctggaaaatgtccccattcactactaacggaggaagggctagaagagaagggtggggaaagggttcccaaaacttggaatgctaactaaagtgctgggaaattgaatagttaaaaaaaaaaaaaaaagttgcccgccatgtgcacggaaagttgcaggagaaacttggagtactccgagtctgcatcatctcctgcgcctatgaaattcattcttttcactgagacccaacccagctgcaggcttcccaggcaagcgctaaccgagcttctgggactgccaagtttgggtggatttaagggggaaaatgaggagaaagctgtggcattgacccacgccctggaggcactgtgtttgagagtgttgatagccagcagaaggtgcgaggggtcactcaccacatagctgtgaaaattcacaggaaggctatttttttcccccttgaatgtgtgtggggagggggagaatgggtagtggaaaacagatttgtcaccaaaagaacaaacctgccaagggtcacatcacggtgacagttccagactggacttagtgtcttgagtagagagaccctgtaaagagacctcctactccttagtgtgtatggagggccccgagagcatcctgggaggcttgtctgggagtgtttgggacacttgtgtttggatggctaaaggtggagtggcatctgggaaacatctctctcctcctttccagcccataaagcgtgcaagtccagtggctctgctgggagagtgtgtgtgtgtgcactgggctgggctgggcggtggggtgggacagccttgccgccctctgcctgtgtcgattcagaggtgaagaatggagcgtgtgtgttttaagtacagtcataaaggagaaggaaattttccactgagtcttgggtgagggactctaccagcgtgttgtggtgaggagggggaggaggtaggagcttggcaggggaggcagtgagggccgggaggggcactgctggtgggctgggctgagcctagaggtcagagtgggggtgtggtgaccagaatgtcagtgcagttggcagctgagggtgtttgtgtgacctgaggtcacccttgtaagaggctccctggggcctgcatggtacatcctcccctctcctgggggaacccagctggcccaggatttgtggattgcttagaaagatccttttgggcagcctgaagactggggagggttttcctccctcctccacctccacccacattccacttaccctttccctcctcatcccagttggtaacattcccacctgattagtgtggggagttgctgctgcagctgagttctggttttgcccagcaggatcacacacgtgcggccaggaggctggcaggtggaatcagggtgtgcaggggtgcagcccaagtccttttctgctggaaaatgggctgggtgacttcacttgcgtttttttggtatgtagtgggagtaggtccccattcttcccccttgccctttgctttggggtttctaccctaaaaattgaccacggaaaagtgaaaacaagcatgagtagatcctgcttccaatgggggccttcccgtctgcttactgcttaggtttcctgcggtgggtctgagcaatgcagaaagtttcttacaatttctctggattgaaacaagaaatagctccctcgctcctcttcataaatttctcagagaaaatctaagttaccaggaagtagccaaagaccaggagattgtggaatcaaaaagaaaaaaagaaacaaaaaatcttcgatgctctggcacggatcccaaattgttctgcctgggtttggtgagctgcactagtggcagggatgagctaatgcttttaaaatgggaggtgtgggtgtgagctgcttgcctgccgacctccctcgccttgcacagcaccctgctggcgtccagtacttggctcccaagtttcattgctcagagcctttctggtttccagtctgggttgaaactgtctattctcgccctcaaacaaatatgaaggagctccccattccttgggacccacacaaccccaccagtcaactttgtagccccctaaaggtgttcacatcagcccatcaacttcctgttttaaaaccatcatggtggttttctcttcatggcttggtgccatgttggcctagcaaaaggcacaggaggcctggcctggtcctctccggggggctgcccgatggcctttcctcctgtctctgctcatccacaggtgtctctttttgtcttttttccccaaagtcctagggcctggcatggcattctgggggaggaggagttaaaaggtgtttctatggcaactccaggccctgcaccctatggaagtgtttaggagaagaataaactacatgccggcttataagacacactgtgggggaaagaaagggacttggcagcaggcaggatgtctgtggtccccctccctggccagtcattgcccctgaaactcctgacaaaaccttgactctagaagaggaatgggagggggctggagatgaagaaggcggcctcggcccgggcaaatctgccctggcagctctgtccagctcaggaaggggtgggctgtgccaagggctttctgaaaatgtgcgtgtgtgcgtgtgtgtgtgtgtgcgcgtgtgtggcttctgcaaaggtggctggcagggctgaggggggttgcagcagagaaagagaattttgcttcagaatgccaagcccttctctccttctctcttgccgcctttgcatgggaggaatggggctgtaggatgaagtgtgttcggggcctgcctctgagcctgttgggaatttgagcatgaggctcagctggggggccggctgccagccccagaggatggcccctggatagctccaaattgttctgacaggggccagtgccagcagattctttcagtatcagatctgaggttgtcgttttagcaaagaagccattttcaaagaaaccagatccatcccctctccctcttacacacaattacacctcaacactgggctttgcaacttaaggaaaatagaaagaatcagactttggagaggcgccagcacttggtagggcaagtctgggggacccaggctgtggatgtcttggaaccatggaaggaggagagctgctatccagctggaggagggaagagacatgtcttaggcccctcctggttgcacgcacttcccaaatgccatctctttcaccccctcccccgaccccccacagcaaccttaagagtaggtattgcacccatttttcagatggaaaacactgaggctgaagagactgtgcttgtccaaggccacccagttgctaaatgataaagctaaaacgtattatcagttataccatgcttcaaaaacctttcaactttcattgacacatgacattctaaggtgaccaggagatggaatggatggttaacatttgaagaatgcttttcttctacatctgggttttctttaaaaatatgaagatagccaaaatggccagaggttttaattaaacatcatctttagggagggagagcttattattattctagtgtatcatagaggaaaattctaatgttctttggctattagatctggaaaagacccttgaaaccatcaagccacagtaataaaaggacttggtttgtctcactgtggcccaaggagaagtaaggttaatagagacaagacatttcagggcttcaagactcttcccttaaaggtgggatcagttagggctccccagtgggaggtacccggtctgccagtgtggtaggaggaaagccagggggagtcaggagactgggtcccagctggagaaggtgcccctctgacagttctgtgtccctttcacagtccctggatagataaggctagaaaagtggccacagaagtagcttgggtggagggatttttgtttgttttgcatgaacagcaggaaccattcagctccactgctgaatggcacattccaacaggttcattaattaaaaacaaaaacaacaacacgattctccatcgcacttggcttttaccattccagccagtatggacaaggaggccccttcttctaccttttgtcatagtctactcctgggtggccttgagaggcagggtggagtggtggaaaggcaatggggagggcagatctgagctccactccttcctctggggcttgttggctgtgtgtgcctaggcacatatgggctacctttgagctttagttttcttatttatacaaggggaataacaatttgtaccatcttggcctgttttatctatattttaaaagctacaagtatatgaatacattctatgtccatgtatgtatctctctgtatatctatgatatatccatttctatttatcatttatcatctatctatctatctctctatctaaaatcggagaagagtaaaatcctttctgattactttttctaactctagtcccttctccaaatccttttcttcctatacatttacatacataggtatccatagcaaatttatagtagtttttcccttagaaacatgaatagtagaacattaaacatcatggaataccacataataccacatatagtattctgcttgtttcccattcaacaatgcgtactagagatctttctacttaatatatatataaaactgtcagaggagcaccttctccagctgggacccagtctcctgactgcccccctggctttcctcccaccacattggcagactgggtagctccccctggggacccctaactcatccccacctttaagggaagagtcttggaaccttgaaatgtcttgtctctattaactttacttctccctggccacagtgagacaaaccaagtccttttattactgtggattgatggtttggaggatatatatatataaatatataatatataaatatataatttatatataatatataaatatataatatataatatatattatatataatatatattatatataatatatatatattatatttacatatatattatatatataatatatatatttcttttatgtatttcatgaggttataattttaaacagctaataagtatagagtgattactatgtgccaggcattattctaagtcattaacttacattaactcatttaattctctcagttttatgagggaggtgtgctattgtcatctccattttacagctgaggaaactgaggcttagaaaaatgaggtaactcgtttaaggttatactgctagcaaggaatacagcctgtatttaagccccttcaccctggctctaaaatatatttaacaactatactataggtcacattataccatatcatattatatatactactacatactcttatattattataattatataatatgcattttcaattttaatagttcctgccaatttggcctccacagtggctgtgttaacacagttcttttcatatatgcaacatgaggggatggaggaatgttagagccctgtgcttaagagactcccatgcttctctcaaatagaaaaacaatttataatttttattgacttactgagtgttttttttccttctttttgtctctttgaaagggagcaaaattagggccacgaagatcaagttaatgggagtattttcatagggagaggaaggctgcaatgccaggaaagctgtgacccttgacttgttgcatgctggagtaattcggttgaagatagctttatgtatttattttgctttcagaataagcagtggaccatttattacaccaagttgtttgactttgaggacttacatggactcaggttcaaaggtatatgtggctgtgttttgaacacacatacacagggttttgctttctgactcaaagctgtccgctggccaggctcatggtggcagcaagggcactcactcatctgtctcccttcttgttgcctatggatggcacttgggtgagagcagtgggatggtcacaaggaggaggatggactgccgagagggaggctgggtggaccccagccaagaaggacgctggggtctcattattatgggagctagaaggcctggtttaggaaagaattcctgttctgatgaaagctcttcagtggactcttaggataaagtatcatcaaatggcttttacaagggccagtgtggaccctgcctacctcatcctcatagtctcatcactggtctgtcctgctccagctgttcatactctgtctctctggctcttggcccatgacaccccctcggttttgaacagtcctcattaacttctcattctctaggtctcctttggttcctttccctgatcactccttggcattggtacagacgaacagtcataaaccttgcccatattttaagcatgctgaaaaacaccatctctagtaaaacccaaattctccaaagctgcatgggaaactcccagaggggatcattcctgcgctgggagaaagaacttagggctgcgtgccacccagagggataaacctaacccactttagagggtaagcacccactatgctctctgcattacttgataagtctagtcctgtcttctggtggacatgataccctagcaccctcccagagaagaaagtggagatttctaaatgccaaccctgcaggagatcacaaacataatactgtaattttcatagtaagtttggtgcccttactatgtgccaggcactgtaccaagctccttacttgcctatcagtcatcccagctgcctgatgagctgtctcaggctagggaagccaaatggcttgcccaagctcacaccacttgcaacctatacttgcttagcctatctccaaaacctgtgtttccaatcagtctctcatatagaccaagggctacaactttttagacttgggaagattctacccattttgcgacctctccacatgagtctttggctccccactgttggggtccccgtcagtctgcttatctttggttttcttcctctccagacatgccttccctgctgcccccaaattttattactgtatagtcagttctgggatcctaacataaccaagccttacctcctaacccagtgccctttcaactctctcagtggttcccagacttttcaacactatggaattttttaaaattaatttttccctccaataagttctgtgtttggaacagttatccgacacaatttcatgtgttgagtgttgattaactttccattaaaaaacaaattaaaatataactagaactgctgatactagccagtcattattctgacacaatcagctaatatactaattaattatagccgaaagcaaggacggttggtgttttcataagcctgggaagttttctcatgggttcctgggtgattgcattgtcggatttgggttggcttactgatatgcctaaaatagctcctggcttctttggtatatcgctgtcctttgcccctcctgagaatctttagtttcatgccagcttagcatctcttctccctgtgggcaggtcccatgcatttactgccattgtcacttctccctgttacccacagtgctgccaccatgcctgggatagacagcaggtaactgatgtgtcctagttgaggtccctatcctttcagaggaggtgacatgggttcagatattttcctatgttcatgtctggcatccaggggtacacaaagtattgattctagctaaagggacttactaaatactgtttgacaggaggcccacaggtgtctatgtgggctgcagtggaactaagaggtctttttgttcagctgttaaaaaattagtgtttgtagcttcagaggggccccagagaacctttcctgacccatttagaggccatctgtgtggctaggatggctttgctgtcacagaagggacagtccacactacccaacactcaagtctgatttatgttcatgtaaatccgatcacctaatggtggcattcacggcttggagacaagaaactataagtgtttccaagcctgcagccacctggctttttgtgggggtggggaagggaaggaaagctgtacgatctggcctcagagagcccaaggtaaagttcagttagtggaaaaacagagccctagatgattgggcggggggtgggtactggggagtggagaggggaagtcctgagctgaccaagcctccaagagccattccggaactagagatcttaaatactacatggtaattatcccctctgcctctgcccatgagggtgtcaggcacagggccgcctggctgcctgcagagaagagctgtttcattcagaaacttcagagctcctgcaatgcctggattaggatgtggggatggtgagtttcgcaaccagggtcagatttcatgaagacttggtttcgtgacttgaggtgtttgactaaggtgtttgcatctcatgtatttaggaagggctcccttttgacttagactttatcatcatgaataagctccctgccttttcgatttggaaacatgatagctctagtgagctctgctactcccaagcttgggcaggttctttgcctcagtttcctcatctctaaaatggggggaaatatattatgtaccacgtggtaacttcattggcaattaagtgaaatacttcatggaatgtttagcactaaatattccttagtgttgaaaaggctgggaaccactgagacagttgaaagggcactgggttaggaggtaaggcttggttatgttaggatcccagaactgactatacggtaataaaatttgggggcagcagggaaggcatgtctggagaggaagaaaatcaaagataagcagactgaggggggccccaaaagtggggagccaaagactcaggtggagaggtcgcaaaatgggtagaatcttcccaagtctaaaaagttgtagcccttagtctatacaagagactgattcttggcacagaatagctcaataagaataagcatgagcttttagtagtagtgttgttatagagcagagctgatattctcacttcactttcggtgaggaaaatggcgctctgtggtgtgatgtgatgttttccagggtcatatagagagagctgagtttcaattcaaaatcgtggtttgatccccccgcctccaaatctaatgtgttccattttgtcacagtgcttcccacagggcagagaaagaaacaacaaagttcctactctattttcacaactcttcacattttagagtcttaagtccatttgatctcatttgatgacaacttcgcaacgaggaaagcaggatggtgattggggggtcggtcatagttcctagttagtggatgtcagtattgagaatggcggggttctgtggcttagccatatagccaatacatggaatgggattggaacccatgtcttctgagggcaagcccaacacttgtcaaggatctggtgctgcccttccctctttagacagctcccattgataagcagaggtagaagtcactagggtagccaaagagagggccctagaaatggaatggtgacaatgaacttggctgaagagtcagcaaccgctcccctatccactgccagggctaggaggtgcagtgtggcatggaggaggagcactggctggagttaggaggcctaaggtctagtcctagttcatcatctgactctggagtccccttggtgatactgacctccctgggtttggtctcttatctgtaaaacagcaggatattggctctatgtggtgtgtatttcactgaatgcctactatggtcaagtttttctggctctaagttcccttggaaagggctctctactttagctgaataactcagcacctaaatctgtcaaccacacccttcagtaggtaactttgttagaaatatggtctattaaggtaagagccaggatttctgtggttgcaaaagtggatgcgggctctgaacaaaacctctagtgagctgagatactttatcagatgacatatttgaccaccaaacttctgttggagcagggctgatttgccaaacagacagcaaccttgcagacttagtcgatggctagaattaagactcaaggtcacttcagggcctgtcactgattgtgggagggcttggtaaaaattgaacctcattaacaccactgaagaagctgatagacaagaaatgggattaagactcaatactcatcaaaataaggctttccttatccacagcctacctgagcagtgcctcactctggaaaatgtggttcatggctcggctcaaacattttctgttgctgagaggacttctctcatggaagtctggctcagatgaacacatgtgtgatctgatggaacctttgtttaagtgaatgaggagggtatttggaagacttagatcaaacgtgtgccccattgggcagtcactatctgctcccctgacagggagaaaccccagtgacaggatagaaagctccaaagatcctgaggaagtttggaaggtcaaacttcaccactgcaaggactgagagatccaagaatctcagaatccaggttggtctccagggtgcagttctgaacaaatgagtgcagtggataaaaagcttatacttaaggtgggaaggtgggtgtgggttccagttccttctttggctgattctcttttggcctggatttcctcacttgtcatccatgccatgtcacaaacccagtgcctacagggaccaggcacagaagctggatatttgagtatcagacatattggaatattactcactcctaccaaatatgtttatggttccccattctcttggtttccattttggagagctaaacaggtactaaaaatgatttctttattataagacaagcaataaaacagtgggcaagtgtgatgataaacagcatctgagctttggctttggagttggggagacaatagagagtggcagtaactgtggtgaaccgtacagtccaggtcccttctggaggggacagctgctgtccagctccagcctatcaggatgtgagtctagtgatgccagatttccagtctcttaggacaagcaagaaatccaaatttttaatgtaacatcttctgaaaagatacacacacacacacacacacacacacacacacacacacacacacacacacgtggaccaaacaaaacatgtccatgggccagattcagccttgtgggtcaccagttttgtgatctggaatccattttatttctagaatctcctttcaattctcggatctctgagtgagtaacacccaatttttttttttttggcaaaatgtgtcctgcatttcccacactttctgagctggagcacaggttctggagttagaccacttggctcaaaccttggcctcgttcatggctagttgcctgtccctggacaagttaattccctggtctcatttttcctatctgtaaaatggagtatgcaataatagtactcttaacctcataggttgtggaagaattcacagacacaatggaaataaaaggcctggctcattgcctggcatgtagtaaggacctgataaatgtcagccatcatattattactacatggtattactgcctccccttagatgggagccaagtcttgctcaccagctcattgcctgatgttagtaggcattcaataaaagtatcatgaatgaataagaacatttgagaaagacagcattccagcctttccaggcaatactcgtgtgtgtgtgtgtgtgtgtgtgtgtgtgtgtgtgagagagagagagagagagagagagaaagagaaagaaagaaaagaaagaaagaaagaaagaaagaaaacaaagaaaggaaagaaagaaaaaaaaagaaagaaagaaggaaagaaagaaagagggagggagggagagagggagagagggaaggaaggaaggagagagagagagagacagaaagaaagaaagaaagaaagagaaagaaagagagaaagaaagaaagaaagaaagagattggtttgaaacattgggagctgagcttaatgagaaaaggccattcctaactgctaagctaccgtattaaacagtggcaagtaccttggaaaataaaacagaaaccactgcccatctttttctaacggagaaagacaagagatggcttgaccagagtggagatttagaacttcaggtgctgataaatatggtaacatcatggggtgctttggcagctggatagattttatttattcagggctcctttaagccagaggagattcctggaggctgctaaaatagaatgctccacctggatagttaacatctggattttattttgtttcaaaaagttaattacaaatagttcgaattccttctggtatccctctgagaagagtttcttactgggtggctcacaagcggggagacagaaagggaaaaaaactagattgatattgctcaggagaaacaggattgtggctacacgtgagccatgtatgcaattttgaattttcccatagtcatgtttaaaaaaacgaggaaaaagtgaaattaattttaatactaaacccaatatgtataaaatatgaccatttcaatatgtaatcaattttacacttattaataagatcttaatatttttaaaattaagtttttgacatccattatgtattttacactcatagcatatctcagtttggactagttgcgtttcagctacctgtggttagtggccgccatgttaatactacagcacaggtcaagataacatttgcaaaggcaaggcatcttcccctccccatttctagtttcatgaactgtgcacagggatatggggctgttcgaggtacttttgggctgaccaaggctcagaggctactgacagctttgctgcaagtaacttctaggccttgtgggtcccagtgcagggaacccatgtgcggtgacactggagaagccatctgatccaggtctctcacttgacagatggggaaactgaggtccaaagaggtacagcagcttggtttaagagatagagatggaactggaacaaaaataataaccatttgataatattttaacatttattgatttgtttttatatgccaagaccttttaaagcattatctcctttaaactctcataaccactcattgaggtaggcactcctatttctactttgcagatgaaaaaaattgggacttaagaggaattaaatatgaaagcagctactatttgttgacagctattttaagatctttatatacatatatacatgtaataaattctattctttactataaacatacatgtcagaaattattagtgttatcatccttgtcctcctcattccactttgcagatgaaaatactgaagctgagagagactaggtaacttacctagtatgtacctacatagtgaagccagatttgagccggacctcctgactccagagtccgagcaatctcaccaattctgcccacggtcaccccactgcatgatggcagagctagtatttgagcaggtgtgtctgttctgtggtctgtggtcttcaccgccccactagacagcctggatttttctgctcttgagtctcaacactttctgccttactgtgccactagtaaggaacagaacagggaggtttttgaccccagcactgattgaagggcccaggcaaagcaggctcgtctcctctggcttggctggttcccaggctgccctaacccatgaagccagattcttggccaagttaagcagggtgggaagaacacttgtccattccgccttcccagttgggcgaggtcagtgtaccaggttggaaagtggtatgtgtctaattgcaggggcgggggtaggggggaggccagaggattaacactctttaaatagacatcagaaaactaagaatagccttgctgcctggtaattgatgggcattcctgactacgggccacacactcagtaggtgctcgataaacatgggtgaaatacaggaataaacaaatactgaaaatgggtcattgggtgagcacttagccagtaaaaatctgtgctttgtataaaaagaactttggactgaggttatatgagtcttcctgcaggctggagacctctgttacctttacttctctacttttgttgtcttgagaccagcttttttatttttggtgaggagaacagcaggcagttcaaatgtcagggaaagacaagttcagcttgctttttccttatttctgtcttgttacctgctatcctgccaggttagaaagatggaatcactcccttttgccctatcatcaagacttcagtgttccctggagcactctaaatttgccatcagacttggatcatcctctaataccaagctcctgggtccttcctgaaggctgcctccttgtcttgctgagaagaattaaggtcgcttccctgggaggaattcagcagcacctcttgtaagtcatcaggtgtgctgtaaggatggggcaggcaacatttctttgtactgtgggaaggcctaaatcagtgtttctcaaggtgtgatccttgcaccaccaatcttaagaaatgttctttggagccgggcacagcggctcacgcatataaccccaccttgggaggctgaggcgagaggatcgcttgagcccaggaattgaagaccagtctgggtcacatagtaagattccctgtctctactaatttaaaaaaaaaaaaaagaaaaggtggttgggcctgtagtcccagttactcttgaggcttaggtgggagaatcgcttgagtccacgaggttgaggctgcagtgagccatgattgtaccactgcactccagccagggtgacagagcaagactctatctcaaaaaaaaaaaaatgttatttgggagagctgtttattgtattcccctcttggagagacatgtggctattagcatagtaaaagctctgagaagtcctgctgcatggtgacctgtttagctctgtttaatccagtgttctctgaacatatctagccaaggaactaattttcccaagaagcacctacaaatgcagttggtgagacactgcccagatgaggattctgaaaaccccttttgcccacttgcctgccattgtgattgctgagtagggaagaagaaattaggaagtatcatctgcattacacagggaagctgctctcctagggttgccaaacagaaatggctgtagtggtgccagtgggtgctttgtagggaccagaagaaaaaggaggaagggaaggctgaccttcaaggtcacacatttgccagatttaaagttccttcctgtggtcatgacttgttttataatcttgcttggctcagttctgggcacacatcagatttttaaatcctaggatcttgtttataccgttaaggacatgattgaaggacattgtggtgagtgtgaaggtgagatgtttctgattgaaggtccatggggcaggcaccctgcgagcaggtaatgaacagtaggggacataccggtgcaaccccaccctggtcccctggtcgtctgggccagatctctcccctctctgttctatacttctcttacatcaccgtcctacctaatcattttaccgataggagcacctttgggattctgattaaagctatgcatacaaatttcaagagcttcagaaattctcctaaaagctatcttggatcattagaacacttgccctagagtatcactgagtcaataatggtgttgaaactaaacagcaacaaaatccccccaaaaaggtaacctaacttagtctgaaattgtctgaaaattaatggcactgccagttcagtggctgctcagagcgttttggtgaagaaattggctgatggatattttgcagtagtctacaggatttgacgtgggatgccatctttatggacatggctctgctgggcaaagcaaggacgggcacatccagcctatgcggtccatcaggggcactcacatttagaatgggggagtcttagttagcccaggggctgggggcagcatggtagtgtagaaaaaggggccagtgcctccagaaaatgggaccccaggcctggctctgctccttctgctgtgtgattctggttgagtggccttccctttgagtcctctggatgaagttaaggagaagtcttgggttctcaagtagtcactattcagactctcgctttcagagtatttaaaggaggaaaggaaacagaaggatagggctggtggacttaaaaggccgtgtgtttgccgccaccccatttgctcccagggctgggtgtttgtctcccctccggcgctgggcctcctgcttggcctccagctcttgcaccattaactgcagtcagaaaagctgatgtcactgtggccggcctagggggaaagtctcaggataaaactgcttccacctggatctggagaaggggaagtgactggcaagagattcgcaggtagggctcagagaccaggaggaatccagtctgggtaagaattccctgtcatggggctctgaagccacgggccaggcaggtagtggatttcaagccagccagcggggtcacttggcccctgcagctactcctcgccccctcctgcataatttcctatttcctgcctcctcctcctctgacacagttataaataacctcgaggctggcctctgcgcttaagtataggtgagccagaggaaagtggaggggatcaaggtggagctggatctgccacttggccagggggtcacagggtttcagattgctcaggggaattttgttttcttgttttttccactagggagtgaggtagtgaaagaggaaataagctgtgttggcatggggaggcttggccttgcaggccggtgctgggtttcacccgcaaggagctgcctctctgctcactgcagatccccaggaccaaaggtctggaaagaggcttagtgagaaggcatctcaggacacaaagaggacacgatgccttgctggtgaggtcctgcggtctccttctcgaggcccagcccggccccatattggaggccaaacatgtagaagggtgtatctcattttttacctttttttctcaaccaccagccaacgatgggtatgtgatttctaaggatgtccattgactataaaggtcccattaatacatatgctatggacagattctctccttgaacacaggtttatggagcacctactatattccaggtgctgggcagagtgctaaggtcacaaaaatgaatcagctgtggcctctacagcctgttcccctcttggcatagatctgcccttccccctccacagtctggacaatcaaggacctggagtaagcacactctaggggccgcgtctcccagcatatcttttgttttcgaaagttcaaaaaacagaagaggaggattctgaaacagcaaacttgctgggtcatccatagagtatattaactggctatcttgctatctgtccataacttgctacctgtccatagtgtatattaacttcctgggagcccactcactgcctgacttcctgttctgcgcatgggcccaagggaagttctcgcaaccatagttttctgtgatatccatcctaccacatggcttcctgggaaacccattagcttttttgtttgttttagagcccaagggaatcagggccttgaggggattttttggtgtggggggtggtgcaagcttctaacactgagagtgggtgcttttctgattcctatgaaggtggagtgtaggtgtcgttcctggctcagcagagtcagccctctcatcctattcaggccgtctctgaggctggctcctgtgcccaagcccttcctcactccctcagggcatgatcacagggcatttccttagcattcctcctttctcccctgtgtgtgtgtgtgtgtgtgcgtgcgcgtgtgtgtgtgtgtgtgtggtgtgtgtggtgtgtgttctactccgtgtgtgtgtcatcctctgctcatccacccattccactgcgtgtgtgtgtgtgtgtgtgtgtgtggtgtgttctactccgtgtgtgtgtcatcctcctctgctcatccacccattccactgcagcacctagcatcacctaggggcctggaaaacctgcacctgaaagccgtaactccccggcacctggctggttgacttcttcccccttaaccccatttactttgaggatggaggtagtctttagggtcaggctgagatttgtcctgacccatgcttagttggcacatcttgcttctgcaacatgcttgcttagggttgggcaggggcccggagaaaacaagtcgtggcatcaccaggacctgattacccccaggcaccaaggagcacctgggaccaaggggaggtttggggcttgggatatgttttagggtgaaggatcacagaagcttactcatacctatttgaaagccaagtcaacagatgtgggttcttggaaggagaaaaggaggttaactgcttacttattagattagaagtgatgtatgaatgataaagagcagagtttgccagatattgctaattaattctctcactgcttattttatggatgataaagggtagggagagacatgttaattggcttcaaggtctctgagccaagcatgaccaatccgagaaacccaggtggcttcatgctctttcaatatgatctcatccctgcactagagaatttatatttttgagcataaagaatacccaccggtgcaatctcccaggctcttctgaagggtttggagagacagtggaggatgtcaaaagagatgaacttagagtcaaaaaaagcagagatggaatcccgtctctgccttttaccactggagttagttgactaaaatgtaaactctgagccttggttttcccaattgcaaaatgggaaagaccccatttataatgcaggtgggtgagagatgccagcagtgacagggactttcagtaaaggctgagctgaagctgaatttgaaaagcacattctttacgttccattgaagatctgcacttgctcttctgctaaccgctaaggtgtcatcagtgctgtgctattaaaatcagaagtcaaagaaggtgggtgtggccctcatagccagagttgatagaaatggatttattaatataatggatggtccatagaaaggtgaatgacctggttaacagacagggatggagtggagacctgtctgccctggtcttcaggctggttctgaaatcacagaattaagatgatctcagctgaggggcaaggcaaatcggatggaagagcggaggcccagagaagcgaagccctttcccaatatctcacagcaggtggggagtgggggaaagcagcttccagggggtggattcctgaaccaggtatttgtcactgtcccacgtagctcctcttgtcaccatatgtcccactcagtggagggatacttcctgcaagacaaagagggcctcatggttcccccgtcactcactgccttccactccctgcttctgattattctgtaagaagttgaggccgagcgcagtggctcacgcctgtaatctcagcactttgggaggccgaggcaggcggatcacctgaggtcgggagttcgagaccagcctgaccaacatggagaaaccccatctctactaaaaatacaaaattagccgggcgtggtggcgcatgcctgtaatcccagctactcgggaggctgaggcaggagaattgcttgaacctgggaggcagaggttgcaatgagccgagatcgcaccattgcactccagcctgggcaacaagagcaaaactccatctcaaaaaaaaaaaaaaaaaaagaagttggagctctgtctgtctgtcctttccccaactccccatctccgaggctggctcctgtgcccaaagtcttcctcgctgtctctgggtatgttcacagggtatgatcacatttcccctgcatgccctgcgtgggatgtgctccatgtgctgatgcctctggggatttccagatgatgtccctggacttggcagagcagtgtggggaatctgggacttgcacttcctatcctcatggagtctggtctctcaccttcacaggccactaagaggaaaggcaactggtgtgacgtctggggagggaagtatgttcctgtgcatcgaaagcctcaaacatgtgcatacactttaactagcaatcttacttctagaaatttagtcctaagaaataactaggcaatggagtccattgctacattgtttatccccaaattaatctaaatgtctattgcaaatagactgcttagattatggtgcgttcatacagtgaagatctgcacttcctcttctgctaaccgctaaggtgtcatcagtgctgtgctattaaaatcagaagtcaaaggaggtgggtgtggccctcatagccagagttgatagaaatggatttattaatataatggatggtccaaagaaaggtgaatgaaagagtcataaaagatgttgaggtagttctctattgatgccagaatagccctatggtgcacttttgagtaacagaagccaatttgttaaaaacaacaacaacaacaacaacaaaaaaaaaacagagagagagagatgaatgtgcatccagatgcttagagaagagtctgaatgtctgtatactaaatatcaacactagttactctgcgctgtgggattttggatgattttaatttgatccagtgttttctggaaaataaaatttcactacattgacacatcatttgataatcagataaaagaacaatggtgggaaagcaaggactcaagtgacccttgcttttgggtctagagcatcatgtaggaagccagcacagcccatccctttcctaggcgccaccttctggctcctggtgggacttgtaagtcccgtggtcagttacctgattgctcttacggacctgacgctggaaatcctctctctccaaggtccctgcaggagatgggacctgccacagagaatgccgcaagggatgtttctgttgggagctgtgagtggggtggatgtcctctgcctctcttaaatagatgagctagatttgaacctggggctggccaaagggagtctcctctcagaaaccaggatgcagtgggccgtctgtgtcccagccccaaagcagccagggtccagtggattagcacagagccgaccaggcctggagggtggtggtctgggattgggtgagcagccaccagcaggaatagcaattggagggaaggagaagcattgccaagagcaacttagggggccgtgagtgcaggtctctggacagacagcatggtaactggctgaggcaggaagaagcttggtgggctcccatggtgctaataataggccgtgtaggagcaggggaggcagctccagacttggagtgaaaagacgtggggtgcagtcagaatgaactccccagccatccatgtggtctcaggcaagtcactctgcctccagagccccatgtccactcctataagatggtacatccccacagtgccctgccacaggtgattataggtgaaggtcttttgacacctatatgtctaagggtcatggagtgacatcttatgaagtcagcacatagaaagtcaaaaaacccttacattcctgtaaaatacagtgcaggccaggcgcggtgactcacgcctgtaatcccagcattttgggaggccaagggtggcggatcatgaggtcaggagatcgagaccatcctggctaacacggtgaaaccccatctctactaaaaatacaaaaaattaaccaggtgtggtggcgcacatctgaagtcccagctacttgggaggctgaggcaggataatcacttaaacttgggaggtggaggttgcagtgagacgacacctcgccactgcactccagcctgggcgacagagcaagactccatctcaaaaaaaaaaaaaaatacagtgccatctctccataactccacctgagccagcagttccatcagtgttgtgacagattactattttttttttgttgtcaagtaccctcaggttgagcagctgagatgcttttagggagtgagacaatctcaggatctgtctttaaaccccgtagtcatatagggactggcaccaccagagacaacagcagatccctgtctggagctcactgaagaatcaggggtgggaggaattgcccttttaaaatggagtgtatatatgtatatattttttgcataattaaataatatatatatgtcattgaactcaggctggttagaggcatgcatgtatgatataaattctctgtatacaaataaaaggaagttacttgtattcgttgaatgggttgttatgatgactcccttcataggaaacatttggatccatttcctctgctttcgatgttgttctttcgcttctgaaccagtgtttgaggcagatgtctttgatactgagtaaagacatggcagtttgcattcactctctgaccaaaagagatgctccctactcttgcagaatactgattgcccatgacaaccagagtacttttataagaaaaggagcacacagaaggcagaaagggaccttgtttggggaggcggctttgagcagtgactttatgacataaacgattaggctcttcctggccccgcctgtcttgggatatctactcagaccctggaactttgaaatcgcaggctgggtccaatgagcgcagaaaagggacaggactcaggcagataggatttctttcgggtttggtaaacagctggcctctaggggtagggacaggggcagtgggtgggaggacttgggggagggatgggtgagctcgtgggaactgagaaactgtgtctagggcttccttagttatactgaatgctgcatgtagaggtctgcagggtggccagctgatggctggcggaagatctgctgacttggattcagttactactaaaatggcaggtttagaaagaggagagaacttctagatccagaggaaataatcaggtaagtatgctaagatgtgtgtatgtgttagccaggcacggtggctcacgcctgtaatcccagcactttgtgaggctgaggcaggtggatcaccaggtcaggagctcaagaccagtctggccaacatggtgaaaccccgtctttactaaaaatacaaaaattagctgggtgtggtggcgggcgcctgtaatcccagctactcgggaagctgaggcagagaatcacttgaacccgcaaggcagaggttgcagtgagccgagatcatgccactgcactccagcctgggcgacagagcgagtttccatctcaaaaaaaaaaaaaaaaaaaaaaaaaaaaaaaaaaaaaaaagatgtgtgtatgtgtgtatgcttatatatataatacatatttatttgtacatatgtgcatgtacagatataaacacacaaggatgtttatcatagagttgtttataaaagcatccaactaacatttctgtatctatgcaattgaaaacaacatagccattcaaagggatgaggcagagctatatgaactgatatattgggattgaaataaaccagatcaccaagcacattttggatgattctattagcaggggacgtatccacaagtttatagtagcatagggaaaagtcttgaaggtaatataaatataaagcatagttataactggacagtgggagtttaggtcatttacacaattattttataggtttttgtttgtttgttgacttctttttttcccaacctttctttagtgaagttgtattacttaagttaaaaaggaaataatgagcctggtgtggtggctcacgcctgtaattccagcactttgggaagccgaggcaggagcatcacttgaggtcaggagtttgagaccaggctggtcaacatggtgaaactccatctctactaaaaatacaaaaaattagctgggtgtggtggtgacacctataatcccagccattcaggaggctgaggcaggagaatcgcttgaacccgggaggcggaggttgcagtgagctgagattgtgtcactgcactatagcttgggagacagagcaaactccgtctcaaaaataaataaataaataaataaacaaaatttaaaaaggtaataatgtaagaaaataaagagcatggagaaagtagaaaaccagataacctcggtcctattttgttaaattttgggaaatttcagtatctgcattgtacagatgacaggcagaatcttgagaagttaacactttaaaagaaagaaagaaaaaaactagatattcactatgtgtcatcttgttgactattctcttctctgaacttcctggcatcttagttagcctatttgagctggaataaaatgtactacgtgtcttcagattctgcaaacatttaccaggcaccagggcgtccactatccagtcccaagcctgccactcaggagttcatgggggagtgagtgcatgtggcaggcattaggcagggtttttgcattctgctctcccacttgatccctgtgacaaccctaggagcctgctgccactgatcttcttattccacttgagggaacctagaggcagagacaggatttgaatccaagcctccagctccaaaccccagctgaaggaagcaagctggaacccaagatgctttcaatccctgctgctctgagcactgagatttgttcactggaatgctggagttttgctgatcattgacctcgcaggggcccactctgaagttaaaaatccccgagtgaataaatctccagcctctcctgctgtttccttcccagttctgaaagtgagggcaggagagatgagctttggccaggaattcagcgagtgactttgcgtggagtgtcagcttctccacattgctgggtgttagcttacccctgtctggcaccagcagcaaaaacagagccaggcgtggcctatagcaaagctcccagtttaaatatgtgaattcatttgggcctggacagctgcatagctcaggctgggcagaatctgccaccctaccccgtttccttgaaatctatacaggaacacagttccaaataccctggtgccagtccctgcaagctcctacttgtacaaatggattttaaaacatgtgatgatatctacctcctcccgtacctctgggcttttctaggtgtcagcatgaatctcatgtgagctttacaatgaccccagagtgggtgggcaagggagaggtggttatgactatcatgaactcccttgcttttacaagccactcccctacaatcctttctccaacaagtagacagtgaactttaaaaaatgtcagtcacatctctgccaatgccctgctcaaagccctccagtggcttcttaattcctcaagaagctctagaagtttctacgggatctggcctctgtctcccttggccttgctgttgccacatacttctagctattcctcaaatgctccaggctccaagtttgtcactgtctcttttgaacttgctgtcctctcttccaggaacacctcatcccccagatactcactggctggccccttctcatcatggaggtctcaactcaaatgtcaccttcgtagagaggccttccttgcctcccttcccctcctaccagcctccttgtctattcccctttgcctcctagcacctgccatcatattgggtatttgtcttattgtttggcctgattcctcctccgttacttaggcaccaggagagtagagaccttgttggtcttgttcaccatctagaagatacttgaaactctaacatttgttaaatgcaggaaagaatgcccttttgacagctaggaaattgaggctgagacaagtgaagtgtcttgccctggtttcccagctagtgagtgtctgtgctggattcaaacttagctcttatgctccagccttcaagtgggggaaactcaagagggcaagttcttacggggccacttaggagcagacagcttcttaggacaacattcttttatgttgatgtgaagtagcaaatctttcagagatacaggcctctaaaaaattctgccatctgccggctgctgtgttagagccagcctcagaaaaaggtcagagatccaatccctggctgggtgctgtgcacccaggaaagaaggagcagaattgaaataagtcttttccactcttctagatgagccttctaggccacaggcagggcatacccatgcatagactttaagggcctttatttggtctgtttgcttcccagttggggaaacaggcccagggacaggaagtgacctgcctgatgctacctcatgagttagtggtccaggcagttagaaccaaggtttcccaatccagcgggagttcttacctacccactatagacttcttggccggttctgggagactgagctctttccttccctgtgtttgcctcatcagcacgctggactgagcgttcccagattcagtgctggagccagcggtggggaggggagtaggggctgaagagtatatcagccaagcttgggggagacagtcacataaggaaattcacactcttcctctctcattagggggccccacaatgaggaggggaaagacaaaaaacaaggatcttgggtacattggtccttacctccccactgccccaggagcggtcttgagggttggaggagactaccagcctcctccctatagcggacttgaacttggcacatggaaccagctgaaactggcaccatttctaccctcagagggtaccgctgaagaagacgggcagagatgaaagaggaactgcttaattcagctcggcacttcttagcagctcccccatcccattgccggctttagtcccaggccagagacccatgaggtgcgttgaacattactgataccctctttgatctaaaccctcctttcgtgatcacgcctggtggctcaaagaattgctcccccagcttactgttcctgttggtgctgaaagaatgctcgtaattgttaccaaacagtggacggagcaaggcaacatgtcccctttgcccagctggctcccagttggcacttcattatggcaaagacagagggggtggggtccccgggccttcggcatttcatttgcacccacatgtaggctcacttcttggcctgggaattgatcggtgccagatgctccatctagccagcatccccaccgcagcagggctgcccgcctcctgtttcgtgaaaaacggcccggattttcatcagaccttaattggcctgggtctggccttcattctaccccagcctcttcacagactgctggccactggctgttccctcctccagccaggacaatgccggtccccgggcactgaccctggcccaggcaggcctgccaactccatagctctcatttctcactctgcacatcagtgctggcttcccacacccacagctcctccagaaggaaggtttgtcagcgggcttcaccatgcactctgacgtaccacttttggcccaaccaaactacaccccacccttgggtagaatgggaccaagatgcgaccctgacagacttaaatgagaaatgagcattttccagtgacgcctcctcttcctgcctcttgctgggcctctctctgcattgctctggggtgttcactgcacttggactgataccagtcaatgtccctcgcttcaacctgacctgaaactgaaatgctccaaacaagagtaagtggggcagccgacatttcaggaggaggaaggttggcagccaggctgctgtgagcttgcacggcccatatgggtcccagctagtactttgcattttcttttctctcttcttggaaccccttcgtcctttttcccgctgccctctagcctcttcactgtcttgggaaagggggcctctcacaaaacagtagtcaccgctgctgttcactgagtggttactttgcaccaggcactgtgctaagtacctcaaggggagtatctcccttaatgcctgcaacatcctatgagccttgtatgattgcatctcccttttcaagctgaaaagaagttacatgctttgcccgacagtctatagctaggaggagctggagctgagattcaaccccaggttctctggtgcccaagtgctcatgtctttgccctgtgtgcccctctttcacagaaacagagcttcagccaaatcctggaacggaagctcttgggaagctgcctgtgacctttcttattgtgtcccctcagcacaggtcatgcacaggcagctgggaatagatatgcgagttaaaggaattctcgttggaaaacaccagagggatccacagggccacccccccgcccccgcaataccactgtgtgtctgtccctgcagggccctggaatcccacagttgtttcctgtacccaggcctggggagccagccagtcacatggaccgtgagtgtatccgcctcacgcttctctgtggcccctggcttctcccagtggattccgcaaggtgtttcctgcaaatcctgctgatggtcttcgctggcacgtagcaaaatccacccagaacaccgcgatctgctggcctcagcctggatggggttttgtttttgtttagcttttaaaaaaatgtgtgtttttttttccccaaccaggggcacaggggtgggggaagaggagaaacatgaaggtaaaaatattgacagagtgaaaagtattgaatattccttctatttcaaaaatagcagcttccatggctgggatgcaggctggctaagttcaggttgggctgaggttgaagttgagatcaaggtggcagcgtgacccttatgcctcaagcatgtccttcaggagggtgtgggagcctgaggcagaagagagctccttcctgttttaaaaacacctttttctgagactctcaaagaatgtttgaaatcagccatccaaggtgctctgccatttttaagagggaggacggggctggatggtgtccctgggaattgaagggacccagagaagaggtgaattgtttaaagttaactcagagcattagagtgggctgatatcctctgaagagtctacttgtctgtgagagctgtttcagctacttcaaagccagatgatcagggcagcggggctggattttcatcttcatggctgtgcacatctccacttgatatgtgggggtcggagttggggggcagtaaagcctggtccccatggagatgctatcctggaagcatttttattaccaaggactagcatataattggaagattgaaggcagaagcccttatcttctcggcattctttagaattcttctgtatgtagatttcagaacacacagagccagagcaaaagaccttacttggcattaacaccaggatccacctgcccctcccttcctggcattaatgtccagtgctcccctaatgcactttaagctgtgaagttatcccaggtttatttacactgtaactaatttactcttggctggactgtcagcctggaaaataggatgtcactgcaccccccccaacctccaccaaaaaaagacagtggctaatgaagaaaacagattgttgaagggcactaaaattgaggcaaggagctgaataatgtgccctcctcaggggcaggcagggcaggcgtggcaggctgtcggcattgttacagatcagcaatgtcccactagttagcaaatgggcccctctcagtttgaatgtgcagctgatggaccaggtggggtgattaggggccaactccgtacttgtttctgtccccagttttgttaagtgcagatcacccagacagatcccaggctgagaaagagactgaagacaaagctagaagaggcagctgaagcatcctaatgtcttaactcaagtttgacttttcagaaatgtgattttagaacatagcaaacaggaagcacgtgacaacttggaccactacaacgaagagaaagtggaacccaggggaaatgcatgagttagaaatataaagtgatgggactcttagattctagggttaattgggacactagaatatgtccagtccaacgtgttcattttgtacaataaaaaacaagggctccaggaggaaatgatttgtcaaactcacatagaaaatgaatggaaaaaaacagaaagagtatctagcttccaattcctggcccagggctcttcttgctattcaatactttctacgtaataagcctgggttttttttttttttcaaaaaaattattatacttggccacccagatgagtacagttatttagtagagtacgtagagttattcactaaatcacatcaaagttgggagacagagtctggtttgaaaaccctcgagtattttattttattttattttattttattgtgataatacttaacatgagatatactcgcccctctctttttctgagacagagtctcactctgtcgttcagctggagtgcagtggcatgatactggcttcctgcagcctcaacttcctaggctcaagtgatccgtttccctcagcctcccaagtagctgggactacaggtacgtactaccattcccagctaatttttttttcgtggttttcgtagagacagggttttaccttgttgcccaggctggtctcgcactcctgagctcaaggaattcacctgcctcgacctcccgaagtcctgggattacaggcgtgagccaccgcgcccagcaagatctaccttcttaacacattttttaacactagaagtacttaaatagatgatggtgaagtctcaagctgtcctaccagcagtaaaaagattccaagtggggaaggtgaactctcaaccttgtatactgatcggtggctcctgggaaatttgcatttatcccctaacaaagccattaagagagtcattggcccccagcaagactgagatggtcgaaggacatgggaccatgtcataagcagggagagaccatcctaatctatgaaaatatttatcctggagatgatttgggaaacatgacccttcttttcaaatatcttgtttttttgtaagcccaagatgtcacctaggtgggagaaagccacagggaagcagtccaaaggagaatttttttatagtcaaaaaaaatggcttgacatggaacaggctgacctaggtcagagatggttgcacactgggcagtttaaccttgggatgggactgtagaagaaattcaaaggagcttacactgagtgaccctgaaggtcccacccaacctaaagtctgtggcctgtgaaatgtgcccatgccactgtgccgtagtttaacatgtccttctggaaggcaggtaggacccagagatgagaagtaggggctcccaattcaggctgcctggactggcatgctatgtccaccacttccgcattagatgatctggggagagtcacttcttctttacaggcctcgatttctaaaagatgggctaatgacaacacttactttatagggccctagtgaggctcaaatgggaaaatccacggaaagcatttagcactgatcatgcatggaaagtgcctgatagctgatggcacctattgtaactaataatagtattagaattagtattgtaatcattgacaataggatttttataattagggaaagtggggaactacccacatgaccatcctcctgctttctgtgtcagtgtttgaccaaatgtgttcatccctggtactctcattgcttatcctccgagagcactggcatataatggaaaatgtattccaatttgttctgttattccagccaggaacatctaggaacaggggttggaggtgtgcttcagggactacctgagcccagcttttttttttttgagatggagtctcattcttcttgcccaggctggagtgcagtggcacgatctcggctcactgcagcctccgcctccaaggttcaagccattctcctgcctcagcctcccaagtagttgggattacaggtgccctccaccacatctggctaatttatttttttttttgtatttttagtagaaacggggttccaccgtgttggccaggctggtctcaaactcctgacctcaggtgatcagcctgccttggcctcccaaagtgctgggattacaggcatgagccactgcacccggccaagcccaccttttgataggagcctcccatgggcaggcagagtaagaagtgtcacatgcagccactggtcacttaggcaaaaccctgccagctttcagatgtgcagtggaggtggcagggggaggtggctggtgctgtgtatgttttgcagatactctgtggtgtggcaattgctctagaggactctagtgtccagaagcaggcatgtgcagtttatcattacagccctccttcaaagaggacagctggccctgtgctttgcagggagaggtgcactccgggtggcccataaacccagaaaatatgattcctatctggtacagggtaccatcctggcacctggagaggggtctgcatgagacccagaaatgactggatccacaacagacctagtttgtggaacagtcctaaagaatcctccattcaagcttatatctgtcacccagggaactggacattcccttcagtcagaatgaactagtggcctccccttctcttcagccagggtctttgcagtcctcagccatgtgacctccgacctgtcagtcttggtctgattgctgtacccttgtttgtgctgtttccattgcctggaccatccttcttttctttccatgatcaaaaccctatacattcttctgagtcagttcatgcagcggaattggcattggaatgttgcagctaattgcacatactgggtgacagagtgcacagtagagaaaggtagggtgatacactcttcttaggaagcaatcaataagggccaagatggaaaagatgtcttatttcacccactgagcacctactatgttccagacactgtgagatgttgcggttagatacaattgtgagcaaagcaagatgtaattccggcagaatttagtgagtgtatgggggcagggaagaaagaggatgagacatgattcaaatgaatctacgaacatatagttacatacacactagggcccctgagaatacaaaacaggggttctgttctagtcttatgcttgcaggaggtggttggggatggctttatgtgaggaagtgttttttgattttaaatgtgaagtatgagtggcagttgatgggtaatggggagcagaagagggtctcatgcagatagaatggtatgtgcaaaggccccaaggctttgcaactgagagatttagaccagggctgccgatcagatgtctaaaaaagtatacttgttcgccccttgccatactctttggtccaaagggctgagctccctgtcttcaaaccagggggcttcaggtcagttactggacttctctcttcctgccctttgtctgcaagccaaggtaccctcaatctggcattgagagccctggggcccacccagcttgtaagtggagatttgaatccagacttcaccattggatgagattcttagacattacaagagttatggagagttaactccacctcaaagttctcaccatctgtaacttatacaagcccttctctcataattcagtcttgggaattttccctatctccgcatttccaatgcatttgacttggtggggtgtttcagatttgttaaatatttagtagtagaaagaagatgagctttgctgctgggcatatttggattcctagctgtgtgacttctgacaagtttcttaactatcctgagacttgttttcttcctatactcagtggaaataaagctacacattttggggaatggttttaagagtaagatgtactgtttgtaaagtgtgtctgtcttgttcacttttctgtttctgccacctgacacaatgcctggcacatagtaagtgctcagtgaatatttactgaatgaataagaggtttaggcaccatgattgcacagacacgatgttcatagagtagttggtcttctccttctttatcaatgactccatctccctgtcacacttcaaggccagggcaggtggttcagaaataccagaggttggctttatagttctgccattacccactttgaccaaagagggcagcagttagcattctttacttatttattttatttaaaatgaaggtttccttaaaaggatttggatcttctctttaatcattcctccgcaccttcagtgctattgattcctgataatggtcttagggcttgaagacctatgtatgggctcgtttttctcgtacctgttcctacctgagtgcccactatgtgagtgatgtggttgtgagctggaagggaggtgctgagtgagtaggggaacacccgctgcagcaggtgggccttccaaactatggccctgggtgtccacaaccttacagaatgaagcttgtggaacttaaaggtgaggaaagcctacactattttaaaagccacatgaagggtaagttatagatgtaccagggtctccttggcatctgtgctgtataaaatccatagacagagcagccattggctcttgttcaaaccacaagaaagtctcctgcccactcctggtgcattctgggaacagatttgctgtctgcaaaggctgcatctgcgggtctggcgtgcaaaggagggtggttctttggctaatggtggacttgctcctaggcctatcccagagtccctcagctctcctagcaaacaaaatcccaattaggagaaaaataaaatgctatagatggctcctgagatgttgccagctgtttgggcttcaaaaatgccccgacctgaaagctggaagttctgagaaccgtttgagggcatggtatttttctgggcactgcttcaaaggggctgtggttgaagaccatgctgctattctggtggccacttgtgtgggataaagtttcccatgggcccccgtggagaggctggagcactctcaggggatagggggtggtctcagcccccctcaccgagtgcacttgcatggcagtaagcaagtcggcgcctctgacccctgagtgggcttgagcttttgagaggtcagcatgcccccttaaacttgatgtctcctcagagcacagcacagatgcccagccaaaacacccagggcgaaaccactccaagaggtgaaagggcttgaggggagacagggtacggcgggagacagagatgcatgaaatactaacgttgaagattagaaatgggatgtgcactggaatgagatcatttgtggttctgatgcaaagacccaggcttgtttctaggggtttcttggggcttcgggggcctcctgtcaatggactgtttggacacccatttggatacatgcaatcctaaagtctatgggcagtgacagagtgataagtctttatcactagcctcagggagtagaagcccacctaagaaatggcactgtcccatgttggagcaagacccaacctaccaagctgggagttaccgcccactgcaaggcacccctgtactttgttggactctctgttttctgtctctccaatgggctggactctccagcctccgggcctctgcccaaccatgaccagaaggtcctctcctttctctttctcttaactgtctctagtgattctctgatcccagctcaggcaggatgtctccctccggcgcctccaggctggctgggtgtgtctgctgcatgctcctgtggctccctggactataactccctgtcttcttgtctcacaagagtaaaataagcttcttaaaggtaggaaccttgtctgcctgcttattactgaatccccaagacatggcacaggatctgagatgcatagttcctcaaatacttctgaataaatatcagatgagtgaatcaatgaatttcaagtggacttgaggagaaggagggggggtggcaaaataaaacaaacaataaacactatggcagagagggacacaggacctggagatggggcctggataaacagcctgccatgctcttcatatttcctgagtgctaccacaaggaagaggggcagctggaggccagagggcctgcagaggagtcagcaggtctagcaaggagtgccttgggtggagactccctggggctaattttggtgtcaccactgacttccttgagggtgctgagccttgggatcttcatgtgttggtagcttttgggtgctgtccttccacagacacatcaacaagttcatgggggtctcctgtaatagggtcctgtgacttgcctctttttggaggtcagtcttcaatattttggaacaatgtcggtattcggcctctccagatcacatttttacttgtcccttccttttctgagtaactctatggaacaaggactcctgacccagcactccaggaagccaaacacaaaaccatccccgtcttcgttattgtattacctttggttccctcccacagcctcattcattcattcattcaacatttttgggaaccctggccacaatctaggctctatgccatgtgctggagtcccagatgcagtccctgccatccggtaattagcgatgctagtgagtgtccaaggaaccaatcattaaagaacacgtgctggaagaaagagaggaaagccaagcagaagagaggtggactagcttggcctggggtggacagaaggcttcctggaggaggtagcatttcagctgggtgggtcttgcaggaagccaaaggtgcaggcagatgcacagggaggaagtgattctcacctaggcaaggggcatcataggacaggttcatatagtgatgggggctggaagcttcagagtgatagggtttgaggtatggtcccagctctgaagagccatatatatgccaccgagctatgcagaataatcctgtagatactgcaaacccaagggaggtgtaggtgaggatgtaaatgagggttgtggatcccatttgttcctgggagaatgtgggggacttaggggagaaggactgtgtttcccactgtctatcctttggggctttgacatttcccacctgacagccatttgcagagtaaaagcctcagggattctaatcatgcttggtgaacactttgaggtagtcgcctcattggacccttagaaacccaggtcacagaaacaccatcacccttctgagattcacagtcctccctccccaggtaagtcggccctgaatccaggaatcagccagccctaggacttttgccctgtcccaggccaaggtatctgtacctttcttccaaattgctggtggccccaggaagaaatcaagagtggctgactttaagcagttagattaaacatcaaatgcattcatcccaagtccaggcatatacctagaaggagcgactcttaaattttgtcatttcattgtgtaaaactgaggttgccccttaacacatgaaggccagcatgggatgctaattttgtgttgtgttcttttgggtaatctcaaagttccaggaagcctgaccttcctaagcctgtgtttccttgcctccccttcccggccccttcatttcatctacaacagacgtcagcaggggccctgagtttttcccagaccgctcaagcagaaacccatcctgctcacaaggtgaggagagccaggagctcacaaaggcccctcctccccttccccgggaggtccaggacagggcatccccaggacagacctgccctggggaccccggaacacaaggcaggtactgagaaacaggaatctctgggcagggaggttttcatatcctccaggtttaatagctttccctgagatggaaacttgggttgaaatgatttgcagctttccagattttctgagtgtgtgtctttgggtttatttttagccacaggcattcatttcttgccaaaaaaacctgcttaaataaaaccaagattaatatttttacttaacggaaagagttagtcaggacaggctttgaactgggactccttatcttgatggggagtgcatgttaacggtctggccttggcgttgacatcaacgaaaagggcctttgaaacggacaagagagaagggccctgggggaccagggtaggatgcaggaaaagcctatttgtgggacttctctgaagagagagagttcctcttcactcaggctgctcgccgctccccacccccagcccccagcccccatgctcttgcagtgggaggggggtcatcatcttcctggaaaggcgggagatcggctctggctttgctcagagcccggctgtgattctgcctcacttccagctgctctccttaccgccgccccctccgccccccacccagatcagatccagacttcttcctcctctggattcagacgcagcaaactgagtctcttctgcaggatgggctgaggctcagatctgatgccatctccagggcgattccctgacacccctcccctgagatggacttcatctcttcttggctctgtcctggctttccgtccttgcttatattgctgagcctgccttacttgagtgtcattgctggtctctctcacctctggcccttgagttcctaggagccttatgtatctctctatccctgtatacgtcttcacaatactgaaacaccttcctggttgctgaagagttgtgtatctgaccctgtgaaccgagaattgctgttacccccttttgattgaataagacttagaaagactggtcatttgacagagcttgcacaggaattatttatctgtttttaaatcactctgtgtgtggcactttatacaagaaatcacacgtagcttcccatattcagcaaatacatatgaggtgcctgttatgtgccaggcactcttcgggcagctttggctacagcaataggtaaagcaaagaacctgctgcccggggaggcttacattttaatggggagagatgatcagtaaagaagcaagttaatgtataatgtcagatggtggccagtgtctgatagagcacagtgtcaggggccaagggattgcgaggagggggaggaatgtgcatggatcaggatcagggaaggtcccccgcccaagtgaagaaagagtgttccagcagagggaactgcaaggtcagagaccctgagagcatgcttgggtgctagggtgtgcagtagagtgagctacaatttcctgagattaagaaggccatgagagccccgggtgcagggaaggcctgttatctggagctcagtgttggatgggtcgaatttgagatgttttattaggcttgcaggtataaatgtagactaaatgtagactctgggatatataagtaaaaagatcatcagggaggggaacaacatacactggggcctgttggtgggtggggtaggggagggagagcattaggaaaaatagctaatgcacactcggcttaatacctcagtgatgggttgataggtgcagcaaatcactatggtacatgtttacctttgtaacaagcctgcacatcctgcacatgtaccccagaacttaaaataaaaatacaatttgtttaaaaaaaaagttcatgagagttctaggttggcggtggcaaaagcgtgggagctgtcagttgtgcagatggtgctgagacccacaagctggaagaacatagcaggaccacgagcctgcacctcgatgaccggactgagcaccaagaaggtcatgggtgacttcgacaagcactgctttggagaggttaggggggaggctgcctaggttattgcaggcacctttggaggctggtaattatcacccacaatttatctgctgggatgggaagtgacttgcccaaggtcacagagaaacagggcagcgacttcacccagaccccacgtgctccatgcctgtttttcattccagtacgccgtgatcacttctccagttttcttgatctgtcctttcagcttctgagtctttcaggagggtttttttgggagttgggattgtggtgatcaataggctgggaatcagagggacccagtccaggcaggcccctcaggcctctgcttttcacccttagttccgaaggccctttcctctcacctagacatcatcaaagcatccccagagaggcagcagatatctgagaaggaccttgggaagggtcactgaggaaggttctcaagatcctggggggatgaggaaatgctgaatcacaagaatctttcgggttcctcttgctgttttcctctgattagtaaatttaagaatctacaagtcatcaccatcagcaatataacagtgtatcatttgtctagcttcagggttacaaagtacctttgtacatatacattgtctcatttaattaatcaatctaattaacttcaaacttcctgtgttgggagaacccttagggagcctgtggttttgtggtttctaagttatttgtttttattccatgaaagccttgccggggagcacaaaggtctaaacagatgatacgatatactgttatactgctgatggcgatgacttctagatttttattactaatcagaggacatgtgtttgtgtgtctgtgtaagtgattgggaagggtggtgggtgggtgatcaaagggatgtggggctcactgggagcttatcaagggtccttccttttaggtatcaatcttcttctctgatcctctgcagtgaaagtggggaatgcagtaaaattatgaactattttgcaaccagtgtgaaatcccatgtaaaggtttttaggtggtctgctgtcctgggggacctcccatttttttttttcccccactaggatgcaaaactgcttacaggctacctgatcctcattgtccacagttggaaagtagggacattaacagccacaacagtagccaccttaccagcttgccatgaggacagagttaaagaacatgcacacgttgcttggcacctaagaggcattcgataaatggtagtggttgttatcagtatgttctagttcccttccttctcctctagattcactaatgtgatgctaagaaaagcaagcagtttgtaattcttgaatgggtgagcagctggaagagtgagagagcctggctctgccctccttgggcaggctacattgtagagtgtccaaggtgggcaggaaaaaggcttgcttggcgggctccaggccgacctccctgtgggtccctgacctattgcctttgccatgagcactccggcctcagcaaggccgctccctttgtcatcctgtgggagatgataaaatacacacgaaggggccgtgagacaagctgggtgacagggatccctctttcctcctttttggtgtgttttcatgggtagggcatcattccaacacttccagatccctcttttcctccaagtctaggccgaagatgcgagcccatggtccaggcttttcttcctacctagagcctgcctgctggggtcccatcagaagagcagccccttccctgggactgacactaacagtgacttctgcatttgaagaaatgcagtctacccactaaccagacgtcccttacttatccttgctgtccttttaaaaaccatgccttaaagcagcaaaatcattctatggggtctttggagagacaggaatgggggtgttgtgtgtgtgtgtggggtggcggtggtatctcacctgctagatagcatgaatcaactcctaagtcatggagaggatttgtactgctcttccgttgatgctaccatgggtggaacctggactcctaagttagtatacattaattagttaaggagtccttgatccccagaccagccaaatgggtagcattgttgctcggccttctagtctgccagtaggaaagtccaaccattaggtcggggaagaagggtctggatttggttgacaatggttggatgggggatagaagcagagagagagagggagggcagctcaagggtatcttgccccactctgtttatgctgatgaacagcacatgtgcaatttctggagacacaccagtaagcttttctggaaactcaatcccaattgccattggaaaattgttctttgttcaaaacttgtgccactgtggtccatactgctagagctggaggtggggagaggcagcatgaaggtatatttatggaagaggtgtgccttgtttgccttgcttttgtaagctcttactagcactcttgcccaaacaaatattcaaaggaagcaaagacagttcaatagagatatatgcctctatgcctggcttctcaggcgcatgatatattcaagagggccccatatatatttatagatcaatgtgcccattatataagttcacacatcctagttagtttcttcttagatacttttacattgaaatactgcttattccttaatcaatctcttccttgtttcttcttcttccttttttttttttgctgagacagagtcttgctctgtcacccaggctggagtgtaatggcatgagatatagctcactgtagcctcgaactcctgggctcaagcaatcctcccacctcagcctcctgagtagctgagactacagatacacggcaccatgcctggctaattgttttaaatttttataattttttattttttatagagacaaggtctcactgtgttgcccaggctggtctggaactcctgagctcaagtgatcctcctgccttggcctcccaaagtgatgagattataggcatgtgccaccacacccagcctcttccttgcttcttttgaccaccagatccctagaagcccagattctcttcctaagagcaaaagaaattctagagagacaagagaggctcagaggctgagattcacactgagcctcacctctcccttctctgattggtgcttctgtaccttggagactagtcctctagccataaactttttttttttgagatggaatctcgctctgtttccaggctggagtacggtgatgcaatctcggctcactgcaacctccacctcctgggttcaagtgattctcctgcctcagcctcccaagtagctgggactacaggcggccccatgcccagctaatttttgtattttagtagagatggggtttcaccatgctggccaggatggtctcaatctcttgacctcgtgatctgcccacctcagcctcccaaagtgctgggattacagtggtgagcctccacacccggccagccataaacttttaaaccttatctccccactagactagccatcagtggaagcgggaaataggacttctatttcttgttgtcaccctcaccagcacccaacccaatgttccagacaccaacctagttcatgcctatgttggtttgattgttgggggcactgggtagacagtgtaggggccatactccagcatgaatgggaataaagacaacctgtgtccagcctggcccatctgtaaagctggcttctagccaccacaacaaggtggaaggaatggctagacatgctgccagttaccagtttgaaaagtgtcttctgttgttggaaaagcacaacctcctcccaccccacttcccttgttccctgtggcccctgggccagcgaatgcctcgggagaaccctgattgccaaacaggagagtacaaaatagcacacatttgaattacagaggagaaactggagcaaatacggacagattaatgcacaaaccaaataggtggatctggggttggccagcaattctactttggaaggactttgagaatctatttggagggcagaatgtaacttaattttagttcagtttagtgaagttttgtttttgtaaggaaaacactgatgtggcctcttcactgggccatctctgcctcagacttttggaaccatgactgtgatcttgtttggctggtcttagtaggcaattcttgggttacacatgggtgataaggtgggatgggtacatgtgatagagtaggcactcctgatcccaaaatacctcctatacttgttctgactacttcatctgtgcttctccacctctccctgaagttctgtaaggctagaatatttttatgaggttgcctttcttctcatcctagggagaactcccaggccttagcttacagtgcatgttagaagtctgaagatggtatgccctaagatggaataaaaatagacatcaccatagtggtgataatgctaataacagtggtagcaaacacatgaggtttgggatggactacatactgttctcagcgcttatattaatacgaccctcacagcaactttatgaggcattgtttcatcattcccatcttacagattgggaaaccaaggcatagagaggtttagcaacttcctgaaggtcacccagcaccagggctgggatttgaaccctggctctcaggctccagagaccaggctctttaatgcaatgctatgttgctgctccaatagtaataagcaaatcacttgttagccacatgagaggcactgggctaagaaagccagagagattcaggaggaaagagccccagagagatcatacagtaatggtggaacccaaacttcaatgcagcttcctgactacaaaaacgtattcttttcactgaactatcctcagatgaaaaggttccaagctcaggctatttggggtaaggaaggagttggctggttgtatgtgcagaagcttccagcagtactcagctttatggggcaggtctgcttgtgacatcttctgtctaaatcaagtcaagccatttttgaaccaggatgttgctatttaaaggaatcccttttgccttgcccctcccacaccccccggccaagactcgctcccttgtttaccttctgtgttaatgaggcagagaagatgggtccaaatcatttcaggaagaatcagtggtaaaggctggcagacatgcctctgcacggaggtgaagctgttataacctgcctgtgagagttaatatggaggaaacagtccccggggcctccgggaggctggcttgtcgccgagaatactaccgcaatgttagaaacagaggtggatgcaggatcttgacagacattggcctgggatcttgccaacctctcgtttttacagcagacttggaaacaaccactcgcctcctcctaatttgagctgcctccgctaaattgctcactttgccaatgactgtgtgttttgccatcgccggcagggaaggtctgaaggggccattgattcatctgaaccctgacttcatgtctgactgcaagggtaggatccaagctcatttggaaagaaacaagacagaatccagtatggatgaggaatcagttcttagtaaagattttttaaaaacagagattagagtcaaataactgggatacatagtggagcatccacaatgaggaaggataatggagctaccaaaatgtgtgtgtgtgtgtttgtgtttgtgtgtgtgaagggtattttacttaacaagcatttattgagtatctactcctttttgggctaagtgcaacttgagataagaaagattgataggatctcagggctgaaggagttcaatttgtaattcaaagtatgactgcataagcaagccccattccaattcctgttgaggtcttagcatggaagtatccagcaccctcatcacaccccctgatagaggcactctctgccctaatggcagcccccctgccttttgttgctggttcttattattagacgatttttttctttggttgagccaatgaatgttactctctgcaatttccagttttggtattcaagacctgtccatttgctcctccatgtgccaattttacaaatacctgaagacagctcttgggtgcttctttttcacacaacgtagaaagagaagcacaaccttgtagaatctaaaagtcaagtcctctcctctttctgttcccagtgcatgtggtaaatgcctctctttcagccctcaacccactgggtgtaattacttttgtattcatagttaactagtatctactgggtaaatcctttctgccagacattgtagtgggaaatttcataagatctttcgttcaatcctgattccaattccctgatgtaaagagagttataccctctttatagatgagaaaattgaggctcagaaagaggaagtggtttcacttcttggtctgttaccttatctagatcatgtggatgctaatactgcccttgtaagacagttaagagcagtaaataagtgaaatgtacatggcacatagtaggtgtgcaataaatgggagctgttttcattggaacagcccttccatggttagcccatttcatttttggtgatgataatgatgatgatattaataatatttgtctagtgcaaactatgtccaagacagtatcaagagtttcacatttgtcatcttgactaatcccttcagttcaagagattagtatcattatgattcctgttttatagaagaggaggccagaaacaaagttacttacttgcatacagtcgcaatagccataaacagcagagctgagattggaacagttctgtctggctcctgagccccgactcccaattgctccttcttctaaccacatccccatagagctcagactctattgcatcccttgctatctaagcactggataccaagggctcaatcagaatgctaactgggggcactgtgggaagctagggtgcaccacaaccctgtagacatgtcaagatgtggtgaattaatgcatgcaaaggaagagccccaaatgaggtggttagaaaggggtcctagtggaaagagaacagatctgggagaccatggcattgtcagatggacaagggaggggggacaatggctctaacaggagaagtaggttttggattatggtaaagtcacaaagtcaagaaaatcctcagggtcggcgggggttgactatagccttggaagttctggagctggcaattgtgaatatttggggtaattaacttgaatggtggctgtttctttttcctccaacctccctctcaccccagggaattcccactcttgtaaacacaatcatctattccagttggctccaaggtaagagtgcaattccaggctccacagaggctagcgtgcccgccctgagatgctgttcctgatgtggttcaggccttcctaacctcttattgtctccttctgtctctgcagtgatccgggccaaggtggtggggaagaagctggtaaaggaggggcccttcggcacgctggtctacaccatcaagcagatgaaggtaggtaatgtcatcaccctggctccgggaaggtttttgggtttttgccagaagagtcctggctaagggaggcaaagtgggttggaactggggtgtgtgtctaagcaccagccagacccagcccttctgcctgctggagagggagctgctaaggctgcataaagggatgggtagggagggggcatggggctgccttgtccaagagcccatgcaggtggagtcactccaaggcacttgttaggaagctgagctctggagccagatggcagatagccttgttagctcgtaaccatgagaccttggtcaagtcactgcccctctctgggctttaatcttcccaattgtgaaatgagggggttggactagatcatctctatgaactcttctgagctctgactatctgggactcaacagtgcttacaggtttcatgcagccactgaggttacagcttaggtttacagccctcaaatctttacatggaaactgtgctgatcacaggaacctcatcccaaggcaggaacttcaccttctttccctattttcccagctgattgtcttcttgcatcctagatagttagcaatgtttgctaagcatattcttatcattaaacatattactgaggatatgaacatcatgaagtacaggaaggaggtatgcccttaagaaaaagaacaccagatttgaaatctagagaacctgcctcctagtctcacctctactcctaaatagcctgcttaccttgggcttgtcccttttcctgggccgcagttttgccacctgttaacagtgtggggttgggcttggtgctcctaacatcctctctagctcaggcattctaagcaccctgggatgcgggccatgttacttgtaaggaggagcgggtggtatacaatggaagggtgtactggtgattgccttagcacagaagactggggcttcaccttgaataactcagcaactggttcatcaccccatctttgtaagcacctctctacatgcagagctcccagctaggagccagggaggccgtgagggagatacagtttccatctttaggaactagagtcaggttgggagagaagaggcaggtatgtgtgtgactcatcagaagttcaatgtggggtgtgctgaggtccacaggaactgtccagccctttaacttattgctcatatttgcatccctagcaattagggtaggacctggcatgcaaaagtgacttggtgaatgcttatctgtctaatacgggcatgagggtgagaccccacaggcctggaaactccccagaggagacaagccgcaatgtccaggtagaagggagtggaggagtgacgcagcccacggtggtacccaaccatccccaaggccaacctccaggctttcttattcctgtgtcctgaggctggatgtactaattttgtggaacctgttgctttggattcaattttgcaaacatccacagccttctggttatgtaatgtccagagtcagccctggccagttgcccttggctgcctaagcttggtcatgagaccagcttatgtcttcagacagccctggggagagaaaaatgggcaggggtggggaaccagcaagagcaacaacaacgcaaaaagcccactttgcaacctctggcagacagcgcgggaatgccaaagcatattagaccaaagcagaggttcagaaaacacacgaacctgcctggtctggaacaatcctcattacgagacactcggtggtcagcagagagctgagagggaaatagctgggaggcagcagttcctaagcctgcctggtttccttcctaccatcagggcctggagaccagggtgaccagaggcccttcctgtggacataatgtcccattcccccttgctggtgtcagaccagccacgggtggttgtttagagaccaaacaacacttgctagcctatcagcatcagacactcccactcccaggctggtgggcttagaagacacactcccactcccagactggtgggcttaggctttcggttcaccatccttcgcctgagctcatgaatcatggtgctgggaattagatgtaggatccctcgtcttacttctgacagaggcgcaaaggggaaatgacttactcagagtcaagcatttaactaagggcagatctgatccccaagctgaggcatcggaatttcttcccaatcctgtgttctttatatgactcccaaatctccctgccatcttaatcatcagtcaccatctcatgcctttcattcactctgaccctccatagagggtatcatgatccatagaactggtcagtgcccttctatccagagacaccactggaatctgcttgtctctaggtaccagcctgcaagtcagacaagatacaggctagaagtaatagtccgtccatccatcctctcgtgcttccttcccaccctctctctgtgcttagtactgtactatgaactggggatacaaagataacactgcttataattatgataagacttggcatcagttaacatttactgagcaattgcttagtgccaggcattctgctaggtctttgcatagatcagtacttatactaacactgtaaaatagataacaccttgtcctctgtttgacaggtgaggcaactgagacctgggaggtcatataactgttaagattatatggccacaaagtggcaaacctgagcaaaactacagggtctttgcctataaggagataatacagtatggagcagcaggctgattcatcattcctacccactttggggtatataaatgcccactccatatgtttttagttcccagggaacaaaaagaggtcagtttgggtttgttggtttatcatccagcagtgtagggctggacttgtaatatcctgcaaagggtgtatcagaaaaatctttgtaggagggaagagagagaggccagagaggcaagcctgcatgagttttggcactggtccctgggagactttgttctagcagattagacagtctaccctagagagtcagaaggggtgagcaagggcttccttagagcaggactaaaggaacttggagaacctgagactccgagccgccctgtctgacctctctcttctctcactgatggaaggcaggcagaccttctcccgtctgctaactctggagcctctgacccatctctcaggaacacttcagtacacagagacctgcgatatgtgtgtgtgtgtgagggagcagggtgttagaatgttgagagagcttattgcaatcccaaacttggaaattagctgggctgtggggtgaaggtgaaagtttccagaactggctgctctaagctgtggggaccttatctcccatcaggaccatgagaaaccgatccactgtgccaggagttattgtttatgtagcggagacatgctctccagctggctgcaggggacagaacgtgggggacattatgtcccagctggtcctgggagggtcccatggggagacccgctggtcatgtgctttgcatgtcctgactgtaggcagagcagacctccagggacttccttcctttagtggtttgtctaaccaaatgagcaatagcagggtctcgcctttgaagctctagctggaagcatctttgacccccagcccacagggaaccattcttcttgcaatgcccgtggttcttcctgccttaggactctcatccagccctctgcagagactggctccatttctacattctctgcctgtcctgctagacaaattgctgtatagagaaagatcatggccgtgatagctcggtcggtctgtaaataagaatttgtgggtttaaatgagtccgtgatgtacaccagcatccagaacagtgttgatctttggtaggcatgcaagacatagttggaatcattgaggcaactcatgctgtcaatgtagagtgaaggccagacatttcataagaaatatgcaaatgtccccagactcagaaacttcttttttactttatttgtcccttcactccaagggaagctaacatcttggaactttgtgtagatgctaccaagaagaagaagaggggcccagaggcatgcagaacccagctgaaaaagaacaacccacttatgtctgaagttctaaaccagctttaactactcttgttaagagctgaggaagggacttaggagaaaggggaccaaactcattcctcctctccttacgaatttcagtataacttgttctaagctaacttttattgaatgttgtgggctgactgctattctaagtcatttgcttctctcaaacaccctaagaagtgctttgacccattttacagatgaagaaactgagacccaaagaggttaagtaactttccaagtggcgaacacaggtggcagagaagattgaagattcaaactctggctgtcagcctccaaaacctgaatttaccactgatctccatggcattggtttggattagattacctttaacatcttttccaactctgagattctaggattctctgatgtcaggacattataaacctattataactctcctaaatttgtcaaaccaattctagatctctatgattacagacatgatacttttagaatcaatatttaaatcaaggtaggattattacacagaaaacacaactgagtagaatctacctttgccatgttgttcttttcagaattgaccctaaaacacagcgctatgtttgtcagagccagtcatttgtaatgtgtcagaatttcgactctaggcaagtgctaggagctaaaatgcaggttccttcaaacttccaagtagctgcggtgccaagctgatttcgatgagttgagttcttactgagcagttcaaatgaccagactgtaaccaggggcttcattctctcacccacgaagcactagggcagtcaaggggaaagactgacgcagaaggaatgaggttcccatgggctgggtccaaaagacctagagcgagtgcttagttgaaacatttgccaaaacctcaaggaacacccacacaaaaataagaagttgctcggcacagaagtcagggtaggggatgttcttcgaaggccacactccatggcaggcatacagcagcacgcttaaacatggttcctgttaaggctagagaggcaccattcacatagaagaagtcatcatcgtgactctacccaccccgcgcccccaccgcgtaattgaatgctgagtgtggacggcacttcttccagcacttggctgcgttaccgtgctcagttggcaagccttgggggagaagagaggttcagaaggaagaccatctgagtccatcagaacaatgtgtgcttttaacaaggcaggggcgcccaaactcagtaggtccaacagaccaagttatgctatgaaggtcttgtggaccacctacccccgccaaccagtcaccacttaaaagatgagaaaacgccagctcacaggccaaatgggaggcatttagaagagacaccaatgaagagatgtctggctttgtattaattactgtaggtaaattaataccaaatgccaggaagtaaagtagaggcattttcctattataaacccttgggacaagcccagagaccaccagcagtccagggcttgtgtacgctgagaactgaggggataacagaattgtgcaacaccttggtgccccaccgcccccgttaccaaatctcacagttcacagtatcgccttggcacactgggcttgtgtaatactcatggacttgacctggaatcacaaagcggactcagcttctgttacattcattcaccccagtgactctgggcacacactgtgcctctgaaggaggcacagtggccataaatggaaatagcatttgcctgcttctggggaccttggtcatagacttctgaggctttcctgggagccagtctaagataatgggtaagagtatggactctgaaggcagagtcctctgcttggaatcctagccctgccatttcccaactgtgtggccttaacaagctacttagcctgcctgtgactcaggctcctcatctataaaatgggcataatagttcctacctcatagggttgtcatggtgattcgtgggctaatattaaaggagatttctcaacctcagtaccattgacatttggggccggataattctttgttctgggggctgtcctgagtattatgggatgtttagcaacctccctaccctctacgaactgttgtgacaaccaaaattgtctccagacattgccacatgtcccaaatatttcctaggggggcaaaattgcctccagttgagaaccactgtattagattatgtcgtagatacaaatagccaaatatcagcaatttcacgtggttcaatctaacaattataaagtatttaacagttaaaactctttgaactttgtagatacatttatgtgcttcatctgggataaacgaacccaatgctttcaccagacgctcagaagaataaaaaacatggagaatttctagcttgaattcaacgttcaccagccaaatagaatttctataaagtggggtttgtaatacatccctcccagggctcttttaaggatactgcaaggagaatgtgagtgagaatgtttttgtgggctggaaagtgtcacagagatatcatgagaatgctggctgagttcacgggactcaggtcctaaggttgacaaagaaaaaggacctttgtcacagctacttctctggatttctgaaaaggtgctgggatgtcagacatgtgtagccgaaggagtgttgtggggcagttggaatggggggtatggctggctgcacaggaaggtttctctgggaaggcaccaacctggctagtcaagaggatcggtggcttcatctggggtgaagggggccctggggtgggtagatcagtgaccggccactggacagctgaataggggagcgagattccctcagatccaatgtcagcaagccttctgggtactgagactcctctcctgtgttcctcttattttattgatacataataaatggacatattttgagagtccatgtggtattttgatatattcaaaaatgtatagtaatcaaatcagggtaattgggatattcataaccttaaacatttatcgtttcttcatgctgggaacatctgaattatcctctactagctactttgagatatacaataagttattgtttactgtagtcattctactgattcaatgaacactgggtcttacttgttctgcgtactcgtatttttgtacccattaattatatctctttgccccaatccttattacctttcttgcctctggtaaccaccaatccactgtccatctttatgagatttactttcttagctcccacatgagtgagaacatggtgtatttgtctttctgtgcctggcttattccgcttagcaaaacgacctccagttccagctgcattgccacaaatgacaagatttcattcttttttctggatgaatcatattccattgggtatagataccaggttttgtctatccattcatctgttgatgggcacttaggttgatttcatatcttggctattgtgaatattgctgcagtcaacatgagagtgcagacccctcttccatattccgatttcctttcctttggatacatacccagcagtgggattagggatcatacgggtgtccaaactgggaaagaagaagtcatgatgttccttttgcccacagatgtaccgaggcttcaccaagatgccccatgtgcagtacatccatacggaagcttccgagagtctctgtggccttaagctggaggtcaacaagtaccagtacctgctgacaggtaatggccaactctagcttctaggccagggtttggccaaggtccactgtttcttgacttcagaagaacacatacggagtagttgactcaccaaatgtccagtaaattgtaaggagtctctaatgttgaattcatcccacttacccagtgctaggagcttgaggctcctacacttaggctggactttggaattagctccaccactcacctgggggaggaaatctcctaatttgtagcttctcaactttactgtaaataaaaagggagtatctgttcctctccacctcacactcgacctgttaggcccgtctttgaaagttattcatctttaggcagtcagtgtagtaaaggagaaaacaaaaacaaaaatcattataaagggagtgaagagttggcctctagtcctagctccagtatttaatgggcttgggacctttggcaaatcactttacctctccaagcctcattatcctcatctggaaaatggggctacagtccattttaaaaggtgttgggtagggtgaaataaaatcatgggtctgaaaagtacccagccacagtgcctgggctaagtgggaacatagtaggtgtgaattctctctgggctaggctctggacaaaacaacctctccttgttttcttctttcctcctgtaggtcgcgtctatgatggcaagatgtacacggggctgtgcaacttcgtggagaggtgggaccagctcaccctctcccagcgcaaggggctgaactatcggtatcacctgggttgtaactgcaaggtaagctctggggtcactgggggaaggaggggaggtgctgacttgcagccctagaaacatcagctcccaatgcactgggtgccaggccctcggctgggaagggtatgcatgtgttaggccagggcagaggggcaggtctgagcagatatagtaaggattgttgccccaggtggggcagtgaggaaggcagggaaggaagaatgcctttctgctgtaatcggctgcctccatgatgaccacttggaagctgctggggcatgagggctcttgagtccctggccccacctggcagttcaaggctggaggtataggatcctgacactggcaggttctcccaagtggtttcaagtgggctcaccctggtagctgactcatcgctaaccccaccccaggtaggcaaatgggcccaggactgcagagaccagatgctacagaaggtctctctttaccaggcccatccccctgacccaagtatagggccaaggtgcagcctgcctgctgtgggaggaagttgggccattctctcacttcatcttcaaaacagtcctgtgtggttttaattactatgatctccattctgcagatgagagctcagagaacttaagtaactagccctaggtcccacagttcactgaatctggtttccaacctagggcagctagactccaaagtttatgctctaacctttctaattcctcgattccctaaaacaactgagatctcccacctgagacgaaaaagtcctctcagtagtctaattctgctacttactggctgtgtgacctgcagcaagttacttaacctctcagagcctcctaaaactgtgataagaattaaagagaataatatcaaagcacttatcagaatgtctgttagacagcagatgctcaagctagtgctatttatattatgatcactgagggactgatgtggctaggcttcccatgcagtggccccagggtctgaatccaggctcggtagcctcaggcctgggcataccatggcagagtccatcaactgctgcctgttatctaattgcagatcaagtcctgctactacctgccttgctttgtgacttccaagaacgagtgtctctggaccgacatgctctccaatttcggttaccctggctaccagtccaaacactacgcctgcatccggcagaagggcggctactgcagctggtaccgaggatgggcccccccggataaaagcatcatcaatgccacagacccctgagcgccagaccctgccccacctcacttccctcccttcccgctgagcttcccttggacactaactcttcccagatgatgacaatgaaattagtgcctgttttcttgcaaatttagcacttggaacatttaaagaaaggtctatgctgtcatatggggtttattgggaactatcctcctggccccaccctgccccttctttttggttttgacatcattcatttccacctgggaatttctggtgccatgccagaaagaatgaggaacctgtattcctcttcttcgtgataatataatctctatttttttaggaaaacaaaaatgaaaaactactccatttgaggattgtaattcccacccctcttgcttcttccccacctcaccatctcccagaccctcttccctttgcccttctcctccaatacataaaggacacagacaaggaacttgctgaaaggccaaccatttcaggatcagtcaaaggcagcaagcagatagactcaaggtgtgtgaaagatgttatacaccaggagctgccactgcatgtcccaaccagactgtgtctgtctgtgtctgcatgtaagagtgagggagggaaggaaggaactacaagagagtcggagatgatgcagcacacacacaattccccagcccagtgatgcttgtgttgaccagatgttcctgagtctggagcaagcacccaggccagaataacagagctttcttagttggtgaagacttaaacatctgcctgaggtcaggaggcaatttgcctgccttgtacaaaagctcaggtgaaagactgagatgaatgtctttcctctccctgcctcccaccagacttcctcctggaaaacgctttggtagatttggccaggagctttcttttatgtaaattggataaatacacacaccatacactatccacagatatagccaagtagatttgggtagaggatactatttccagaatagtgtttagctcacctagggggatatgtttgtatacacatttgcatatacccacatggggacataagctaatttttttacaggacacagaattctgttcaatgctgttaaatatgccaatagtttaatctcttctattttgttgtcgttgcttgtttgaagaaaatcatgacattccaagttgacatttttttttcattttaattaaaatttgaaattctgaacaccgtcagcaccctctcttccctatcatgggtcatctgacccctgtccgtctccttgtccctgcttcatgtttgggggcctttctttaactgccttcctggcttagctcagatggcagatgagagtgtagtcaagggcctgggcacaggagggagagctgcagagtgtcctgcctgccttggctggagggacacctctcctgggtgtggagacagcttggttccctttccctagctccctggtgggtgaatgccacctcctgagatcctcacctcttggaattaaaattgttggtcactggggaaagcctgagtttgcaaccagttgtagggtttctgttgtgtttttttttttttttttgaaataaaactataatataaattctcctattaaataaaattattttaagttttagtgtcaaaagtgagatgctgagagtaggtgataatgtatattttacagagtgggggttggcaggatggtgacattgaacatgattgctctctgtctcttttttcagcttatgggtatttatcttctattagtatttgtatcttcagttcattccactttaggaaacagagctgccaattgaaacagaagaagaaaaaaaaaaaaagcagcagacaacacactgtagagtcttgcacacacacaagtgcccaggcaaggtgcttggcagaaccgcagagtgggaagagagtaccggcatcgggtttccttgggatcaatttcattaccgtgtacctttcccattgtggtcatgccatttggcagggggagaatgggaggcttggccttctttgtgaggcagtgtgagcagaagctgatgccagcatgtcactggttttgaagggatgagcccagacttgatgttttgggattgtccttattttaacctcaaggtctcgcatggtggggcccctgaccaacctacacaagttccctcccacaagtggacatcagtgtcttctctgtgaggcatctggccattcgcactccctggtgtggtcagcctctctcacacaaggaggaacttgggtgaaggctgagtgtgaggcacctgaagtttccctgcggagtcgataaattagcagaaccacatccccatctgttaggccttggtgaggaggccctgggcaaagaagggtctttcgcaaagcgatgtcagagggcggttttgagctttctataagctatagctttgtttatttcacccgttcacttactgtataatttaaaatcatttatgtagctgagacacttctgtatttcaatcatatcatgaacattttattttgctaaatcttgtgtcatgtgtaggctgtaatatgtgtacattgtgtttaagagaaaaatgaaacccacatgccgccattttcctgaatcaaattctgcagtggaatggagaggaaaatacttctaggcaagcagctagactggtgaattgggggaaatagaaggaactagtaactgagactcctccagcctcctccctattggaatcccaatggctcctggagtaggaaaaaagtttaaactacattcatgttcttgttctgtgtcactcggccctgggtagtctaccatttacttcaccccaagtcctgctgcccatccagttgggaagccatgattttcctaagaatccagggccatgggagatacaattccaagttctcgcttcctcctttgggcatctcttctgcctcccaatcaaggaagctccatgctcaggctctcagctctcgggccagtgctctgctctgtccagggtaggtaatactgggagactcctgtcttttaccctcccctcgttccagacctgcctcatggtggcaacatggttcttgaacaattaaagaaacaaatgactttttggaatagccctgtctagggcaaactgtggcccccaggagacactacccttccatgccccagacctctgtcttgcatgtgacaattgacaatctggactaccccaagatggcacccaagtgtttggcttctggctacctaaggttaacatgtcactagagtatttttatgagagacaaacattataaaaatctgatggcaaaagcaaaacaaaatggaaagtaggggaggtggatgtgacaacaacttccaaattggctctttggaggcgagaggaaggggagaacttggagaatagtttttgctttgggggtagaggcttcttagattctcccagcatccgcctttccctttagccagtctgctgtcctgaaacccagaagtgatggagagaaaccaacaagagatctcgaaccctgtctagaaggaatgtatttgttgctaaatttcgtagcactgtttacagttttcctccatgttatttatgaattttatattccgtgaatgtatattgtcttgtaatgttgcataatgttcactttttatagtgtgtcctttattctaaacagtaaagtggttttatttctatcacaca

SEQ ID NO: 71 - DNA, 34753 bp, Homo sapiens
cggccgcggttccctccctgctgcttactcggcgcccgcgcctcgggccgtcgggagcggagcctcctcgggaccaggtgagcgcctcccggaccccgcaccctggaagccgctcggcccgcggggggtgaccccgagtcctgggaaggcggcggcggcggctccgtccctcgggtccccgggaagggggactccagccccagggacggcggggggctcggcgggttcggggctcctcctcgcggggctggggccgcgcctgcccctgtggctccgcgtctctgggtccgaccctcgggcgcgcgacttggggccacctccccgcggcctcctctggggcggagccggcctgggcggggtgggggggtccctgtctgcgcccgagctcggtgctgggacccccgctcccgagacgaccccggcaccgcacgccccgccaggccccgcgtctgcgagcggttcgggtccggctccggcccgcggggaagacgccccggctggctgggacctccgggggcgcagggcctctccccgggccggacggaaggggcggcggggcggggggaggaggggctttcggtgcccgagggcgggactgggcggggaggggacgcgggtggccccgacgccccatcgctgcgcccctcccggcctggagcccaccagggccccgccaggcccaggagaagctgcagacggaggcggctccccagggcggcgggacccgggctgacagcgacccgcagcccctgccgggccgcccacacccgccctgggactccgccggggcgctggtggaaccgctgggcctgggtctccactgctggcaaccgaacggatcggccctctgtggagccgcaggtgtgcgggcgagcggcgcccatccgggctgtgccagcagaaccccggtgcccgcgcctaggacgcccctggagaagggaccttccctttggggtcggaacccagaaaggaggggcctgcgatccgcggagctccttgttcttgggataacacagctctggcttggaggcccccttgcacttcgactctggtgattatttcaagaaaggccagaccgggcacggtggctcacgcctgtaatcccaacacttggggaggccgaggcgggcagatcacctgaggtcaggagttcgagaccagcctggccaacagggtgaaaccccgtctctactaaaaatacaaaaaaaaattagccgggcgtggtggcaggcacctgtaatcccagctaatcgggaggctgaggcaggagaaaatcacttgaacctgggaggcggaggctgcagtgagctgagatcgcgccactgcactccagcctgggtgagggagcgagactgtctcaaaaaaaaaaaaaaaaaaaaaaaaaaaggaaagaaaggcccggtgagatgctttctcttaaacacggccctgcacgttgagttgctgcctcctgtggcctatttcacgtttatgcaaagtcgggcgcctgatgcggggctcacccgccacaagcaggggtcctggtgctgctcatggaaggggccctacccagcccgcggggcactggctgggacggggctgcccaggtccgcccaggatccaaacacccagccccgcccagcggcccttcctggcctgcagtggaggctgtaatgggcaggggtggtgggaatcccagctcacagggcgcctgctcttagaagggcggcatctgggtccagaggtcagaaacgtcagatgcccatcccagaagtggcggggaacctgtctccacaatggatagcagcactgtctttttttttttttttttttttttctcatttcatagataaggaatgatgccttgttggggggtttgttctgcatgtctttggtttttgtgcagtacaaggctatttgggctgtttgatcactgaccgtgtgtagtgatgtgcattgcctggttgtgatgtccccatgttcctaatggatgttcgctttttgggtttttttggttttttgtttgtttgtttgttttttgagacagggtcttgctctgtcacccaggctggagtgtggtggtgctatcactgctcactgcaatctgcacatccctggctcaagcgagcctccacctcagcctccgagtagcggggactacaggcatgcaccactgtgcccagctaattttcttttaagagacggggtctcactatgttgcccaggccatggatgtgtttgtttgtttgtttgtttggggtgtttggggggttttttctttttttattgatttgaaaaagctttattttcccgaattttttattgtggtatacaatataaaatgtactgtcttaaccatttttaagtgtgcagctagttcagcgacagtaagtacattcatagtgttgtgtagccatcaccaaggtccatctccggaactcttttcctcttgtcaaactgaagcccatggagcaccaactcgcatcaccccttccctcccctggcagccaccatcctactttatgtttccaggaatttggccatttaggtgactcatatgagtgaaatcgtatgaaatgtctccttttgtgactggcttatttcacgtggcttaatgtcctccagattgatccacactgtaacgtatgtcagcattcccttcctttgtaaggctgagcagtattccactgcatgcatgccctgcattttgtttacccattcgtctgttgctggacacttgtgttgcttccacgtttgagctactgtgaatgatgtggccatgaacacaccacacagatacctcttggagatcccactttcacttcttttgagtatgttcccagaagtggaaatgtggatcatttgattttttcatttttttgagaattaattgcctcactgtttcccacggtggctgcaccattttgctttcctgccaacagtgcacaagggtccagtttctccacatctgcaccaacaggtgtcattttccgggttcgcttggttttttttaaatgttaaccatcctaatgggtgtgaggtggtatctcactgtggttttgacttgcatttccctcatgattagtgacgttgagcatcttttcatgtgcttgttggccatttatatatctcttgggagaaatatctgtttaagtccttgacctatttttgaatcaagttgattgttttttgttgttgaattttaggagttctctgtatattctggatattaatcccttattagatacacagtttacagatattttctctcattctctgggttctttttactctgttaatgatgtcctttcactagatagatgcaaaaaatgtttttaaattttggtgtaatctgatttatctattttttcttattgtcatacccaagaaatcattgctcagtcccatgtcacgaaggtgttaccttatgttttcttctaagggttttaaagttttaggtcttaaaacgtaaagatccattttgagttaatttttgtatatggtattaggtaagggtctaacttcattcttttgcatgtggatatctagttgtctctgcaccgtttgttgaaaagactgtctttatcgaatggtcttgacggcttgattgaaagtcatatatgcaagggtttctttctggactctctgttttattctgttggtctgtatgtctgtctttatgccagtgccacactgttgatgactgcagctttgtagtaagttttgaaattaggacatgtgagtcccccagctttgttcttatctttcacgattttttttttttttttttttttttttttggctattcgaggtcccttgagattccatctaaattttaggatttattcactatttctgaaaaaaaaaacaatcactgggatttttatagggattacattaaacctctagatcaatttgggtggtattgacatcttaatatagtaagtcttccaatctatgaacatgaatgtctttttttaaatgtcctcttcaatttctttcagaaatgttttgtagttctcattgtacaggtctttcacctcctaagtcaatttttaagtattttattatttttgatactatagtaaatagaattgttttcttaatttcctttggattgttcattgttagtgaatagaaatacaagtgatttttatgtgtttactatgtattctgctattttgctgaatttgtttattagttgtaacagtttttgtggaatttttagggttttctacatacaagatcatatcatcagtgatcagagataatttacttatttctttccaatttgaatgcctttaatttctttttcttgcccaattgctctggccagaacttccagtacagtgttaaatagaagtagtgaaagcaggcatccttcctttatttctgaccttagaggaaaagctttcagtctttcaccactgagtatgatgttcactgtggctttttcgtataatatggcttttattatgttaaggttgtttccttctattcctaatttgttgagtgtttttatcatgaaagggtattgaattttgtcatatggtttctctgcatcaactgcaatgatcatgtgtgagttttttttcctccttcattctgttaatgtgtattacattgattgatttttttttttttgtatgttgaactatccttgcactccagaaataaatcctacttggtcaattcattaaattccatttaattgcatcaaattataccaaatttagtttactattaatagtattttgtttaggatttttgcatcaatgttcataaggaagactggattgtagttttcttttcttgcaatatctttgtctggtattggtatcagagtaatgctggcctcataagaatgagttaaatagtgttcccttctcttcaagttttttgaaaattttgggagggtttggtgttagttctttatgtgtttggtagaattcaccagtgcagccatcaggtccagaggttgtttgtcaggagatttttgagtattgattcaatctccttactagttatgtctattcagattttctatttcttcatgatttgattttgtcttgataggttttgtctgtctggaaatttttccattccatctgtgttattcaaattgttgacatatagttgcttatagtacactcttataatcttttttatttctgtagaattagtagcaatgttgccactttcacttataattttagtaatttgagtttcttctttttttcttagtctagaatctagcttaaggctggtcaattctgttatcttttcaaagaaccaacttttgttgtcattgattttctctattatctgtctgttctccattttgtttatctttgctctgatctttattttttccttctttctgctagcttgttctttttctagttccttacattgtaaggttaagctcctatttgagacctgtcttttttaatataagcatgtatagccatcagtttcccccttagcactgctttcactgtcgaacaagtttttaaatttgtgttttcattttcactcatctctaagtattttataatttcccttgtgatttcttctctgatccttggttatttaacagggtgttgtttaatttcgtgattttttaaatgtccttgttgctgatttttaactttactcctttgtggtctgaaaagatatcttgtatgatgtagatctttcaaaatctattgacacagactttgttgttgcaactaaccccgtcattgcaagcccttctccgtctggttgaagtgacttccaggagatttaaagggctggcacccttttctcccttcatttttctctttttcctcttttgagacgtagacattgaagactagcacattcaaaagcaaccatatatgtggagaaaataaaaaagtcattgcacatgctcaggggaagtcacgggcttagaaaagacctaagaagaccttaagtttatactttatgctgatccttagcacagagacagcaacaatcaaaattataaaaacaagaaaaaccagcaaactctggggaagaaagagattttgatttcacaaggcatacaaagaaactttcctatttcaaaggaaaaaaaaacaacagaaactgtcactgaaaaagacttggtggtagatctactagacaaaggctttgaaagaactatcttaaagatactcaaataactaagggaaaatgtggagaaagtgaaagaaaatgtaggaacaaatgaaaatatcaataaaaagctagaaattttaaaaagaaaccaaagggaaattctggagctgaaaagtacaataactgaaatttaaaattcactagagaaatgcaaaggcagatttcagcaggcagaataaagaatcagggaacttgaagatacaaaaatggaaattattgagtctgaggagcagaaataaaaagattgaataaaggtgatcagagcctaaggggtctgtgggataccatcaagcaaaccaacataaacattgtaggagccccagaagaagagagagcaaagggagcagagagactatttgaagaaataatggctgaaaacttctaaaatatgatgaatgacatgaatataaccatccaagaagcccaaaaagctccaagcaggatgaactcaaagagacccacactgaaacattctaatcaaattgtcaaaacccaaagacaaagattttgaaaacagcaagaaagaatgattcatcacatgtaaggaatcctcaataaaactattagcagatttctgatcagaaactttgaaggccacaaggcagtgggccaatatatccaaagtgctaaaagaataaaaactgtctaccaagaagcccacatccagcaaaactgtcctttaaaagtaagggagaaattaacacattcttagatcaacaaaagctgagaatgttccttaccactagacctgccctataggaaacgccaaagggagtcctgcgggttgaaataaagggtgatagacagtaattcaagtgaagaagtaaagatctcagccaggcatagtggctcatgcttgtaaccccatcactttgggaggccgaggcaggaggataacttgagcccaggagttcaagaccagcctgagcaatatagggagaccctatctctataaaataaaaatatttttaaaaatcgaccaagcatggtggtgcacacctgtggtcccaactactggggaggctgaggtgggagaatcatttgggcctgggaggttgaagctgcagtgagctgtcaccacaccactgcactccagcctgggcaacagagcaagaccttatctcaaaataaataaataaataaatatctcagtaaaggtaaatatatagacaattataaaagctaatattgctgtaacaatggtgtgtaatgctgctttttgttttctacataatttaagagactgatttaaaaataacattatgcttttggacacataatatataaaggtgtaattttgtgacatcaataactaaaagggttggggacagagccattcagggagcagagttttgtttatgccattgaagctaaactggtataaattcagtgtagactgttataattttaggatgttaaaatgcaatccccatggtaacaacaaagaaaataactaaagaataaatacaaaagggaatgaggaagggatttaaatgtttcaccatcaaaaaaattaattaaacacaagacagtgatactggaaattaaggacaaaaaaatccataaggtatacagaaaaaaaatgcaaaatgaaagaagtccctctttatcagtaattactttagatgtaaatggattaaactctccaaactctctctgttaaaagacagagattggcagaatggatttagaaagccaaatccaactatatgctctctacaagagatgcactttagatccagaaacataaatagattgacagtgaaaggatgggcaatgacatgccacacaaatagtaaccaaaagagagcaagagtggctatactaataccagacaagataggctttaaatcaaaaaaggttacaagagggaaagaaggacatcatatattaataaaaggctcaatacagcaagatataataattataaatatttatgcacctaataacagtccatcaaaatatttatatcttacactgggaagattgttgctggctctcagtctgcttccagtctgctcatattgcttttgttgtaatgatggtcatatgtgggagctcagtgtcaagagggcagacttgagcccacactgccaggcttcagacctcagctattagctgagtgccctgggcaagttacctcactgggccttggtttcctcatctgttggagtggggatggtaatagtacctatgtccaaggccataagtccaattgtgaatgttgaatgaagggatataggacagtatctggtacacaattattatagatttttcattgacattttatacattctgttttcttcaaagactttttggttcctgttttgcactcagatacttccttttcctggagtttatttgggagcaccatgtgaggtagtacctttatttctagtcacagggtgagccctcatcccagcctgcttccaccactctgaaaggccaccatgtcatagcctaagttctcgtgtgttgttatgcccatggttgtgtggagtgttggcctgttccagcaccaaaaccaaaactgtaattttatcgtttcatttgatagcacaagctttctcatcactctattttttattttgctcaactcttcttgctttttctaccaagtaaaacttggattcattttgcaaactcctatctacaaaaatgcaaaaaattttcttggaaactttaattaaaattgcattctattatagattcagttaggaataactgatatttttaaatcagtttaagatagtgggatgatttcttatccaaaaacaaggtttgtctttccaatatatttctcaaaaatttttttgagtttttttcataagtcctgcacatttttattcagttgattccttgggtttatgttgtttttcttactagtgtaaatagcatttttctgcaacattttctaactggttgttagaaaatgtttcttctaactgatagaagaaaatcaataactttttgtatgttgaggactaagctctgatttttttatcttgcctatattcttatctaaggggtctggggagtcatgccctacaaaccataaattctcatcagatggttttatctaaccctatatgctgtgacttactttccatctgactctggcatgacactacacgaccaagaagaaaataaaaatattttaccccaaaacatgtttctttgccacattttgaaatggccctgcaaagctgtcctttactggggaaaatttgcatctgtaaggaatctctgttaacatagctagctctttttcttccaggccctcccaattctgaagagattaaccgagagtctagcagcttttaaaggtctcagtaggaaacacttgtcattgattgtctctaagggcagccactatgagacttcagaagaaccttggtctccacagtcttttatcttaacctgagcatttcctttctatgatcccaggtctttagacaaactcaaccaattgtcaaccagaaaatgtttaaatttacctgtagcctggaagccatctctccccgctttgaattttcctgcctttctggattaaaccaatgtatttcttaaatgtatttgattgatgtctcatgcctccctaaaatgaataaaaccgagctgcaccccagccaccttgggtacatgttctcaggacctcctaagggctgtgtcatgggtcatggccactcatatttggctcagaataaatctcttaaaatattttacagagtttgactcttttcatcaatgatatatttttctaagtggctcactaaattttctctccctaatctcccctcctttctctttctttctctctttctctctgtctatatatatatatatttttttttctcttttttaaaaaaactttgttcagatgattttctgggtagacaatcctatctttaataaggacagttttgtctcttcttttccaacagttatacttttatttttactgtcttattgcattggcttccaacacaacactgaatggtagcgtaagatctgcactgtttgcccccaccccattttttttgtactgtagtaagcattcttctaatgcaggattttttaacccagggttagatctacgaatggaatccctgaattcctggacatgatttctgtatatgagcatctatgcatttgtgtaaggtgaaattgtgtagactcttaaaagggtccatgaccacaaagataagaaccactattttagctttttgtgtaaaatatgatgtgagctcttgatttgaaatgtatatcctttatagagttaattctactcctaaatttcttactaggttttaccttgtctggctgttgttgtttcttagttagaaattgatgtttcagggatctattgaagcaattgcatattttttcccattttatgttaatgtgacttacattaatgtattccctagtgtttgtggcaacactgtactttaacttcatattatagttctggtatagtggtccttaatatgctattggattttagtttttaatattggctagaatttttgtgataatgttatgggatttttagggtgtcacttttctggcctgaaacctctatggccagtggcgcctttgcccaagttcttgtcctgtgtccaggaagaatgaggtacacagacaagtggagggtgtgcaagacagagaagctttattgagtgttaggggagctcacaggagacccgcagggggcagcccctctctgtaggcgggttgtcttgtcggcgggttgtcttgtcaaatgttcagctctcagcagagagaaggccctggagtgggtggctcctctctgcaggcaggtcatcccattgtctctgcagctcttagcagagaggaggccctcgagagcgtgtctcctctctgcaaacagggcatctcaactagtgttcagctctcagcagagagaaagccctggagagggtagctcctctctgcagctggtcgtcctgacatcccttcaggtcctgaagctctcagcagagagagcacctcctctctgcagctggtcgtgccatgctctgccctgctctgactgagcctggggcttttaaaggcctcagagaggggaagtgcatgctgattggtccatgtgcagccatgtgcaggcccagaagaaagcaccttgagttcccctctggtccgtaggacgggcaacccggcccccaggcttcaggcctgccccagcctgaaggtggggcttcactggggacccatcctcttctgcccaggagcctatctgcctcctgcagccatccatggtgcccaggctgctggtaccaaggggcaccggtgcccagccaccctcagcacccccccaagcctcccctcctgcacttctcagtgcccacagtttggagggggccaagtcagcagggggctggcatgtcagcactgccacaagcatgcacccacccggccaggctgtgacagtgcccaggctcagccccaactctgctctgagattggagtgggtggtgggagcgggaagaagctgggcagcgggaacaggcacctccaggcctacaagggaaagaggggccttccctggctccccaagagtgcagcgatgcctgggtcagcagccccagttggggcagctgaaactgcaccaggagtgggggctggctcctgcctcctccatggagcagaaggcccagatccacagccacgacttgggcagttgtacctggggaactctcacctcgccaaactgcaaggggcagggatcccacttatccccggctcctgctggctccgtggagcatggtacctggccatgtcctctcgcagcctggggcagggtctccagacctgggccagcatcccagacaggggcaacaccgccgtgagctccccttcacccagcacaccacccggcccggccccatggcagcggcccccagggaggcagtctgcggggttgggggcctgtctgcctcttccatgggccctccctgagcagccagtgtgatggcagcggccacaccagatgggctgccgctgccatcagtaatatttatagtgatatttatctgtagagttacttttagggacttttttttttatcaagctttggtcacaggttatgcaacatttaaaaatgaattgggaaaaagtttatctttttatgttctaaaacaagttaaatagcatgaagtgcttgtccttgaagctgtgaaactcacccacaaactgcctgagctggcacctttgggaacggacttcattcctccctgggccccaggctgagcaggtctggcctgggtcacctcatccactccagacgccgcaaaatcacagcaacccttcagggccctctcctggcagcgcctcccctagtcccggtgcttggacactcctcccatctgcaccgaggagagggcggcactccaatccctgcattacccctggaactgcacgctctgaaccaggcccggtgccctttctgcccagctgcccggctgctgccagccccactctgcggagccagcagcacagtgaggcccgtcctgatggcctcctggagctggagcttaggccaagccacagggcatcagggaggatggacgttcaagggctggatctgtttgccccagggtcctggcacccaacagaaaggaaagccaggctaatgacggctgtgtccctacacttgacagagtcctccctccctccttatcaaagtcctgtttaaagggaatggagccaggctggagagagagtgcctagctctgcaggggagccggtctggggaagctgggatctctctcccgccctcccctctgcactgtttccagggcagccccaggcagtggggggcgccagacagtggtgctccattcccttccatgccgacgcgcccagctacccactccacccagccctggaggacatggaagggcctcaaccatccaaatcccacccaaaactgagcccagaggcacccactaaacatctgtgaccccacccagggtggggcaagagggcgcaagccccccagtccagatgctggtgacggtgtgtgctgggcgcagaccccgcttccttgaagactgagggcagtgcccccaatcccgctgacctgctgtgcgtgcgcctgccatgggggagggtgccaggggagaggcactgggggtgtctgagcgacccccacccctgttgcaggacttcagggccacaggtgctgccaagatgctccagggcacctgctccgtgctcctgctctggggaatcctgggggccatccaggcccagcagcaggaggtcatctcgccggacactaccgagagaaacaacaactgcccaggtgccaggggtcgggggccgggggctctgggcatttggggggcagttgggaccagtacccaggtgccaggggtcgggggccgggggctctgggcatttggggggcagttgggaccagtacccaggtgccaggggtcgggggccgggggctctgggcatttggggggcagttgggaccagtacccaggtgccaggggtcgggggccgggggctctgggcatttggggggcagttgggaccagtacccaggtgccaggggttgggggccgggggctctggcattcgggggcagtgaggtcaaacccacaaacaggcacggggccaggaaacggggctccaacagcagtccctcctgaggctggctcgtgacaggtcctgtgccccacagagaagaccgactgccccatccacgtgtacttcgtgctggacacctcggagagcgtcaccatgcagtcccccacggacatcctgctcttccacatgaagcagttcgtgccgcagttcatcagccagctgcagaacgagttctacctggaccaggtggcgctgagctggcgctacggcggcctgcacttctctgaccaggtggaggtgttcagcccaccgggcagcgaccgggcctccttcatcaagaacctgcagggcatcagctccttccgccgcggcaccttcaccgactgcgcgctggccaacatgacggagcagatccggcaggaccgcagcaagggcaccgtccacttcgccgtggtcatcaccgacggccacgtcaccggcagcccctgcgggggcatcaagctgcaggccgagcgggcccgcgaggagggcatccggctcttcgccgtggcccccaaccagaacctgaaggagcagggcctgcgggacatcgccagcacgccgcacgagctctaccgcaacgactacgccaccatgctgcccgactccaccgagatcgaccaggacaccatcaaccgcatcatcaaggtcatggtgagccgcgggcgggagcaccgtccacgcgccaggggtggccacggtgggccgtccacccactccgggcctcactttacccctctgtgagtgcggaggccgaaggaggaagctccgggcagggcctgggccactcaggtgtccctccatccccacccagactcgaggtgcagccgccccaggtctcgaggcacacggctaaccagcatgtctgtcttttctgcagaaacacgaagcctacggagaggtgagtggcgcttcccttcctgccagtgctggccggcagctgacccagcagagatgaccgcgccaggctgccgactcctggcgcctccaggctggaacagatgagaggagagggagtcacctgctccatgttggacctgaggccttggagtctggagaaagggctcccagccaaagctaggctgtttagatcccgtgagggtcagcgttagggtcacccacagagcacgtgttacaaggagaggtcgagggtctggcctccgggcaggtgggatccatccaccctggactcgaggcccgagcccagcccagcaggtcaggggagaaggaactgacatcatcggggtccatgacatccccacctccctgtgtgtcccagctccagctctcaggaaggggagcaggcatctgagatctcccccgtgaggcttcctgcaaaaacgtgccctgcctcagaatcgctgctcagtaacagtggtttcattgccgtgtacaaatggtgcctccctcaccagtgccccttgctcttccatccttttgtaaaatttattcttttatatttgtttttttagagacagggtctttctctgtcacctaggctggagtgcagtggtacgatcacggctcactgcagccttgaactctgaggctcaagccatcctcccacctcagcctcccaagtagctgggactacaggcacctgccaccatacctggtgtgcgcatgtagttccagctacttgggaggctgaggtgggaggatcgctttcgtattgtttttttgtagagatgggatctcactatgttgcccagcctggtctctaactcctggcctcaagcagtcctccctgcctcggcctaccaaaatgttgggattccaggcgtgagctgcacccggcctttcttcccttctattttctgtcatggcttaagccaggcttggttttttaaacttgcctagaacacctgaccgagagccaaactctttggcttgtccctgatgggggcagagcctcacagcaccccatgtctcacagctccctcacgcccgcccaggttctcagggcatttcagcatctccttggcccctgctgagagtcgtgggctacacgttctgagaccctgccctgccacctgaggaatgtcccacccatgcaaccttctgtctctgcttcctcgtttcagtgctacaaggtgagctgcctggaaatccctgggccctctggccccaagggctaccgtggacagaaggtaagatgcccagattacctgcagggtctgcgctaccaggaagcccctgatttgttttgaaatccacacttggccgggcgtggtggctcatacctgtaatcccagcactttgggaggccgaggcgggcggatcacaacgtcaggagatcgagaccatcctggctaacatggtgaaaccctgtctctactaaaaatacaaaaattagccgggcgtagtggcatgcgcctgtagtcccagctactcgggaggctgaggcaggagaatcgcttgaacctgggaagcggaggttgcagtgagcagagatcacgccactgcactccagcctgggcaacagagtaagactctgtctcaaaaaaaaaaaaaaaagaaaagaaagccacatttaaggccagctgtatctcaaattgtctcaacacttctgtccctggagaaactaaaactctatatgtctaattccttttaaatagtatattgagaaaagcagaagcttgtaaaaaatgagatatgccattaaaatactttggtaagcaagcatattcaagtaagtaaaatgtgagatgcactacacttaataatatgattgctcattaatatgaaggaacctcttttgtggcttactaaataagcagttttagggagcctggtttgaatgtcccctgcattttctggtttgaacatcccctgcattttcctaacagaggtgcatcaaataaagtccttccaaaactcactaacagagtatgtgaaactccaacaattcacatctgttaaaaattataaagaaaagcataggaggagaaagtagcttctaaggagatgaaataaggaattgaccatcatagaggatgttactgctacgtagcttcgtgtttttctaaatttggataacagctgtctagaccagtaggtatctggatgtactttctccaggatgagacatctcgaggctgcaggtcaaatcctgccatctccctccctggcttctccagtcctggtggcaatgccgaccctactacagctgggaatgaatttgccacttggggcagccttggctgcacacagcagtgcagtgacccgttctgttgggggggccactggaagctgccacagggatcactgtggttagagtttgaggggtggcaaggtgccaagcggagcccaggacagggcacagctgtgatgttccagaagcctctgcccacctcatcccctgccctgagtttcctcccttttcttccttttgacctcttaattcttcccctttcctctgctcctctttgcacttaaattgggagcatatcaataaatagatgaatttatttaataaagttctgtatcataggttaaaattttaattccaagagagtgtaacctttatgtggtgttctgaagtcctgatctgtctaaagttacttagataaaggaattaatctttgtagtgacggtgacccaggcatcgctggagaatcagagcccagtgttggccacagtcacagctactgggtgcagaagggacccccacgggccaggcacccccaccccaggggtctcttctggctccattttgcaggtggctttgtgggaagcttccctcagagctgggagaaatgggtcaaagcaaacccttgtctgacagaggctggccctttggggagcagctgacaccaagacttctccacttgggcaggggaatcagtaacctctgctgtgtcacctctcagaggagctgtggcagggtccccagctgcctaccgcccaccctaccctgcctcgatgtactcttttctctgcttttagggtgccaagggcaacatgggtgagccgggagagcctggccagaagggaagacaggtgagtgtccttgccccacgcccgccccgcctgcagcccagcgccccagggctgggctcacactgctgcgttgtccttcacagggagacccgggcatcgaaggccccattggattcccaggacccaaggtgagtgacctcggccaggggcttggctccaccctgaggccccagcactgccaggcaggctccccccagcccagcctcggcctcagcctctacgaccctccccccagttaccaaggaacagaagcacctcgataacttgatggccgtcccaaaacccagcctccagcccgacccagggctcagcctcctccgcagactgtttgtcgagaacactagatgccagcggcccaccgagcactcccctcagcctgcagggctggcccttccctgcctgtgtctctgcagagctcctcactaatgcccctctctcctcctgcccccagggcgttcctggcttcaaaggagagaaggtgaggctcttgccctgacagacctcagacctgcgccagcctcggcccagacccacctcttggcgtccgccgcagcctgtcactgctcctggggcaccggcctggtcttttctcagtggtggctttgggggctcctggggggtcctgtggccttgagtttggcccaagggctttgccccccagaggcagcagtgcccatgatgctttgaggcaccgagctcactgcgccggctttcctcctacacagggtgaatttggagccgacggtcgcaaggtaggctggctgggtaggcagagcccctccttcctgctgctcagggcagaaggaccggggctaatggagttccctcttccttctctcttcagggggcccctggcctggctggcaagaacgggaccgatggacagaaggtagagggagcctcgggctcacagctggactggtctcacagaggcatcccagcctctgcagggcccccagatccagcctgatctgtcagcttacacatgtgtacacacgcatacacacacacacacacacacacacacacacgaacttcagctcctgccacatcccactgccccacccagggcttcaccagcctgcatctaattcatggctgcacatcccggcttggggcagctccacagctgcacacagaggccagcaacaagcctacccactcccaggtcaaaccacaggacagccccacccactccttccatggctccccgtgggaacatcctctgtgcccagggagctctgccctcagggcctctgggaggcagccagggatggcctgttcctgcacaacggccactctgcctccccggagacagctccacagcagccgtggcctcatgtgggcacccgtgtgccaggaggagagcgctgcagccctgcggggcagaaccgggtgggctgtgtcttggtcgttggcacacatggaccccagaaccccgccctgagactcctcctgcccccttctccttcagggcaagctggggcgcatcggacctcctggctgcaagggagaccctggaaaccgggtaagggccgtttgcacccctccttcagcctcggcccagggggtgtgggtgcctgaccgggtgggagggtagttgctgctgcagtgggagcgtgggttctcccggcagcccagcagccccagcccagcagccccagcccagcattctgccgggtcggagtcatgtgaggaactccccctgggagctcctggcggatccccgtggcctggagacctgatgcatcccaaacttcggtgtcactggacagctccatttccctgagcagcagatccaggcctggcctcttggtcactgagcctgggcctcacagtgagggtgggaggtgcgtcccgggctgggacaatggagcacttgggccctggctcatggggagaaccccacccgccgtgtgccgagctccacctctcactcctctctcagggccccgacggttacccgggggaagcagggagtccaggggagcgaggagaccaaggcggcaaggtaagtggccttgtcagggtacggggcaggcggggtcaccagcttccaggggcctcctggaggcagccccagctgagaagctgagcagagagggcctttctggaaacactggtcagtgaggagccaatggccgtgggatgtggtggagggtgccctgcccgttgcttcatcagcttctaaccagggcttgggcggccccgccgctgctcaccgaggcctcggcaacaaacccacctcctcccaggtggagccccagggagccccacccacacctcctggagctccccatgggaacgttggtgccccaggggctctgccctcctgggccgcctgcagtgtcgccccgcccctggcggccccaggatccccaagggcttttttctgggagcttggacttagggcttcccactttctgtccaccttccctcagcccaagcccaagtctggctgagtcctctgagcagatgcacaggcgtcctgcccgtgacacacactctgccctcagctggcacggaggttccagcagcccccagccagcatctggcatcccaggtgccccgtggacatcagggaggtgcagtcccaagcccgaccgtgggtcctgcccccgcagcgggcatcctgcaccccccttcccctgccaaaagacgtgaggctgattctgcaaacccttccagggggaccctggccgcccaggacgcagagggcccccgggagaaatcggggccaagggaagcaaggtgagcccctctgcctcttcgcctgcagctgagctggccacactcacgcccatggcccagatgaacagtcacgctggccaccatctctgctgtcaccatggtgccgcattgggctctggggacacggggagggacaggaagaacaggccatgtgccctgagccaccagcccctctgacctgtgccctcctcacgaggctgaacaagttccaggggaccctgcagggcccccatgtgcctggcaagcagattccgctggaagataataggggctccacaccacacaccgcacaggcgtgaccatgcctcagggcccctgcctctgggtgactgtgctgtcctctccttcttcaggggtatcaaggcaacagtggagccccaggaagtcctggtgtgaaaggagccaagggcgggcctgggccccgcggacccaaaggcgagccggtgagtccctcctgcccctgcctcagggccccgctctgggcatcctccttgcagcttgaggaggaccatgggggaagggcacctgggctgtaggcaggatcccctgctggcaaggcacagccaggcccccatcctcccaagaagtggacccggaccaccccacgggaccccccagagctggacttagaggtaaagcccaggcaggtcctccatggtgttccctaaacccagcaccagctgcccagggcatcctgtgagggctgagcagggcccgtcccagtgctgaccactccaaggggactctgtctgagcatggggcctgcctgggagtgaccgcagtgactggacagcaccaggtccccaccaggccccagcccatcacctaaaacgccactcaccagacatccaactccacctggagcctccccagatcattcctaaatcctcggcatgggcgggaccgacgcagcagagggacgagggctggcagcagagccactggcgcaggctgaggctgttgggaaggagcctggggatcgaggtcccaggtcccaaagccagagccctcctgtagagaaggagcatcggccccggcacagcccccaccctccacaggctctgggcttggactcagccccctccctcacccacacgcctgttctctgcaggggcgcaggggagaccccggcaccaagggcagcccaggcagcgatggccccaagggggagaaggtgagtcctcgtgtggaggcagcccagggtctcactgtggtgcccatgggccctgctgacgagggccccaaccccattcctcccagagaacaacagaaccccagggcctcactctccagagttcactctctgcagagtctgggaatgcagccctgagatccccacaccccattctctgctgaggaagctccactacccacccaggcacaccccgcacagctgtgcaggcaccattcacccccggcccactgaggcaccactcacaccccccggcccccactgaggcacctcttacccccagcccactgaggcattgctcacccacgtgacctcaggggtgatgctgaagggctgtgtggtaaaaccccggccaccagctccccttgacatcaggtgaaggggcttcctcccaggaagtggacgaggtcctacccacgtgtgggtggcctcagggggaccgagagacaccgtgctcagagcggcagctacaggcaccgggaaggagctatgggtgaaacaggcgactgttgcaggtcccccgggacagacggggttcttcctcccaggcccccttccccaacccccggccacacccgcctctcacatgggacccaggccggaggcctcagctgagacccgtggggcctcccttcccttcccacagggggaccctggccctgaggggccccgcggcctggctggagaggttggcaacaaaggagccaaggtaggggagcagggtgggccgcaccccaaggtaggggatctgagggggtgcaggggggctgcaccccaaggtagggtggccgggactgcaccccaaggtaggggacccgggtgggtgctgcaccccaaggtaaggggggcccaggtgagggctatacctcaaggtaggggacccaggcgggtgctgcaccccaaggtaagggaccaaggcaagggctgcaccccaaagtaggggacccaggtgagggctgcaacccaagataggggtgcttaggcaggggctacacccagaacccagcctactccactcagtgtgctcagggctgaaggtcaagtggagccacagcctccggggagggtcataggggccggggccagacccgtcttacccccgaggccctgcagtgtccacaggattgatactggggactccagggtgctgctgtcagtcaagagaaccccaaattcctcccctttcttccagggagaccgaggcttgcctggacccagaggcccccagggagctcttggggagcccggaaagcaggtcagtgtcagtgcaggaggccggtgccctctgaccccacgggtgggtctcccctatccatgtggggacagcctggagctagccactgtccccatagcaaacccaggcagcagagcctggcctcagaagccaggacctgctcccctagaccccgagtacctcatacccaccctcagccccagccccccatcctgccctgaaggacccaggttgtggagtcaggggcaaggcagtgggcctgaggtcctggatgggccacagggaaaggaggagctgggaccctcaagacagaggtccacggcccccacaggcagcaggaggagctgcggccatgtggcctggtggtcagggctggacggggcatgtcaggtgacccctgggcatggccagtccctgcctgtgctgacttctgaatttctctcctgccctcagggatctcggggagaccccggtgatgcaggaccccgtggagactcaggacagccaggccccaaggtacgtgcccctcccccagcaggacgtattaggggttcggggcagctgcctgaggagcaggacagggggccggcctgggggaccctgttgccggcagacgtgcctcaggacgggcctgtgcctcctgttctcagctctggagtgaggggatgcctccggggtccaggaagcccccctggctctcctcttcagcagtgacccttgggtgtgcatggcacatccttcctgaggcagggcctgagggcagctacgtggcctgagtagggtcctccccgcgtgtgggcaggcttcgggtctctaggcacgtccagcccccactggaggtggacagggcgaggttggccctgccaggcctctgctcacagccagaactcgacggcacccctagcccacttccaccccagtgtgcaccttgcgccctgttgagcacagccccccagccccaccccgtcctatgaccatgctgaccgactcaacgtcctcctccagggagaccccggcaggcctggattcagctacccaggaccccgaggagcacccgtgagtcacagcctgggatggcagctcccaggagtgggtggacattgtcccaagggccctgaagattcctagtagttccctcaaggcctcctctgtgcagaagaaagtgtgaggtccctcctgcgggacagagtggtgagaaggcttcgggtgactcagtgaaggataggtccagcccagcatcaggaaaagagcacagctcagaacgcagcacagtggcctcacccagagtgtgaatgagcgagggagggaaacggggctgcagaaagctgcccagagggaggaaggagcactgggatctgaggctgagtcaccctggcttctgtttgcttcacagggagaaaaaggcgagcccggcccacgcggccccgaggtatgtgtgggtcctggccacctgtgcccacccagggtgggggtctgcacgcccaattgctgggaacacaatgcccaccgtcactgacaggaccacccctgtcttgagatggtcctggctccccaaggcccagccatgtcacctatgctgagctctgggggagctgtcagccactggctggtcccttttcaaccaaagttcaggctttgcaaaaaaaccacatagatgctcccgtttaaaggaccccaaaatgccagatcgatttttccacataaaaatctcactggtgtccctggtagagacagctcctctgtcccaggctaacatgtgttccctgtcacagggaggccgaggcgactttggcttgaaaggagaacctgggaggaaaggagagaaaggagagcctgtgagtgtcaccgtcccgaagcccacagcagctgggcagaggcagggaggggccctgaggctgagcgtgtgcatctatgagtacaggagaacgccaggcagcttggccccagccatgagcaccacccccaccttcctaaagggaacggctggctcaggggccccctccctcaacccagcctcccttccagcgtcccctccccagtgaccccccaacatcccccccacagcatcccccacaagggtcccctccctagtgacccctccacaacatccccccagagtcccctcccagcatccccactacagcatcccccaccagggtcccctccccagcgaccccaacatagcatcccctccagagtcccctcccccaaaagatgcctccacatagcatccccctcagagttcctacacacagcattccccaagggttccctccccaatgtcctccccacagttatcccccagaaggtgctctgtgcctccaaatccctagcctggccaagggtttaaccagggctgcaggttggtctggaactgagcacaaaacaagggatggataacgatggatggatgggcaagtggatgggggtgggcaaatggatggatgggaggatgggtgatggatggatgagtgaatagaagagtgggtggatagaagatggatgaatggatggattgctggatgagtgggtgggtggatggataagtggatacatgggtgaatgagtagatgtatgggtgagtaggtgggtaggtgggtagatggatgggtgggtgggcgagtgtgtggttagatgatggatggctgaatggatgagtggggggatggatgggtgagtgggtgtatgtatggatgggttagtgggtgggtggatgaatggatgggtgcataaaggatggatggatgaatgagttagtgggttggcagatggatggatgggtgagtcagtggatagatggatgggtgggtggatagaggatggatggttgggtaggtgatgggtggatgagtggatagatgggtatgtgagtgagtggggggatgggtaggtgggtggatggatggttaggtgaatgagtggatggacagacggacagtgggtggatggatgagtgaacggatggaccgatggatgaatgggtgggtgggtagaggatggacggacaggtgagtgggtgggtggatggatagatgggtaagtgagtggatagatagatgggtgggtggacagaggatgggtggatgaatggatgggttagtgggtggctgggtggatggatgatggatgggtgactgggtggatggatggatgggttagtgggtggctgggtggatagatggatgggtgattgggcgaatgggcgaatgggtggatgggtgggcgtggagttggtgggtacatgataatggggtggaatacccatggattggaatgagctgttttggctgctatttctgggacacccagctctgccaggcccctacccctctggtgggccaggctctgacggtggccactcatggcctttctagctctggtgccagcatagggaaggaggaggcacagccttgtcttactccttgcacctgttagcccccccccccgccaagggaggacccgtggttggggacagcacagggggccctgctgtgtgcagggactgtccctggggccactgaagcccacctgttcttgttccttctcaggcggatcctggtccccctggtgagccaggccctcgggggccaagaggagtcccaggacccgaggtaggttggtggccagtccccatgccctccccccaacctgccaggccaacacacacccaagcctcgtggttctgcccacggtggacccacgtatcagtgggcagtggcctgggagagactcagccacccagccttggccccagagtctcagcctcatccttccttccccagggtgagcccggcccccctggagaccccggtctcacggtaggtgtcacatggggcagaaccagtgtccttctcctgccaaaactagacaccaagagcagcaggggtgggggaaggtcagctggcacggtcagagagcaagatcagtggaggaggtcagagggcaaggtcagagagcaagcttggttggggaaggtcacagggcaaggttggtggggggaggagggtggcagcgaggttggtagggacaggacccgccagcctccccgcatggctgcctccacacgtgggctggaatgtcccgggacccccaggccaggaccttgctgtggaaactcttctggggccccggggggactaccctgcctgccgtgtgcattgcaggagtgtgacgtcatgacctacgtgagggagacctgcgggtgctgcggtgaggcactgcccacggcagggtcggggcccatgcaccgggtggagggcgggagtgcagcagggctgggtcatcgctgggtcctgcatgtgcacgtgaccctagggtctgaggtctccccggtaccccccgatgaccctgccacccccccagactgtgagaagcgctgtggcgccctggacgtggtcttcgtcatcgacagctccgagagcattgggtacaccaacttcacactggagaagaacttcgtcatcaacgtggtcaacaggctgggtgccatcgctaaggaccccaagtccgagacaggtcagcggggcaggggcgggtgcagcattgcggggggccgggcggggcgtgggaggcgatgagatgggagaagtccagacgcgtccctccaacgagggcctctgcatggctggggatgccccagaccccgaggcctctggcaacgacctcacgcgtgcggcttgcagggacgcgtgtgggcgtggtgcagtacagccacgagggcacctttgaggccatccagctggacgacgaacgtatcgactccctgtcgagcttcaaggaggctgtcaagaacctcgagtggattgcgggcggcacctggacaccctcagccctcaagtttgcctacgaccgcctcatcaaggagagccggcgccagaagacacgtgtgtttgcggtggtcatcacggacgggcgccacgaccctcgggacgatgacctcaacttgcgggcgctgtgcgaccgcgacgtcacagtgacggccatcggcatcggggacatgttccacgagaagcacgagagtgaaaacctctactccatcgcctgcgacaagccacagcaggtgcgcaacatgacgctgttctccgacctggtcgctgagaagttcatcgatgacatggaggacgtcctctgcccgggtgagcgtgtgggcgcggggcagtcggccgaggagcagcaggccccagccgctgtctagcgtgagccccagggacacccctcacctgagggatgaatgtgcagcccaggatcttgggctgtgggtgggaaggggtcgggccctctcggggctgcagggcagaggccagctgcaccctgagcctgtctaggcagatcagtgaacggccgctgagggttcgctagggactgaccctggcctggcccggcctctctcctctcttccagaccctcagatcgtgtgcccagaccttccctgccaaacaggtaatgcagggcaccctgagccaccaccccagactagcaaagcagccctggtgtccttcctcctcgagggccgggctgggggaggggccgtgcagggacccggggggcggcggagccactgcggaggctgctccttagggagatggccccaggatggcagcacaggggaggaggggcttggggaaggcaggctcccaggaacgcaggaacagcatcacgaggccatgaggtgggtgctgctagcctggcgctgtgctcggcatgtggccactggtcttgaaggcccaccatgggccttgcagtctccctcagctgccgcccagctcccatgggctggccgtgcatgtgccactcggaggaagccctggattcagtgagtgaaaccatcccggggtggaagcactgacaccccccagcaccagcaggtcttgctccaaccctggcctgcctcggagctgcagctgcggctctcacatctctgggagtgggggagcccatgtcccggatgtggcccacgtgggtgtgaagctggagctgggggtgccgtccaggctctgctggacgtggtgctgcccccatggtgcactgctgcaccgtacctgggcccacaggaggtccccgggggcgttaggagctgagtccccctcagtgagccgtcccctccaggagtgtgagggtagggatgccatggagacagggtgggagggtccgacctggaggaccacagggaggaaacctcagggtctgcggtacgaagtcagcgcttcctcagcacgcgggtcgcggtgtgcgttcgggcgttccatggggagctcccggtgggtgagctgggccactgagcacattcacaggccctgaggctgccccaggggaggagccgtggactcagagccgaggttccccatacgtgctgcgacagagaacctagggcttgcacctgggtctggctgcccttcagcaggcgggcagcctctggccccacaacagtgggctgtgcttctgccgccaaggtgcaggcgtcctcccccagggtccacatcagcagcaggggcacctggaccctgagggcaggaaccagaccttggctcctccacccaccccctcgttcctgatggggcagggaagtctcgggaccccatgatgggcgacatggcgatggtcactgtgggtgctttgctatcaggtggggggccttcctctccactctgggtccagtgtgagtggccgctatggcttcccctccactccaggttctatcgtgagtgggtgggtgctgcgtctgtggatgtcacgtgacctttcctctttagcctatcattgtagttgggagttagttagcccgttgagcgtcattgaatttccagtgttgagccagccctgcgtgcccgggataaacccacctggccgtggtgtgtggccctgtttatgcacgtgggccctgattcgctgatgcctgcctgagggtttgcgcttatcggcgacatcagcctgcacttttcttttctcgtgatctctctggttctggcctcagggtgacgtgggcctcgtagggtcctgtggtggctcctccccagacggtgacatggagtgagcccattctccctcctgggagtgggtcactcaggccaccagagcaccacagggaaagcagccagggaggacacggaggcccttgaagctctggcctcttctgaggcctccaggacctgacagtgagtgggagcagccctggcagaacccctcccctcctctcggccgccctgacacctcatccccgacactcagagctcatcctccttcccagctgtttccaatttcaaagtgaactcgaccttgtggctccaggagatgcagcagggacagtgttaaatcggctttcaccagcccacacggccaggcatcctcctcggccctcctgggcactgggtggacaccactggctgtggcctggccctggccttctccagacagccctgtccaccccaaagcccagccaccctgggcctgcagcaggcctgtggagttctcagttgcgtggggaccagagggtgctggagaaacaaaccagacgcagctgaaggcagtcagggcagggcgcaatcagcgataagagctgcataggggccacagcgtaacctgagctccagtcggtggaaagaaaaggcagagacgttgcagaggccaggtctgctcaggggaagacagttctgggtgtagaggactcacatcccagagaggctgaggaagggtttaccaccgcaagctttctcaggcgggctcttgaggggtggctggggtcttcctggcgacgggcctgcggcactggaagccctactggagtttggcctgtctccggcacaggtttggacggagctgttttgtgctgaaaggttttctcggggtccgtggtgtcccccaaaggtgccaccgtgcgggtctcctagctccctgccagcttcctgtccctgtgctcactgcccccacgcctcctgccaaggccgagccacacacccgctccacctgcatttcctctaccgactcgccagcccaaatgccgctcttcactctggcctcgctgagcggctgcccgaggaggagctctaggccgacgcccaccgcaggccttacagtcttctctggacgctcccttgcagatgcaccgtggcctggcggcgagcccccggtcaccttcctccgcacggaagaggggccggacgccaccttccccaggaccattcccctgatccaacagttgctaaacgccacggagctcacgcaggacccggccgcctactcccagctggtggccgtgctggtctacaccgccgagcgggccaagttcgccaccggggtagagcggcaggactggatggagctgttcattgacacctttaagctggtgcacagggacatcgtgggggaccccgagaccgcgctggccctctgctaaagcccgggcacccgcccagccgggctgggccctccctgccacactagcttcccagggctgcccccgacaggctggctctcagtggaggccagagatctggaatcggggtcagcggggctacagtccttccaggggctctggggcagctcccagcctcttcccatgctggtggccaccgtgtcccttgctgcggctgcatcttccagtctctcctccgtcttcctgtggccgctctctttataagaaccctggtcattgaatttaaggcccaccccaagtccagaatgacctcgcaagacccttaactcactcccgtctgcagagtccttctttgctgcatcaggtcaccctcacaggctccagggtttgggtgtggaagtctttggaggcccttacttagcggcccagctgggctgccgtgcgtctgggatggggctgagggagggtgctgcccaggtgctggaggatgttccagcaccaggttccagcggagcctcggaaacaggccccagaggctggtgagcctcgctgggtgtgggcactaatcccgtgcatggtgactcgtgggcgctcacggcccacctggtggcaggtgaaggcttccggttgggcagcagatagtcctgggggaagctggcagtcctggcaccatgacgtatctgggctggtgtcatgcacagtagggcgaatggccacagctgcctgccagcagccctgatcccggggtgtctgcacccttccagcccaacctctgggtctccaaaagcacagtcgggggagcatccaccaggcacaacctctgcggtcctcagaggactgagcagagaatcccagggtccacaatgttggggagcggcagggatcaccatccaaagggagcggcccccacggcgagctgaccccgacgttctgactgcaggagccctcatccaggctgggctcctgccgggcacggctgtgaccatttctcagggccaggttctcgtccccacacccactgcacagggcaggccaggctggtcttcccactgtggggatgaaggatcctccacaggaggaggagagcagagtccacagacatcccaacagcctcagcctccctgtgcctggccggcccccacagcttccccgtctcctccaggccccacagacactgatgaatggacagagacccccaaaaccagctgccccttgcatgtctgtctccatatgtttggtgacagcagtgaaaatgttattagttttgagggggtttgggaagcccagcggtacctgaggagtttctggacatttaagccggttcctaggtgtggccttaacagggaggctgcccttcctttcactgaatgagctgcgtcactcataagctcactgagggaaccccatctgccagctcgtgcgtgctcagacggcgtccatgtctcaagcgttctgtgaaggctgcggtgcagcgtgaggtcaccctgctgtgttcagagctttgctcactgcctgcggggctggaccgttgcacctccagggcccccagaaaccgagtttcgggtcagggtcctctgtgtgcattcctgggggtccatgtaccagctgtgacgacgtccaggggttgggctgagaagcagacacccttggggaaactggctctgtccctcccctcccccatcccaggagctgaggtcttggtgaggccacagggccaggtccacgcaaggactgtccgtgtcctgtcctgtggtctctggccccacgtgacacccacacgtgtggtaggcagcctggcctgggttgtggctatggccaggcccccaagctgtccccgatgcccagggctggtgaccacccaggcaggtgggggccccacttggtaacagagtcatagggcagaacccacctgggctgccacagaaggtctggctgcccctgtgcccactgctccccaccatggccaatcagaagagtcaggggctcctggtctttccgggagggacgtggcccagccagctctaggtgttctgagcagctctgggacccagcgattgaggggtcaggctgggggtgtcagagccagggtcctccttaagtacctcccacactacacagacagtggcccttttgtgggcagcaaattcttgagccatgaaaggatgctttgggccccttccctcccaggagggcagcctgtgcagggatggtgctcagcaggtggacagggcctggggcctgtgtcagggtctcaggcctgggagcaccagcagaggagatggcggctcccagcagtgccgcctgaaagtgtcttgggctaaggacccacacccagggctgccctgcagaaacgcccccgcagagcccagtggtctgtgaggttgcaggcagggtgcgaatggaagggcacaggtgcggggctggcacctgcccggtcctgcccacctcccctccgcccagcccgcacctgcgtctccccacagagctgtccgtggcacagtgcacgcagcggcccgtggacatcgtcttcctgctggacggctccgagcggctgggtgagcagaacttccacaaggcccggcgcttcgtggagcaggtggcgcggcggctgacgctggcccggagggacgacgaccctctcaacgcacgcgtggcgctgctgcagtttggtggccccggcgagcagcaggtggccttcccgctgagccacaacctcacggccatccacgaggcgctggagaccacacaatacctgaactccttctcgcacgtgggcgcaggcgtggtgcacgccatcaatgccatcgtgcgcagcccgcgtggcggggcccggaggcacgcagagctgtccttcgtgttcctcacggacggcgtcacgggcaacgacagtctgcacgagtcggcgcactccatgcgcaagcagaacgtggtacccaccgtgctggccttgggcagcgacgtggacatggacgtgctcaccacgctcagcctgggtgaccgcgccgccgtgttccacgagaaggactatgacagcctggcgcaacccggcttcttcgaccgcttcatccgctggatctgctagcgccgccgcccgggccccgcagtcgagggtcgtgagcccaccccgtccatggtgctaagcgggcccgggtcccacacggccagcaccgctgctcactcggacgacgccctgggcctgcacctctccagctcctcccacggggtccccgtagccccggcccccgcccagccccaggtctccccaggccctccgcaggctgcccggcctccctccccctgcagccatcccaaggctcctgacctacctggcccctgagctctggagcaagccctgacccaataaaggctttgaacccat

SEQ ID NO: 72 - DNA, 211319 bp, Homo sapiens
gaagtcacttcccatcccggttcgcttggggggaaaccaggcgtccctggaagggaagggaagggagtccgggctgcgcgggtcaggtagcctctctccggtcgccgcgtgtcctcgccgtccccaaacctgcccttcccctcatcaagggaactccccggggagtccagaccgcgatccctttccttggccccggggtgcggggggcggacacgcgaggcgtgggactgatggtagccctgcctccaggaagcaggcaggcggggacctctgggcgctcggaggggcagctccgagggcacagggtacagggagaatcagccagatccctccctgccccgggcagccgcggcgggtgtggccagcgcggaggcaggacgccgccgagcctccaactttacctttccaactccgacagcccgtcgcctttctgaccgcgtccctacggtttcccggcatccgcctccctctccccaccacacctgaggaaaacttttccctcgcccctcaattcaaattcagcagtgcccacggttgccgcaaaccgcccggtccctagcaacaaggttccggccgtagagcgagagcctctaggtgtaaggaaggtgatgtcgtaaagccgggagtgtcgtaaaccaggtgcggtggggaggggggaggggtggaggcggaggggtgggggggaagggggagggagggggaggaggtgactcgagcatttagacacaagcgagaggatcatggcggatggccccaggtgtaagcgcagaaagcaggcgaacccgcggcgcaataacggtgagtggcggaggggaccggggagcggcggagtcagggggagctgggcagccggggcgcccccgggggtgaggggggcgagccgggctgggggcagccggggcagggacggcaaagtggagtgggaaagtagaaagtagtgctctctgcccccctccgctgccgccgctgccggagccgcgccgcggccgctcgctctccctgaaccgttatgtctcttacctggtctctctccgcctagcggctcccgccgcccctgccgcctccctggaccgttagccggcgccgacgccgccgcatccccggcgcagggcgggcggccgggacgcactggccacttttctggtcccgggtggagcggctgttgcttctttccgcacttttccccactcttgtgcccttcggcgcctccctctccccctcctcctggccccctcagcgcgattctccctcagcgcccaggcccccgggagccgcggaacaaacttgtgcccggcgctgaccgtgcaaagtggcttccgcgcgccgcggccccggccggcgccgtcgctgtcgctcgggccccgcgactcgggccgggctgtgggcgcgcggcaggcgggctgcggcggcggcgggacggggcggccgcgggttgcgtggggtttgtgcgcgcgtgtgcgcgggcgccggctgtgcgcgccgcgggcggacagggttcggccggcggcggtaaagttgggacccgcgggccgggcgcgctcgcgtaacggggattagaggcgcgggggcgcgggtccctaagcgcccctcctccctggcgcctcccgctgcccggcccagagccccggcctggggactccgcggcgagccccgcgagtggggtccacgtttggcggggcgcggcggggcggcgcggggaacaaggcaggaaaggtacccacttaacgccgccgggagccgcgcggatgggggcgagctgggcggcgggtgtgtttgcggagttgttacctgggcttagagaccgggaagcaccacagacagatccccctcccggggcagacgaggtctctgcgccgggatgggccggtgtgcgtgcgcctcgcgcttttctctttcggtttttggggaagttgttacctgggccggacgcacggagcgctgaagccggataatggggcttggatggcgctctgggtctcgggtggaaggagggtgggggagggggcggacggaccgacggacgcgcggggctgctacttgcaccgcagctgcagtgtttattgatttgtgctgctgtgccaagggaaacacacacccctctgcctggcgtgagagttaaaaaaaaagagagacagcccgagggatcgagacctgaacatgtggtggtggttgcacagtcgccttttccagtttggagagacgttgtaagttgattgtatttctggttatctcggggcgatgctatgctttctctccctctcgtgcagcagcgaaatgtctgctgattgttattgtctggacagttcctgtggcgagaggggcgagacttgtccgcccgggggcggcgggagcgcagggagagcagcccccgcctgcgccgccccggtacctgtttgtataataatgggcggcaacggccctgccgccggccgcagcccaggctatataaggaattacacgtacatttcggaccgaggggctcgctttggttcctgcgttatttttaaaacgacttttaagagaggggcaataaatgcgtctataatgggaccgctgcagcgtcgagaaaacgaggaaatacgtgtttaggagaaaactctctcgtgctcccccagccccaccccccgcgcctgggctccctttctccctcccctctgggatgcgaaacgcgaggttttgtaacctttcctggcaattttagattttgtgtgggatttcctgtctagaagcagatacgaagatttttaagctgtttcaagatgtttccttccaatccataattatatttttaatatattcgagccatcattaaaatcactgctttcgtgattttaattattcaaataaacacttgcattttaaagacgtctgttgattataaacgaaaggtattttggtattctcattgtggagagatgacttgttatagcaaggagtggagcataggctattgcaattttaatttcctgttttagcgtcaaatagtgtgtgttccatattgagctgttgccgctgttgctgatgtggctttatgaaaggtaagttggttcggaaagagctgttcgctttttaccttatttaaaatgttgatcgccagagaaaggggcttttcttgttgctgacgacatgtgtgtgacatgtgagtctgaaccacccagcgtctgtgcagctgctgtaaacatgtttacctgaacaggaaagaatggatttttctccttgagatcctgtgatatgaatattacactcgtaaggcatatcaacagatgacttaaggggggaaaagcgatcctgaaagatacttgaaatcaacaggaaagagaggttcttgatcgctgcagcaaatggcaacttgtgcaggtagaaaaaaagatggtgtttagttttctcctgcatgtatgtcagccccctcctgtctgctgctttcattctcaagggagggatttatttaccacgcttgctgtcagtgtttttcctttgtgtttaatattagaaaaacagatttgcgtctgtttagcacaaaacgtcttgtctgcagtatgcattactctcagaaaacaaaaggtgtttaagatagcactgtactactacaggtatcttccattttcatcacttttggctctgtccttgtatttctttttgttctcaaatgcatttcatccattgctggtgattatagccatgctatttgatttagccttatattttgcaaattaaaaatgaagttatattccattgtgttgtgaaacctcagtatatgtgctggttaatatttcttagcagtgcagtcatatttaagttgcagatgtttattggagaaaattgcctggcaaaacgttaactctcaaatctttttaatgaagaaatatgtgatatatacagtggaagattgtcgtagagatagtttatgttgttatatatgtaaataatgttttattcattttgaaataagatacgtggattttgctgctaagccttctgtaaaatattttaatttcctttctggaatatgtctgaaggtaggatattaaaaggagtatcaggtaatgtaactgacaggggtaaaccaattgagtaaggtttggccaaagcatcaaaccttgtgtggtaacttaatgatgttagtcatccgtaaaggagtgacattagaattgcttgaattagtttttaccatttataatttcatgctttgttgcattttaaaaaatctgtctttttctttttctgctttcttctatgtggttttcttcttgttctaccttttttttttttgagagagagatgtactctactaatgaccacatgctgattaattctctttagatggaatagaaggtacatatccttctgtcatcagcaccatttccccttgctgtcattggaaaccaccagtagaggatgctaacaaaaatgattattggtgtggtagcatcataagtctctctatcgactgtgctgattgggaccttcagtataattctgagtcttattgttacttaaaactagccttggttaaattaggcataagcattttctagtttgccgaaactagaaagaagcaggactgttttaacttgaataattttataaatttgagttatttaagtctctaattgagattgctgttaattcattcttgttttagagcagttgtattactccttattttaaaaagattttgttttatgttcttaggtttggagaagaatatgtaataattgacccatatttatgttgcatatttagaatactttttaatcacccctttttaaaattcatagtaagatcccttaaaatatatattttagatgttaaaatacatctaaaatggtcaaagtttaagagtagcaaggaaaattacaattgattgataatactgtgtaattatttttatataacttatgtagacttagactatggatgggttggcagagagctactaacggaggtggtaactagcagtcacttagatgttagtgatttttagattttatcttttccttccccttcaggtcttttcctactggtagccctcccccacctttttagttaagaatcagtgagtgcatacgttttaaatttgtcagttgtaattaaggaatataagtttgctttgagatcttatatgcagtaaaactctgtagttcgtacgttgctgtatgcttgtatttaaataattcctttcaagaaactatataaattgcatataaataattgcatgagactgtatttagttatgtcttttcattttgtgttcttataggtatattaatataactgtaaattttaagcctctcattaggtagaacattagaagtatttatttccttaattatttttagtggtgtttttataaatgcatcaatatcagtaccgtaatggaatagccatactgtttatcttgaactaagtaggtattgaattgccaggtaagcctgtgttaatttcttattttaggatgtcatggttcttcgtgtgtgtgtgtgtgtgtgtgtgtgtgtgtgtaaatagtttttcatttcctgacaggtatttcttgaatttagtattctaattcctgagggctcagtagtgaataggtgtgattcacttaaatgtttatgaactcagaaactttgccacaaagtcacgagatacattgtagcatggagcaaaacttaaagtatcttataaattgaaaatattaatcgtttatgaagatgaccctgatataaaaagcatgtgaaatatttgtttaatactgttttcttcctttctctagtctctagtatgtttgaaatggcatacctcctatgtagtagcttttgaagcatgtgctgagaaacttctgttaaattgagaatgatatttttaaaataagagcataatgatttctcatagttgtgtttttcttttgctttatcctcttgtggatttacctgtataaatcacttttaagcatgtggttagagccagatgtaaacacagatgcagtatcatgtggaattatattgttagctactcttaactacctgtattgaattgcagcagaggaggagaaaaatcatgcagatgttggaagaagatatgcattagtgtgcaagagtacagcgagaggttagaaaacttgaagctgtagaaataggattgaaaaaggtttctttgcagtacagtcactaatttatgtggaaatgcatgctctttatttctaattgagatataagctaaaataaaagtccattgttgaaagaaaactcaaaaaattttaaactagaaaaagtgtcctgattaggaaatatgataaaatgattttttaaactactttttaaagggtagatgttgtacatattactggctaaataatcattcaactagatatgaactaaaagtagtaagcaagtagaaatatatgtagtagagaaagttttgtagcaaccctagttaaaattaaatttgatctattatgtaggcattgccatataaactaatcattcttttgcatggggcagtgttttgagtattatgtcactaaaggaaacatctttaggacattagttttactaaataaaaatttcaatatgttatgagcatgtctggattttagccttgatggaggtgggttacgctgttaacttaaaactgggttgcttaaaaagatggcaatataatacagtacttaagtagcaaaatgctctctaataagtaaaatttgctttatgattgttttcagagaaaacaacttaatttttagaacttcattaattttgttaaagcatatttttggattatataatatggatgtagataaatggaaagattatgaaaggaaaagcaaaaaattgaattcaagtgtctatttgtattatagctgtgaaactttaagcttttttcattctctacaaagttacttttctctttcttcaaacagctccctgttgtttaatacacgttccctctatacatagggattgcatttatctgtccatatgcacatttctcctcctaatcaacattatgtatttattgagacttggtacatggaggttgaggtatgaactatgtttgtagaaaaccttacagtatggcaacctgggaaaaccttcatctcttttgcagtaacaactacatctgtgctgaaattattcataacagatgttttgtgatctcttaattccctccctctcccttcccctcccccattcagatttaaaattaaatgtgaatggaagataaatttataaattatgttaatttctttttattgttttattctatattgaaagtcctctgttttctctttttaaaatattctaattttaaatgtttaagatattttaagtactctgatttcaattatcttttaataaaatatgacaccattatttatatatctgttactattcatgctcacggcctaaaatatattctgatttcccttactcttaaggtctttgtattcatttaatccacaattctagcagagtgtttggttttgggtttttttttttttttttaagtagatagtgctgagtgtaactagtttgctgatgaaaaaaactcattttcttggaatcatatatttttaatatggaagattcatcttttccaaaataactttttatctgaaaactgacacagataagctgaaatttagggtctttaagtagaaactctagaagagactttaatgtgtgttttaagaaggggtaatgccaggcagatacagtgacatatggaataacatgtagtgaaatccttcaaggagtagattttctgaacctgggctcagggtaaccttgctctgccttgaatacttgaaaaggctgtcaaaatcactgtatctctttaacgttttctcctttctaccctaaagttaagttgctatttgctcctattgctacatcacttttctgaatctcttttgatacacttggcttttgctttatttgggagggagaaagtaaaggaaggaggaattggagtagacaaaaaataactttatatgaataaatattcattaagaaaatgaagtggaataattttggactggagagatttgggagaatcatccaaagccattttgcagtaaagcagacagtcaaagagataagatgactttgccaagtttatgttactagttagcttggactaggtcacagctttttgggttcctagttcggtattcttttcattaggtcatttgagcatatttatctaagacggtaacaagcaagaactagataccatgaattttcaaatttattatacttaaaaccaaaatgtgtagaatgcttcatcatctcaaaggcaagttctaatacatatgcatacatctgtcaaatttagtagttgatgtagttatatcacttaaaatatttcagatgcagagcattagtattatttagaggcatcctctcatttggattatacttttggtcactattcccaatttcagctcccattcactctatccttcctaccttggacccaatctaatatgttttttatatgctgttggttttgtagctagccttgtaaaattttgtacctcttttgtgtgttttgtatttacataagtgctataagtgctactttgctctatcatttactttctttttcttttcttttcttttttttttttttttttttttgagacagtttgacagtttgactcttgtcacccaggctggagtgtaaaggcgcgatatcagctcactgcaacctctgtctcccaggttcaagtgattctcccgcttcagcctcccaagtagctgggattacaggcacacaccgccatgcctggctgatttttgtatttttagtaaagatggggttttgccatgttagccaggctggtctcaaactcctgacctcagctgatccacctgcctcagcctcccaaagtgctgggattacaggtgtgagccactgcacctgacatataatttactttctttacttagcattgtttgatagctagatatgttgctatatgtacagctagttcattgcttttaaccttgcagtagttcatttatgtagtaagcacaaattacctatcaattcccctaatggcagattcccagattgactccaattcttagataccaataattctgtaataaacatcctcctacgtgttgctaatggctgtggaagagtttctcagcactaccatatctagggacatggtattgtccagacatagtattgctgagtataggtcaatcacatatttaataattactaaattctgtcagattattttaaaaacagcaacaccattttttacgctcaccaacaatgtaaaagaactattttctcacgtttttgccagccttcggtattgtacaacattctacattttgctaatttttcagttgctaaatataatctgatagttgctttaatttatgtttctctgtttattagggaggttgatcatttcttcatatccttgctagctgtttgggtttccctttccatatctggcctattcataccctttacccctctttttggatagatttccatttctcttgtgtatttaagatgataatccccaacgtttcagtcatttgactttggtacaggaatccttaattttaatgtcaaaattttgactttatgggtagtaagaagtccttcctaatctatagattataaagatattttcctggattttcttctattagtttcttagttgtattttttgtatttatatgtctaatgcatcaggagttcaccttttgaatacaccctttcttaagaggaacaagtatagcagttaagagtttgggttgatcctgtaacttactacctatcaccctggccgggttacttagtctttttatgcttgagtttctctgcatgtaaattggacatgacagtctaagaattgggaaagtttaaatgaagcatatgacgcattgtgcctaatacatgttttaagttttcaacacatgttcatttaaaattttacttatttattttaaatatatcttggatcagctgacaattttttatccttttgaccagtattaactccagctaatgtaactaccatctgaaagggggttgctgtaaaatttgtacattgtttgtgtaactttgacatttaacattgcttagttcagaccttggacaaagctgttaaatgatcaatagacactgaagcttcatcttaatgctacttttggtatgtctttcagctttaggaaggattccttggatctttttaagggccattatatgagagagaccttaccatatcacttttatgtataacattgacatgaacttcaaggataatgtcccattgttattctgttacataaatcaaagaactcaagtccaaggaataaaagctgtgcattctatatttgaatagtctaagcaacatggagtctgcaccttctcatatatccatttggctgggaatgtatttaagaagatggctgtcttactgtgttcctatggtatagatcaggactattctaagccaaaagttaaaaccataccctggtgtgtgtgtgtgtgtgtgcgtgtgaacttaattgaggtataatttatatacaataagatataccactatgcatgtacattttgatagagttttgacatacttgcatacatgtgtaactgctaccacagtcaagatgtaatagaacattatttccatcatcctaaagagttcttgtgtacttaatctcagccaatcttccccacctattgccccctagcaatgatctgcttttggtcactagaggttagatttaatgtttctagagtttcatataaaccgaatcatgcagtatgtcctttctgtgcaccttcttttgcacaggatattatcaaaattaataagtatcagtagctcattccttttgtattgctgagtagtattccattgtatgaatgttatatcaccaaatacacaatttgtgtcgccattcacctgcagtggaactattaacttgggttgtttctggttctttgctctaatgaataaagctactgtgaacatttacataaaatttatatgcatatatatcttacatttttcttgagtcaatacttaagagtacagttatagtacaggtaactgtacttctaagtacatatagtaagtatatgtttaacttggtaagaagctgcaaaattgcaaactgcttgtaacaaacatttttacatttccaccagccatgtatgagagttctggttgttccacatccttgcaaacaattgtccatgtttttaattttaaccattctagtagatgagtggtagtatcattttggttttgattggatttcaccggtgactaatgatgtttgaagatcttttggtgtatgtattggccacttgtatattttcctttgtgaactgtctgttcaaataatttgtccatttttaattggattgtttgtctttttattattcagttgtaagagttctttgtatattctggaccaaaattttttgttggatacaagtattaaagatatttctctctttctgttggcttatcagttttcttaatggtaccattgaagtgccaaagctttaaattttgatggagtttaattcataattttattcatttaagctttgtgtcctttctgagaaatctttgcctattccagatcttcaggatttctcccatgtatttttagaagcttatagctttaccatttaggtctgtaatccatttcaggttaatgtttggtcttaactcaccagaatttggcataagaatttttatttgaaatttttaaaaatgtttctcagggcccaactaatacccaaagctcaggattatagaggaacacaagtcctacttccctggttttgaacatttttaactgagagtgagtacattgtgcctagttggggttttcaaggttcttcatgtccttgacacattttaattcactgaaatatactttattgaggatacagtttcagagaaagatgcctaaggagagtggccctagttaggggaatgcgagtgttgtcttcaaggtttcttatttcctacaaggttttaaggaatttagcactataccaattcattttcatgttccgtagcttttatctttagatggggagtttgtttaaacctaacatttatcttgagtttttaagggatgtagttttctccttgagataaatgcttgatcttactgatttttggctacatattttacctcctcactttgttatagctaaagaaaaagtttttagttacttttaactttgataagttgattacagatgggtttattatatttatttctttcatttcttagaaaatatagatgttacttattcctatgtaattcttattttaagatagttttttaacttttctgttttattttatcacctattcctattccttgaaaattcgttataagtaacctgtgccttatttttgtttttacagatctcgctttttaatactccttttagctctgtgtctgtcttgaacgttctgtatattaatgcataattccttctgagctggtatccttaggtgcatttatagaaaaagcattgaactgggaaggagtcttaaatttcattttcttttcttttttctttctttcttttttttttttttttttttttttttgagacggagtcttgctgtgttgcccaggctggaatgcagtggcatctcggttcactgcaacctccgcctcctgggttcaagtgattctcctgcctcaacctcctgagtagctgggattacaggcgcgtgccaccatgcccgactaattttttgtatttttagtagagatggggtttcaccgtgttagccaggatggtctccatctcctgacatcgtgatctgcctgcctcagcctcccaaagtgctgggattacaggcgtgagccaccacgcctggcccgaagtgttaaattctaatattgaatctgccattatttggcctctgaaattgagaaaataattccatttatctgggcctatgtttgttcatctgtgggatgaatatgatggattattgtatgcaaggtaatgagaccctgaagatgagagatgtagtaccttgccctaaggagattatagtgtggtagggaagaaaaatgaggaaagaaacctttagaatacagtttggtaactgatgtgatattctgtcttatatgcatagaggggatggtgcttaaaccaagtcttaaagtatgtgtgtgggttatcctagtaaaatatcctagtggaaaataatattccatacagggggaatattatgtgcaaaggcataacacacatgcacacacatattgtgggactcaagtcacgtttggtaaaactgtagggtgagcggaagaatggctagagatgaggctggagaattggatagtaagcaaatgaagaaaaaatgctttatattgctttcctgaatttagattttatcttggacatgatgggaaattaccacaggtcttgaagcaaagagtgacatgattacatttatatacagtaatttataatattatgtttctttatatactcagtgttaatatgattaaaaatttaagaatatatatgcttgctttactaaaagtgaaaaaagttgtaaaacctgatgtatcctgctttcctgagtttttgcttatctattctgataatactaatagatttgcatagtaattgcttcgaaatggtgctgccactaccacttctaccaccaccataaattagtagaagacttacgctactagaagcataagcagccttacgttatagtggctggtatctgtgcaccaagtttggctgtgcatttctagtccctgcactgttagggggaattgtatatttttttttccttttctcaaatcagtaaatcagtgcaaacaaatgtgttgtggatttacaaacctatggaataaaatgtttttacttctatcaattatggctctccaaagacataaaatactcttcattcactattactagttaattttctagattatttctggcatttattaatggttctgcatagagctccaccttgtgaacatgttattgtactttgatatcagttctgtgtcatagatatttaataaataaaataaaactttatttacctgaatgtttctcattcagaatagctgtaattcaggcctggtatatgtttttatttgaatagaaacagttcactgtttttttggaggttatgctgtatactacaagatagattaaaaccagtgcctttttttagaccagctgctgaggaaatacctttatcatgtttcaacctcttaagtttaataattctcatgtaaaaattagtgcttgatttatgcatcaattttctaaacatttcacatgtgatctactttgtatattcagggacttttgtgttctatgttattatatagcgtattttttaaccaaaactttaaaaattaacctcatttcattagtatttgtttatactttactataccttgtttacatgcttaacctgcctatgtattatctgtgacagtaatgaaactgaatggttataaaatgctatataattttatcaagttaagctgacttttttggtggggaacatcatcttcctcttgctaatagataaaggagttttactgtactaatttcaaaaatggtataaagcagtaaggcagatcttcacagcctattctttgacagtatattaagcatgtggagaggaaagcaaggtgttagctattttaaggtttcacagcaacactcccatcttgttcattttcacctgagttgtatagagcctgggaattgctatatatctttaatgtaaagtcagcagtgcaagtaacagtattggatcatacttccaccattacattctctgagtttctgatcaccacattctcacagataaggaaaatagttgtagatggatggtctgaaatgtaaaaaggataaagaacacaagaagtggtaaatatgtttagtttcagacagacattatataaaacttgggaggagggtaaaattattgattagctacgggtaggcttggtaagttttaacgcatgttaaaatttctaagataaggaataaaaatctagaaggtatgtgtaccttacaaactagtagagaagggaagtagaacaagaaacaatattcaatctgaaaaaaaggtaaagaagctgaagaaagaaaacatggaaaagagaagacaagtagcacaaaagtacatagcagcaataagtgcaaatatattagtaattacagtgcatatgagttgaaaaaatcctccacttaacagaaactggttattagatgggataaaataacaaaatatatttatatgctgtttacaagcaataccttaaaaagcatattctcgcttgaaagtaaaaaggatttaaaaagatattcctgacactactaaccaatagaaatgttgtatggctatatatatcatgtaaagttgactttgaggcagaaaacctgtccgagagagtgagggtcactcaatagttataaaaggaaggtataattttaaataagtgactacctgataatacactttcaaaatacattaagcagaaactaggactgcagaagaaataggtaaatttatcattattatagcttatttaaaataatctctgttaatgtgagaacaagcagaaaaaaattaagaaaaatatagatgattttaataacaggacttacaagcctgctgtaatggacacgtatggaacattgtattccacaactaaagtagaggaggaacacttagaaaaactgatcacattctggtcaaatacagccagctttaacaaatttcagtggattggcatcacattacactttctgtttacaattccattaacttaaatagaaattttgtgtgtgtgtgttttggaaattaacatgtttatttcaaaataacttgtggatcaaagaaaaacttgtaatgatagcagtaaattattgtacacgacaacttatgtatagctaaaatgggaatttatagattttaatgcttatattatgggactaaaggttgaggaataataaacatgcaattttaagaattagaaaaaaagcatactccccgattgaaataacaggggaataattaatgaactagagaaagtaaaagtaattcaaaaaggaaacaatgcaactaaaaatagattatttgagaagagtaacaaaattagcaaaccactggcaagattaataggtggggaaagaagtcataaagcagtatctggaatgaaaatgggaatgttactacaggtgtttcatgaatgatcaactttattttaatgcagttgaaagattaagtggaccaattcctaaaaaaaaatgtagctcatgctggcccaagaagtaatagaaaatggaatacccttaaaacaaaaaggaaaaatattcttacaaagaaaaaaataccaattctagacaggtttactggcaaattctacaaaacattcaaggaacaataattccagttgtacagagagtatttcatggtttggaaaaagaaatgactgtccccaacttttttttacgaagctctaagtataaaaaatgatgattgtctttaactcagacctatgtacaaaaattcatagattagatatcatcacatggtagtacccccttatccatctgtaggtggttacctatgctcaatcacagtccgaaaatattaaatggaaaattcaagaaataaaaattcatatgttttaaattgtacgcccaggatgtggatcctccctttgtccagcatatccacactgtatatgctacctgcccattagttaccattggtagccgtcttggtcatcagataataaaaaaaaacatagtatttatagggcttccatgctatccatggtttcaggcatcctcagggggtcttgaaacgtatgccctgttgataaaggggaattactgtacttgaccaataatgtgtaagaaagtaacccatcataaccaagttgggtttactctagaatttcaaagttggttttatattagaaagtcacttaatagaatttaccacatcatctgtttaaaggaaaagaatcatgtgagcatctcaatagatccatctgtgataaaactcttagcaagtcagtaaatgagaaggcccctttcttaacctgataaaggcatttttttccaaagaaaatttccagccctaccttctttccacttcatggtaaagtattgaaggcattggttccctttgatatcaaaggacaagtgtgcctgctaatgccacttttagtcaacattgtactagaagtatagctagtacagtaaacaaacaaagatacaatgattagaaagaaaaagctattattatttgcagattatatgattatctgtgtaacccagaaaaattcacagatgaattactcaaagtttaaatttggatgcagaattattatacaaattcaattatttttcagactttttgctggcatagaaatgcaattaagaggtagcattatatcatcataaaagtataaaacactgtgagtaaatctaacaacgtgctcaatatctttatggagaaattatgaaacattggcagacataaagatctaattaaatagcataatgtaccatgtttataaaaggagacttgaacattgtaatggtgccatttctccccaattttatctgtaagttctgtgccatctgatcaaaatattgacaggtttttgttgaatttgacacgctaatccaaaaacttacatggaagaactaagagataatagcaagatactcattcatgaaatggatctgtgatggcactgggattgccaatgagtgaaataggatgaccctttcaataattggggttgttggttaattaaatggaaaaaattggggttggactgctgcctcacactatttagagaaaccagtggaaggattatagatctaaatctgtaggtaaggtaaaggtataggtaaagtaaaatggtaacactttataaagatgataggctagaatatctctatgactttgagtaaagataaaaaggcataaaacacagagcaaaagattggcaaatatgactacatcaaaattaagaattttgtttcactaatagatactgtagagtgcctaatcccgtatttagcacatatcaaaatctaccacccagggaaataaagatgaacaatctgatagaaaactgggcttgaataggcacttcacaaaagaataaactcgtttggccaaggagtgtattataagatattcaacctcattaggaatcagggaaatgcaaattaaaaccacgttaagaaggcatttcatgtctcctagattctcaaaacttagaagccagctaatactgctgttggtatagacatggaacaactgaacacttaggcgttgcagatgctaatgtaagtaggtacattcactttgggaaataatttcacattattaaagttgaagatacacataacactatgacccagtattcctatgtcttagagaaatctctatacagacataccaggtaatgtatgtagttgtttatacagtactgatcacaataacaaaacaaaaaaataaataataggataagtaaattgtagtatatttatacaatggaatgcaacacaatactgaaaaatgaatgaattacacctgtgcttaacaacttggatcatcctaggaaaataatgttcgaacaaaacaaatcactgaagaatatagtgtgattccatttatatagaatcaaagaacacgcaaaattaagtaatatattgtttaaggataccaatacacataatacaagtctatgataaacataaaatttaggaatgagtgaatttggacacagagtagatatcacaggtcaggataatgtgtgtttaaaaaaaaacgatggtggaactcagatatttattgtattacttattataccttaaatttattttatagaattctttaatgtttgatattaataattactgatagtaatttatggctactgataatcaacatttaatctaaaatagtaactgaaaaaataaaagtgaatgatttttgggggaactcagtatttgccatgtatttcctatgtacgtatgtttaatttttgtgagttctcaaatgtaatcaatttcttttgagtatctttagtattttatactatctttgtatttaatatagcagataaagcttaataatttctttctgttttttttttttttttttttttgatggagtcttgctgtgtctcccaggctggagtgcaatggcgcaatctcggctcactgctgcctccgtctccccggtcaagcgattctcctgcctcagcctccccagtagctgggattacaggcacccaccaccacgctggctaatttgtgtatttttagtagagacagggtttcaccatcttggccaggcaggtcttgaactcctgaccctcatgatccacctgccttggcctcccatagtgttgggattacaggcatgagacaccgcgcccggcctaagcataataatttctaaccctggttgtgtgatactccaaaatgtattcatttatttttaggggtataggcatttttaattcttttatatttttgtagtcactaaatttacttggcttctacctttacatattttctgtttattgaccaccttttaggaagtttgagaaaggtattaccttattatatttttttctaacttaaaatatgtgtgttactattgcacttgtggatataacatttcattttagaatatttacattttattttgtttatcaaacaatagcatttttgtatcaggcactattctcaatatcgttaaaatattaatttatttagtattcattgcaaccctatgagaaagatcctgctatctttgataggtaaagggaaactgaggcacggaaagtgttgggtaaggtcacttagctagtaagtggagcctgtgttcaaacctaggcagtctggttccacagtctgtgcacttaaccactaagctgtaagagaccatatgaagtagatctctaagaggagtatgtcatctatttcaatgttctttaataaacagggtactatttttgagcggtgccagcatattgtcagattatgatgaaataattatattattccctttgtttgatctgagaatgtaaaaagcaatactggtaaattacacactgctggacattgcttagatttactcttcaatgaattttgtgtccgtacgttcatgagatgagaaaaatagataggcaaaagtacctgttagtctgattgcagatctacccgtaatgcacaaatggtgatagtgtactttcttcttccaaaggtgggttaatggagtcatgatttaaaataagagtttaacagtagcgtgtataaatttgatatttatacatcataaatgatgtataaatcatttatgggagagtgatatttgattcagggatgttgacatgatacctttgggaaattctcatagtaaaatagagttagactgtcaacagggaaaattctaagtaatttgtgaagaaactagtagtagtagtctaaagtgaggcaccaggcaaagagagaagaatcagacaaatcctttagagtaatagttctttacccattcagacccacactccatttagagcatttactgtagaagttcttgagagaagatctcatcctgtagccatatatgctcactatatatatagatataaaacatctctaagaatttcagcttctctttgtgctttttgttagctactttaaatagcttaactttcagtgacacatggttttaacaggcaaaacacatgactgttaatgatttttctttagagcagaaatggtttatatggcctaaattcacttttagagaatcttctgagagagagtatttcctgtctctttgcacatgtgtggcatattgtaaggacttatttacttttaaataaaaaggaaagctcttgcagtgaagtagacatttattttgttaagaacctatataaggccaggcgccgtggctcacatctgtagtcccagcactttgggaggctgaggtgggtggatcacaaggtcaggagttcgagaccagcctgaccaatgtggtgaaaccccttctctactaaaaatacaaaaaacttagccaggtgtggtggtgcacacctgtaatctcagctactcaggaggctgagacaggagaatcgcttgaaccggggaggcagaggttgcagtgaactgagattgcaccactcactccagcgacagagagagactctgtctcaaattaaaaaaaaaaaaaaacctatataaaatagtttatagcagtttatagctgtgaccatcaagtcagataatttgggatgttcacagagagctctgggtgattatgacagtgtaccacccacatctcttatttgttttgcttcatttctctactagggagaggaggtcatataatatatggtatttttatgttattttagataaatccatatcaacacagcacaggagaacaaattatacccctggtagattttggggtataaacgtcatgaaatgtttctcagaaagtgagaaatatttcttgattgtatctttaaaattaatgcaaaattgttatgttactccataatttatttgtgtgcattactgtaaggttcatgtgtattcatattaaattttttcttttaaaaattgggttcaatgaattatctaggatgattgcattgtttgtggcatcaagtgttgtttctccctttccataccaagcatatcctgcttttggtacaggatatatttttttcagatgtcaaaacacctagggatacattttatgaattactaacttacttttttaggacagacttgaaatcatttagagggtaaactctagcaatatagaaatctgttttttgttgaatggagtagcagctaatctttaagacccattgatagcattttagtagtagcacttaacattcagaaaagaaaaacaaatcatccagcttctgatcttcagttttatgtaactttacaatttggtacttgatgacttggtattggtatgagactgaatagtgtgatgttacaaacatgtgatgtttgcctaccatgttctaggcactgtgccaagtgctagagatggaatggtaggtaaagctgtggtctatacttagggagttcacagtcaaatgaaggatacagtcacaaaacagacacttgtataaagcatggtcactataatacagagaaatggaaagaatggccagagaaagcttacttgaaaagataatgcctgaactgaatactaaagggaggtcagtgggagagacaaggaagggtagatattgattgtgagtgcatgagcattgaaatgagagggcccaggggaataggaagagaggaatagcctaaaggagaacaggagcaaaggcacatgggtgagaaacaacatggaatgttctggacatacaagcagatctctgttggaaggagtatgagataagggtaagagagtgattggagttgagtctggagagatacgaaaccaaatcatggaagctttttaaatgccatgtttaggagcttgaacttcatctttttgtgagttggacagtcattgaagggttttaagtaggggcccaatttgattgtattcaggttgagtagagtactctgatagctgatgtgaaggataaatttgaagggaaaaagattggaggcagagaggccatttgggaagtagttagcttgataagaggtgacgagggcttaaactgacacttaatagaaatggagaagagggagtagatttcagagtctgtactttttttgttgttgataaatagtaaatttagtaggactcgatgcttggaaatgaccagtgggagagaaaaaatggacgagattaactccaaagtttctagctgaggtgattccagggatagcgatgacaccaaacagagtgaatatatgaataatcagttgaggagacaaacggaagtcagttttggatattttgagtttaagatggttgtgacatcactaatggaggaaggctaacaaggcagttaacctttgaacttgatgctgtgggatatagatgggggtcctgggctggaaatacagcttgaagagttcatcagtttgcaggaggtgattgaaagcataagaccatcaagggaaggtgtgtgggctgaagagaaaaaaaggtcagaagacaggagcttggagaacagaagtgtttcagagtcaagtagagaaaaagaagccccacaaagataagaaaaggaactgaaaaaaatgaaataatcagtgggccaacctgaagatccaagcaagactagaaaccacacatttttaatggaacaaatctatatcgttgtgatttccttagaagccttaaattggtgggggagatcagaatgtaacattagtctaggattgaggttttaccagatggtacagtaaaagttgtgagtttagggaaaccaagttgtttgaagttagagcagtttagatgatcagctgtgccaaatattgcaaattatgtgctgtacattattctttacgtatattaactcttaaccctcaccacaaccatagttgttacagaagattctagaatgtaagttccataagagcaaggtgggtatgctttgttgtctgtgctattctcagtgcctgacatacagaataggctcaaatacttgttgaataaatgagagaatatgagatacatactattattcccattttacagatatggaaaccgggtaagaagagattaagtaacttacattcacaatttttagtggtagagccagtaggaaaggaattgagcccaggattagggagctgatggaaaatagagaaattttaggtctggagatctctctgaggatagtggaaataaaggcatgagagatgtagaaggggagaaagttatcatcagagagtaaaatggtggaggttatgattttttgagatagggttgttcagtgttatgacaaagggtcaagtcttagcagtggagtaaaggatgtttattattgaatctctgtaggcgtcgatgtagatgttgaaggctcctaaggttatactagaagtttgaatagagaggaacattatgataccatcctcataaatgaagtggtataattggagatctatagataagaagcagcagagagtggaatagataagctttcttatttcaattctagctttttaaacgtagattgaggttagatctggtttgctgaaaagacaggaataaattgggcttgctgcatataatttatttcccccatatggataagctcgttggaaagctccagaaatattcagaatataaatacaaaagtttcaaattttacctgacatgccagctctacttaaggtatgaattctaaatcttgtatctctcccctgcaagaaaagctacctcctcctttttatatagtagtagaacaaaatttttgtttgtgtttgtggcagcacatctcacctctttgtttcatagctgttgggtacacattccaaggacggtaaaaacaaaatgcacttgctcttctaaatctttagccactggctagtggattgcatttattctcagtttccttgccgatccttttacccttcccctcccccatttttctttttgaatggttttgtttcatgaagctcttgagagctttctatgttatattgtggcacaggaaaaagtttattcattttagcactaaactgtagttaacattttaagttaatcatttttagaatgttttgatgagcaatcctgtttcatttttagagatgattcaatctgatatttcatttgcttttaaagtctctaatttcttttcatctatttccatagcattgtaatttgtatcctgaacgtttctcttcagagaaatataaaaatccagcaatccattatagtattgtattaagcctaagatttcattatttatcatacacatttatttatttatttttattttttatcatacacatttaaagtacggcctttgatttatagaatttttcattttgtggttgtgcctgcttatctttgtttttgtgtgtgtatgtctttcacagaaattagtatcattctgtcatagctcttaggaaattcagagttaatcaaatatgttataaaatgtgtttgtataatgaaaaggttggaggagatgattctgaaggtgccatttagagcaggtgtgctatggtttggtggctctctattctctgcccgctttaaatcttagtaggcagcagatgaaatactactaagtgacctttgacacagaacccatgaatgctccaagtatgatttcattttaccgtgttctttgtaaactcaaatgcctgtcaaatcagatgtgtgtttcgatgtttttactgaatgcgccttgaggaggagactaaagcttggggtcaatttggcataatccccacgtttttctttttctattatagaggtttcttggggaaggggtgacatttctttctgaggaaaaggtgcaggctaagtgtaggtggactttctgtcttctccatactttttctgacagcctcactggatcctggtgatatcatacataaatgcagagcagactagatgggttgctggttggtatttttggttaccatttgatctggtgtctttggttatgtaataggcacattaactgacaaattatattaagtaaatatatagccatgggctttttaaaatctcactttttaaagtcaataattagattagattgtctcccagtaattaagtttttcatatgttcatggatatatgtagtatatattaaaagattatttgtgtattttttacattaatttggtaattttgacaatttgtcaactcaagtataaaatacttacatataaatatacttaaataagtatttaagatttaatgtcaactttacagtaatgaaatagaaaattcttgaatgttactcatttaaattttctgatttgagttctgataatctgttagaaaattagtaatatgcttaggctcacttcaatttccccagcagaaactattgtatccttactggttagaagctgccaatagtcattaattgttaaaatataagaaggttgtaggggaccatatgacaaaagaactagttacctttacagtttgttcgctgtacctcatacactttgtgttagaagaaaagctctattcagtgccttgagtgaaaagatccttacctccttttagactccgattgtgggaattttcttgctatcctggacattttaacttgttctgggttattttgaacatattaaggtggactcctggaatagttgagaactaattcatgtttgtttgtttttctgaatcagcagtttagtgattaaagcttaagattcttttaatagatttaatgaaaaagaaatcttaacttgaaatttaaattaatgaaaaatattaccagaggagatgtctgatattttgatacgggaaaatacagaaaataaaaacatttaaaaatttatccagatgttaatgtttgactggaagttttctactggaagaattagtttggattttacaatttgggagaggcagaagggagttggggaggtggtcaagcccaaattagcatgttgaatatccagattcacagacatttcactaaaccatttatgtacttagcatttttgttgactagtcttttcatttatagtgctcttaaatcactccatttgtcagttactccatttacctgaagattaaagtatacactgtgatagaaaaaaatagattggcaggggcgggggttgtattatataatgtaataaatcctattaaacctgttaaagtagaaacattaattttacgttttagaattttcttaatgacaggaaagtaaactggtaactaaaattcattttgttctgtaggtttgtggcattttatgtggggaatgtagatgctaagtgttatgagttgtccacctgtataaaactacttcccagaagccttgatgttcccataaagagctaaagacaaaaccaaatcaactgctaacaccttttatgggagatcaacttgtgtgggttatgaggcccaccttgactaagcaggatatgtaggtaaacctgcccagttggaattagtagctgatactctaaaaggagaatggtgaacaggaggccattagcagaaacagcctcattcatttatagagatcatcttgttaaaagggaaatcagcttccctagatcccaagggggtattgaaaatgctaggagagagcctagaaaacttttctgtgcagattgtcagaaaaaggtgaaaatattttcttttactgtaaaaagaaagaaattcttttccttcttccaaagatgccttaccacctttgaaaaagatttttaaaagtctcagagaaaatgaaatatagattcttaaagtggaaagggaccttaaaaatccatctggtctggttcattttatagatagaactgagaacctcaaaaagttatgtaatttggcttacatcacaagagctagtttgaagcagaagctacgattttcttactgtgtccagttgtttggaagtatgaatagtcatcattaaaatgtagggagtttatagggaagcttatgacaactattagttaatttacaatttgttcactgtagctcatctgctttgtttcagaagaaaaattctatgtcttgtgtggaaaaactcttacctccctatgaacagaactataggaaatttcttgctaacttggatgtttcagctacttcagggttattttaagtaactggatagttggttttcagaattctagttacagaaactagtaaaagaatatgagttgttgatacgtggaaactttagacccaaaataaaggtaggatgatgtgagtttagtgcttacaaatttgaatgaaatagtacctttttgaggtgttttagtagttgcccttaatgatttattttaaattagatggctttgggagtaaaaatactgcttttagcaaaaaataaatataaaattgaaacttttgcacgtagagttttttttttctttttgagatagataaagccatctaatgtccttttctatcatgtcttgataagtcaagagcagaccacttgatgaagaaaaatgaaatatcatctaaaatagaaaaatatcctgttaggaaaaataccaccgttttttcgctgcctttagtctggttgttcttattgtgtgaagggaacttaaatcttgtcaaattacatacattgtaagtcccatttctgtcttaaaagtataaccatgcatgctcaattaagtcagttatcgtcttcagactgtacttttgctaattaagtcttttccttggggttaagataagacaagatttacagatttttaagtttaaggcctgtaactactgaggatggtttaaagctttgataagtgagatgtggtgctttaaaggaggactttcctttagtctcttaaaaacacttggaagatatttattacagttttccaaagtaagataaagctcagctttaataatgaggaccttgaagtttttttatgtggtggggaggtgttaggaaactcattttttaactaccttcaagtgattatcgaggcaggtttttcttccctatgaggaagaaaatgaattgtgcaatgccagtttaaagaaactaaagcaatgtatttcttacataaagtagatcattctctctccctgtgtaactgccacctgtttaaaataagattccagtcttgcctctgtcagtcttaatgtgatagactctcactcagtgaagatctatggatttattttattgaaaacatttgtttagcatatatctgtgttattttaattttaatgtttttagagatgaggtctagctattttgcccaggctggccttgaactcctgggttcaagtgatcctcctgtttggcctcctaggtagctgggactacaggcatgagccaccatgcctgggtaagatctaatgatttatttgattgaaaacacttatttagcatacattcatgtatttttgtaacttgttgcctcctgacaggtcactagacataggaaagtgcctcttttaacactttcataaacctttaacataaacattttaaatttcttcattatagtggaaatagcgtctccccttattattggacattttgaaaaattaaaaaaattttaaaacaatttttatcataaatactagatgggaataattatatatgaagcttgtctgacaagttggatttttatgataggatagaatcccaggagtagaattattgggcatacccttttaagcctcacagtaaattattactaaagtgtgttgcaaagattttatcagttgtatagactcccagatatgaattccagggcccttcaggggaattagtggggacattttgcaaagagcaacagatggtgtctggaaacatgttctttaatctttgctgtgccacatactagttgtagatatctgggttagtaacataggttgtgtgggccttactttcctcaccataactcaggtgaattttaactattctactggccttaattctcattctgtaaaatatgagtataatcaaggagaatcagtgcctatatattaccaagtgatttgtctgggaaaaaagcagaagcagggaatgtcagatgtacctagaaaaaggagcaagttaggggaaatgcacaaaacatgatttgctcttctggtttttttaagaatagagtctaggctgggtgcagtggctcacacctgtaatcccagcactttgggaggctgaggtgggtggatcacttgaggtcaggagtctgagaccagccttgccaacatagcgaaaccccatctctactaaaaatacaaaaattagccgggtgtggtggcgggctcctgtaatcccagctactcaggaggctgagacaggagaatcacttgcacctgggtggtggaggttgcagtgagctgagattgcaccattgcattccagcctgggtgacagagtgagactcggtctcaaaaaataaaaagaaaaaagaaaaaatagagtcccataaaattatgtcagatagacactcctcctgagacttagggattttcaaaccatttcaaatagaaaatgaaagtgtaaggagacaagtgtgtaactttccaaaagaagttgtgttctgtgtccgttttaggttacagaatgactcaagccaaaaaaaaagtatgttattcattcatttacacaaaatacaaaatattttcattatcttctgttatttgtttaaattgataaaattatatttatggtgtacaactttattttttgatatatgtacacattgtggaatggctaaatcaagctaattaacatatgcattacctcacatactttttgttgtgagaacacctaaaatctactcttcacaattttcaggtgtacagtatattaactgtaggcctatgatttaccatggatctcttgaatttattcctcctgtttagatgaaattttgtatcctttgaccaacatttccccaccccttctacaccccagcctctggttaccaccattctactctctgcttccatgatttagactgttttagattccacgtataagtgagatcattggcatttctctttctgtgccttagcttatttcacttattataatgtcctccaggttcatccgtgtcgttgcaactgacaggattttcttctctttgaaggaagaatagtattctgttgtgtgcgtatactacattctctctatcagttcatctgttgatggatacttaggttgattccatatcctggctcttacgaataatgctgaaatgaacaggggagtacagatacctcatcaacacactgatttcatttcttttgtatttataactattggtgagactggtggatcatatgatagctccaatgttagtttttgaggaccctccatactgttttccatagtggctgtaccaatttacattcccagcaacagcgtacaggggtttccttctctctgcatcctcatcagcacttgttctgtttcatctttttgataatcaccattctaacaggtgtgaggtagtctctcattgggttttaatttgcatttccctgatgattagtcatgctgagcactatttcatatacctgttggcaatttgtatgtcatcccttatgaaatgtctgcaccctttgctgtttttttattaggtttatttattttcttgctatttagttgctttagctttttacatgttttggatactaatgtcttatcagttgtatggtgtgttttcaaatattttctcccattctgcaggttgtctcttcactcttgattgttttatttgctgagcagaaatttttagtttgatgtaatcctatttgtctatttttgtttttgttgcctatacttttagggtcatatttagaaagtcattgcccataccagtgtcagagagctttttccctatgttttcttgtaggagttttatagtgtcgggtttcatgtttaagtatttaatcaattttgagttgattttcgtaaatgatgtgagatgagggtctaatttcattcttctgcatggggacattcagttttcccaacaccatttattgaggagactgttttttccccattgtgtgttcttggcatctttattgaaaatcaattgaccataaatgtgtggtctctctattatattcatattttttaagtaaattattttatgatgagaaaggtggcaaaaattctgcattatctttgatatgtaagaaaaggccatttgggcacagattggacctgattatttctcttttcaagaagcaagtaccttatctctattcttattccaaagtgatttaatctctattaataatttaggcaactaaacatcattactgattgtaggagaaatctgagtctagtctgtctatactgatcaagaaccaggactacctcatggagactttggtaaaataaatctcaacagcactcaccagatgaataaaggttttcttgaactagtttaagatacttggttatcagttgaacacaaatagtaataatttaaggtttcatgaattgacatgtctataattagcttcctaaactaagaataacaaaaaatgagtagtttgttaattcctaatagcctgtgatgaaagttattatctggggttttttttgggtctgttttaaaaattaacactttggctctgattataaaatttataaattggaaattgaaattactggataaaatacaatttatgttttaaaaacattttcaagtggaaaaaattacagcttggctgaatagtgataattttcaaactaagcctttgagttcactatttagagttctctgataaattgttagagttagaagtagtgagttcattgcttgactgaataaataattcatatggcacaaaagcagctttttctttctcttcagttcccttctcccccattatgttcactttctctcttgtaaaaggctcctttgcagccaaatagcaaccttgtgtgaatatgcagggacttgggcatagtttcaacctcagtgttagctgagtatctggagtcatggaagagaattaagaatctgtcttgaatgtatattttctagtagcaactgaaaagaaatatagtagttgtaaattgctagaccttactcttacggtacagttgctctggaaatctctttttagcaaaataggattttatttctggatatagaatctttcgtagtgtctgcgtcaaaacaaaattaagttttaaaattgagtaaatcatttattttttctagttttttcagaaatgcttttttactagactaaataacttttcagcatcagtctgataagcatagaattttcaaaattctttacttgctattttagaattctttattttctaagaattatgaagactgtattaggtatttatgtggacttcctttttttcctaccttttattatagcaccaaaattggaattacgctagattattttctctctgctgtttaaatcataagagactcttttattgggtcagggcaattgtctttctagcacaataatcttctttgataatgtcactactggaaattatgtttatccttcataaattaactaatccttatttttgtaataaattatctgatatccttcagaggttatctaaaaatattcctttaagtctgcatgtattcagcatatttcatggtataacaagacttttacagttgtataacagaaatttaaaataaggcaacggactgtaatccagacttctgtcaactggaaatttttatgaagtagtattttgctggtatactgatacttcaccaaatacaatgtttatctttaaagaagtttctaaataagacaaaacattatgtttagtaaaattcaatgtagtatgttttactgtatactaattctttatatagcccataatcataatacataggctatataatacatgtaaagcatataattcataatacataggatacaaatcaaatatatgagctttattttgatataatcagactttattctgttacctatttgcctttctttttcaaacttttaagcgttgcccttattttcataagacttagtgtttcactcagtattaaatttatccaaagtcattgtgattttatgaaacattgtgattttaagtgctgaaccatgttgtttttcaatgtaaaatgagtgtaacttttagtaattattgaaatttaagcgttactgtgattttccataattctatttcggtagtcacaaaaaaacaaaaatttggcttcttattggcccttctagtgccaacactggcattgttgaaatacatttctaaggaagatggtgagtgtttcacttcattagtagctgcatgacaagccaccccaaagtttaatggcttaaaacaacagtaattcattatttctcataattttgagagttgactgagtgagtcttctgctttgtgtggtcttggctggggtgctaggaaagagggcagtccacagtggcctcacttacatagctggcagtggatgcaggctgctggcgtggagcacagttgggggtggcctgggtgcctcagctctccttaagtgtgcctctctgtgaagttagttgggcttgcttacaacatggtagctggattccaaaaagaaatgttccaagggcaaagaagctgcagccttttaaagggccatatttagaagttacttagcattacttctgcccattctgttgatcaaaacaagtcacaaggccagcccagatcaacaggaagagaaataggcttcatttgttaaagatggagtagcaagattacactgtagaagagcaaatggtttgggatgtattgttgcagccatctatggaaatgcaaactaccacaaggaagtgcagtttttgctgagcatgggtatttgccattaccacatttcagaaactggtatagtcaagcacacatggatttgaccactggatttacactagggtcacttaagagctatcagccactgtcttctcatctgtatgacagtagtagtatcaacctcacaggattgacagttaagtgagataatttggaagtacacagcgtagtgctggaaattccattactcccatcctgtttcttttcccatgtccctcatgtttaatttttatatttgtgattataatacttaaaggtatgttttaaagataaatcataattcatctaaagtctttgtcttaccaagatagttcaatagttccaatctgaataaagtttataacattaacataatttatagatcttctaatacaagcatctgtctaatgctagaattctttataaaccactgtatataggctactcacaatgtaatgagctactaattggtagaaacaagtggctatttgccatagttctacattctgttctaccttctattttgcagaaaaatcttacagctttcctaagccatctttttaggtcaattccagaatttgtttatgatcaaattgacaagtacctagccaaagagattaagatactgaatcagagaaagaagtctaaagagataattttccaatgatcatttctaaagaaggaatagagataaaatattttaaaacaggtactgaatagtcacagtcaaaggtttgattatgagtcagctttgttggttttagtctcattagtcaccagcaccaccaacctgtcatattggcaatacatagttttggtcaccaggagaaggagtcacagaaaaccagtactactacttacagaagattaactgaaagcacatgtcctgatttgttcttgaagataagactgaggtgaatattgcttaaaacagtatcagcaaaatacaaaatcaagtgaaatattacattgaatataataattgaaagaatgaggatagacacaaagaacttttggatgctagtgattagatattagaattagtttctcagaatattttaaagaatttaacaaatgacagtgttatgaattatgtgggcagtgcttaaagtgggaacagagcaaaagaagtggatttagttttgtcaagtctgtctgttcagcgttagggggaacattttatttcttctgaaacaatgatattggaatcccatttcatcttttcattttcaaacactgactttataagtgactttgggagaagcttttaagttttatataaagcactttttttgtacttagcacaaagtgggcacctttaaaattacctgtttgtatagcagttaatttaaagaatatgttcatgcatattactatattttctcgattctaaaagctcatcaattgtaaggcacattctttgatttcataacaactttttaatgtctctttttggaaaaataaaacacttttcttgggggaggaggagaatttttctaaggattattctgaattcctttgggccataggcactgtagcaaatgctgctcttcctgatctttaacacttttaggattgatagtgtcgttctgagccatgtccaggaattactttggcgaggtttccatttcctatttaattaaaatttttttactaattatattacatttcactagaagttaaataacttctcttgaaagtcatccagaagactttaacagccagatatttggtatctgctcagaattatcacttgtgaaaccttcattaaacataattcagccacatgtcacagaaagttctgcatgtataataactttttgtttcaatgctgcattatagtgatctttaaaagacattttaagaggtaatttagggatttcaaattaagttaaaatttagctgtgcatagttctgttgatgctgataagtgaacagaaggtaaattcttagtcatgtctaagttcacacagagatacaataatacacgtgggtgtaatacaaagcattatagtattttgtatagtatctcctttgttattaaaagttcttttgatatctttggtaagactcctattgatttgaaaaatgttactgtgaaaaaaatgtgctttaagagttgagaaagtaaattattcctttttttctctcagcagctgtttaaggaagacagagcaggcattggataatattcttattaaggtaaagaatctgggtgtttgagccctaaagtcatacagcaagtagtccacctggaatcatgaaccaggtcttcaggacttccagatatttgtgctgtatactatgctgcattttcaacaataattcatttatctgtgggtttgatttaatgagactcatttattcaacaaatatttattaaatgctattcttgccagtcattgtgttaaatgatagtgtaacacagtaaacaagacagatatctttccatgtcctcacgaaaccagcagctttggaactaaacaaataattataactaagatgagcattaagggagaaattgtaagatgataggaaagaatataacaggcggacttaacctgctctgggatggtgggggagtgttgaatgtgaactgagggtaggacatgagaaataacttttgggctgagattggaagaatcagcatgagttagcttaagcctaggaattaggagaagggttaggatggaacattgcaggcaacagaaatagcatctacaaaagtaaaaggaagaactgaaaagattccagtgtgagcgttgaaaagaaggataagtaaatgtagagaagaatgtaggaaagagattatgcattcttcaggattttttgacctatatcctaagggatattgggaaaccatggaaaggttttaagcatcggggtatgccatgattaaatttttcatttgaaaatcatgagtctgactatagtatatatagaagcattgttgttagatgctatttcggtaggccaggttggagatgatggttacagcagtggagctggagagaagggaatagatttgaaatttgggatgtgaacaaagccttgtatttgacagaaatgtaaaactattaatagtattgttattgttccacctatagaatctgattataagattatctctaaaatactttcaggtaacttgtacttaatgttaggaggaagtgactatattataaatataatttagaaaacatcgttccttaaaaaataatttttgaattgtgctaattcttgttattgtttgacttcattaactaatatagggagtatagggagaacttagttttaaaagataatttgacttcctgatttatacataaaacacataagtaattttggacatatatgatgtgtatatatatatatatatagtgcaggtcatcttgtttacaccacttattaatgaatatcagatttggaaggtgactctttaggattttcctattggttgattgattgaaacttacatgaagaatttaacccttttgtttcaaatagctttctattaagaaacacttttttcatgattattcagagaatttattgctggatcattggctctagagatagactgctggttaaattaaaagatgccggaggaaacattttggaaacagacttcacagaattccttatgaacttctgtactttcttaaccaatcttatttctttcatgtacctatggctgttactagcctgttgtatcagggataccatagtcaactacctatacgggccttaactataaagaattaggccatttagggaaataataatgagactggggctttagagaatttgtgctcatctaactgagtagagggacagctaatattctgctccatctgatggtgatcatgggagtattcaggctgattgttacccaatatttcagtttttccaaaggatcctaaaatacagatttttatgtaaattagttggtaattaatttaggtgtttttaagatactctgtgacaataactctacagggcaaaatcgacctgttaaatatatttggcccataggctgttgttttatagccttgaccatatagaaatcttcaatatctatttaaaagtaagaggtcaaaagtatttctaggaaaagtgaatgccaaaagaagggaggaagggaaggcataaatgagatactttttaaaagaagtacaaaactagttatctaggttatatttttaaactaagttcaaaaagaaattcactgtcctgagaataattttcatatgcttcagaacatacttctagcaacttcagccatctgcgtgtgtataactgggaactcagagtaggatgagaatgcacagggcgtagagaaccaatgaactgtagatgagagtgtagtggttctctgaaactgttgtgagcagagtacagcaggaacaagagacagttgatattggagcaaaatcaggctataagaacatagcgatctgagtacatcatgggcccctgaaagcattactagactaaaagcataattttttatactgatgatcaagaagaggtcatattggtacactaagattgaataactctgctcccaatagcacatgtaatacacaatcactgtaggaaatcaggaaaatatacaaaaagtagcatatggtttttttttaaagctaggaatgggtaaaattctaaagttttctaaaagtaatgaaaatagaacttggcaattgttagtttcctaatagctaattagtttccaaattagtctaatttggcttaaataaaaagaatattggttagctcacataagaaaatacatatattaggattagttacgccagtggctcagtgatttttttcaaggactcagtttgtcgtctactctactctttatccataatatttcctttatcccaacactgtagttgccaaatggctgctggctgcaatcaggattgtgtgtttcctccttcagatccaaagagagaaataaacttctcttggcgttctcatgggcaatataggttcttttctctgagaagtccttatgcactcctgcccccaacttgctccttattgtcctaaattagcttaattctaaatatgccttaactaatcgttggcaaaagggatgagcttaccataatggattagattaattgtggtctacccttgcagctcaggacagtcagcttaccctgaggcgcattgaccactgggagagatgtggatatagaaatccaatcatggatcattaggaagaaggaagcgttggataggctctcagcatggtccaccacagttgcattaaggattgtgtattacgttttttacttatgtgaaacaccaccttcccccatcaagcctgtaagtatgaagtcgagtccctagtgaatctactctctgactcctgtgtttcaagcaccctcattagcagagcttatatagttcggagttgaagaatttttttttcccaaaaattctcttctcatttaatagacacctgtctgtagagtaaactatgcaggccataaatggaacaaagatagtttaggaaaatacagtttcttaaataaattacttttaaaaagtatattttctctcagctcttctctccaaaggagttttgtatcataacctctgtagtaaatagtgtcatctttattgtctgattataaaggtgaagtataatttatgggataatttacaaagcaaaaaagaaatacttatttttaaagtttaaaaattttctgtgtagaaaatactataataatgcatgattttaagaatctgttattttggctaaaatatttaaccagccaaccatatatcttatttctttcagttgctagatttctgaatgttagccaaatattttagtatctgggtcacatagtcattacaaacaaatgtaggccaaaatggtttatgcttctcagttgccagctcagttctctctttgactttttattatttgtttctctttgaactaaactttatttacttatattagcacagtactgtgttaattctttgtgtagaactggtcttcttgtgtcgttttgccccaaatcaaggtaacaaacaaataaatgactgtgctcttggctgttatttagaattgttactatacaaaaggtcacacatgttaaattacctactgcagtgctaattattgtgaaaccttgttcaaaatgctagagagactgtgttttggcacttctgctgtaacagtttttaaagatccaacctgtatgcattttggtattgaaatcctcaaaactcctaaagaccctatgttaatttaaaatgcaaagttgtctcacctttttatactagatgagatagcatttttcttaaagtaaaatgagaactcttatgtgttatgatatagaggtaagggcagggaaagagagggaaagaagaaaggagtacattggagtaacaaaaattccaccttcatttataaagtgctataggctctaaaactccattctgaaatactcttttaactttgaaaggggtatgtttactgccagcttctgttaacacaggaaccatggtttttctgttcttaaaattaagaaccttataccttttggaatttttaatatttttctctatgtttgtaatgcttttaattatgtttattactaactgatgttattaactatatttataatttgtacactctattctgtttggaaagtacaaaatgataccatagatacttcctgaatttttttagaaaaatcaaaattttattcatctttattcatagcatcattggacattcagttagtaaattttccagataacaaacacctatcttctttgattgctagaatagttaatctcaacccctcttgttataaaatatagtgactgtggattgttgatgaaaatttcttaagacagtgtattcaggaagacactgcctcagggctactgaggtatgtcatagggccatttgtcctttcaaaaataattctcagtagctattgttgctttgcatttgtataaagtgtctgttttttcaaagcttgatattaattctgatagctactagtgtacagagaagggtgtctgtgaataaagtaagagaaagaatgttcataatagatttgaagagcacttcaatgagtaaagtacttggactttacaatgtttgcttttacttcactaagtcctgccctgtgcccctgctcctgcccctttatgccatagtctcttttttaacatggtacttggcagtgttccaggtagttattgtaagaaggatgagcttagacttggagctagacaaacatgatgggaattaaaacaggataatttaatagctgtgagaccttaagcaagttcacaactgcaaaatgggtttgtatatactatctctcacggttgtaaggattaaatataatggatatagtttaggaggtattttaacaaatgctagttcctttccttatactttaagataaatgacccacttactttggaaatggtatttgcctattttagtatgatgctataaggtttaaagggtcagtatccctaaaatatgacagctgttaagatctctttaattattcagaaatgaatggtatgtgacaagatattattggttaattcagtggatcagatgaataaaatgtgctgaaatattttggagactgaaaatataaatttagatgcaagaaatatattttaaataaacatggaaaacagtttttttatccgagtctaatcacgttgaaatattttatgaatatccccagagagttcgtaaattagtgagtgatttttttaaatgcaaaggtaaatacctagaaatcatatatacacttaaagtaaaatctcacagagttctcaaggccattttgcatttactagtgccacagtagtggcgttacagtgagctgcagtaacctgaaacagtactgcatggatgctctaataaattgcatgtctggaggaagcagctaactatggcgaccgccacggagcagtgggttctggtggagatggtacaggcgctttacaaggctcctgcttaccatcttattttggaagggattctgatactctggataatcagacttcttttctctaagacttacaaattacaagaacgatctgatcttacagtcaaggaaaaagaagaactgattgaagagtggcaaccagaacctcttgttcctcctgtcccaaaagaccatcctgctctcaactacaacatcgtttcaggacgcagtcttgctctgtcaccaggctggagtgcagtggtgcgatctcggctcactgcaacctccacttcccgggttcaagccattctcctgcctcagcctcctgagtagctgggactacaggcacaagccaccatgcccgcctaatttttgtattttcagtagagacggagtttcaccatgttggccagaatgatcttgatctcctttttttaaattaaaaagtaaactttaatgtcgaaaatgcaaacctggggagggcagaaagatcacacacaaggctgtcacttcacacttggaaggttgcacagcagccaggcagagaccctcctcacttcccagatggtgagggggccgggtgggggcactcctcacttcccagacggtgcaggggctgggcagaggcactcctcccttacaaatggtgagggggctgggcagaggtgctcctcactttccagacagggcggcggctgggcaggggcgctcctcacttcccagatgggacggtggccgggcagaggcgctcctcatttcccagacggtgaggaggccaggcagaggcactcctcacttcacagacaggacggcagcagggcagaggcgctcctcatttcccagacggtgaggaggccgggcagaggcactcctcgcttcgcagacgggacggcggcaaggcaggggcactcctcatttcccagacggtgaggaggccgggcagaggcactcctcgcttcgcagacgggacggcggcagggcagaggcgctcctcatttcccagacggtgaggaggctgggcagaggcactcctcgcttcgcagacggggcggcggcggggcagaggcgctcctcatttcccacacggtgaggaggccgggcaggggcactccttacttcgcagacaggacggcggcggggcagaggcgctccttgtttcccagatggggcggcggctgggcagaggcgcttctcacttcccatactgtgaggcagctgggcagaggtgctcctcacttcccagatggggtggaggccaggcagaggcggcgctcctcctcaattcccagatagtgggcggctgggcagaggcgcgcctcacttcccggacggggcggtggccgagcagaggcgctcctcacttcccagagtgtaggggggccgggcagaggcactcctcgcttcccagagtgtaggggggccgggcagaggcactcctcgcttcgcagacgggacggtggctgggcagaggcgctcctcacttcccagacagggcggcggcctggcggaggcactcctcactgcccagacggggcagggcctgggcagaggcgctcctcacttcccagactgtgaggctgctgggcagaggctcttgtcgcttcccagacagggcgggggccgggcagaggcgctcctcactgcccagatggtgcggtggccgggcacaggcgctcctcacttcccagatggtggagcagcagggcagaggcgctcctcacttcccagatggtgcaggcagagatgctcctcaggtctcaatctcttgatctcctgatccgcccgcctgggcctcccaaagtgctggattacaggcatgagccaccacgcctgccctgccgtgtcttctttctcctcctaagcaactgtcttagtctcctgaattttgatattctacttaacactctcatgttcttacgcatgttgccatgctggaggcgtccttctctttgggaagcctgacccaccaacagtgcctcaggagatagacatggaagctttgccggtgggggccgctcgtctctatcacacctcagttgcaggggaggggtcggttgcagctgcagcggtggccccgacagttttcttttgtgggacctgtggccggcagctctgggtggagaagacctacttgatccaagagctgcaggatccttgggctgcatgtcctcccccaccatcagcaagcctggagagctgggcaggtggtcttcacccagcaccttcaaggccgccttctctggccacagggagcagcccggaactggggcagggagcactgttggaagtgggtcaggcttcccaaagggaaggatgcctccagcagggctgtgtgaactggcgactccatggcccttggagtagaaactcactgcatgcacctgggccttgtcagtctgattcttttctgtcaagctcttgaggtggacatttccctccaagggcctgggattgtaccaggaagaagtgaggtttccctgagtctccaggggcctagaggtggaggctgcttccccattgctacaggggccccttttattgtcctcctgcccctgggtctctacctggtctttcacctctgttgcttctttgggctcttctgcgctcacctccgtcttcgggagcctggctgggatcacctgatcatctaatgaaggaagttgaaggttaaacttgcctctgagacaagggatccttacggggctgaggtgtccaaacattatggagttgtgaggagacagcacgggtttcttccttgagggggggctccagaccacaggacgcaggaccctctgtggggtgcccgtgttccgagggataagacacagcctcataggggcgccgtcccacctgactggaaaagaaggcccaagatgtcgctgacggttgaagaggagtgggaaacggcccacaattccccgggcaggcacaggtgcaggagctgcagggtgagcccggccagctgggaaggcctcacggacaagacgagcaggttgccgatggcatggccaggacctgcggcagaaccaggaacaaaatacgcttagcgagttgcccattttgagtgagttgtgcacagacgaaactaagggtcagaagcggagaggatactcctaagtcacccacttctctgtggctgggtgcacactgggcatctgggagtttatgacatcactatggggctggtgacagagccagtgtgtggaggagtgcttaggagcccagcgagggtgcctacaagaggagtcaaagggcaaagggtgagacccttccaccggtccagctggactctagcctcagggatatcctgctcctgggggcaagtgtgtggccctggatgggcccccctgtggggctgttgggggtgcgaggctgatccgccagagcccttccacctggcgcctggcccaggtgctggctagcacccagtggccctgttttggccggccctgtcccccaggttacagggccagaacctggaagcagagcgcaggaccagccagatcgcgccaggcttccccggggcctctccagtgcctctgtgccacctggagccaggcccgccttctccatggctgccgtggcctcaagggccaccagccttgctccgcaggtttccaaagagaggacgcagtgccctgacctgactggatgcacctcttaccacatgcctccctggcaggcagggtctccactttttacaaatttgcctgagaccattcctcaggtcattcaggtggtcatggcccagccaggctttgaacccaggctgtgcgattccacagctggcgctctggcctgtgtgcctcatgatcatggatacagcatctattcttattttttcatgtagtcctggggtacttagcaccgtggcatatctgtaataagcacatgcacacctcgaaggaggtcttcacttcaacatacgagttgaccatggcatgctctgggctccagtcctctacaaagacgtagggcaggaactaccagttgtcagcacagcaccatcccacattgctcttctaatggagcctttcaccccagatgttctttctcgtctgatgggaaggatccaagtatgtaaagattatgttatagatcagctttggtctgtcctaaaagaaatttgccagtggattattccatatggataaaagtcagtttctctggtcttcctggaatgtgtctagaaagcaaatagattatttacaagttcatagtagatcaatgtattggattaaaatatgacaaacataatttggtcattgtgagcatgccagcttggtcaactattcaccacacatgatgccctaaatataactctaggttttcttatgcccaagagagggacatactcttgggtgtctggactagggaaacatgtatgaaaaaccatttggccactctacatcttgttattggagaattgaaaccatctatattcaaagatattattaaaaggcaagaagttaaaaaataaaaaaataaattgcatgtctgttgttatggaattttataactgtacataccttttatttaatccattcacaggtcatattataggatatctttcatttaataagtatactaaatccataccttatactgttgagttttgatagtaccagagggaaaaaagaagaaaagcatggcctctatctttaaggagctatttaacagtcatatgaatcactcgattgagaagatccatatgtgtaatataatgaattccacaaaaattgcttattaaaattttttgaaaaagtaggggtgagattgaatatagcaaagctttattgttgatttttgttgttggccaggccaaatttgtgaacattttacatgatcagctatatcgaaatacatttgtatgctctactgaatatagggaacataatttaatatttaatttaaactccaggttaccatcatttacaggcattctgtgcattaaaccgttttgcctcttctttcttcctcagtaacacgtttagggccttttgatgcattggaaagaaaaggcagttgcgagctgctggctctagcaaatcagagctaatcaacctgagaataatgtttgcactttcccgctttcaagtctttgctcaaactgctctctacctttgctcccacaggttagtcctttcccccaatctaaaatctctctgactagccctgaacttactttttatagctctcactgtctaccatctccttcatcttgaatataccaggacagactgggaagttccagaaaaaaacagacataatacttaaatcatctttgatacctaatttgtcctcactgccaattaattaattttgttttgttttatttaattttgtaaagacagggtcttgctgtgtcacgcaggctcctctcaaactcctggactcaagtgatcctcccacctcagcctctcaaagtgctaggattagaagccgtgagccactgcgcctggccataatttaaataatcctttagattcctgtctctgtccattttcaaagccagggttacactatcataacataccccatgatgtacaccattgctaaaacaatcttcctgaagtactaattagatttttgagcagagaataaaaccatcctttccagtgttggcaaatattcaacgtactgtcctgaaatacctgtagtacttccaagtttctgctttgtgctcacactgttttctttgacctgaaatgcaatttctatctataaaaatcttagtcattatgaggtctagcaaagatctttttcttctatgaagccttcctatcgaccctaactaaaatctcttctctgagttcccagcgtatactgcttgagctggagcaagactccagtgatccttggaagaaagtgggaggttattttcccagtgcgattccaggaaagtttaatgtcttatagttcagtcccctttagcattccacatacagttagtgctcaaatatttgataattgctctactcacaaatatttttgtgtgaaattgctagctattctctatccaagaagtaatgaagtatataagcttcttcaactctttgttgagcccgggacctcttacttatttctgtatcctatctactcttgagtagtagggtcattggaaagcaaccactgggtttggggataagttgtgtgtattttagaggaggaagtaaaggtgttactggacttttaaaactgaagctttttctgttttaaagtattttgcttcccgttactgtatttataagatgatactggtatacgtagtgtcttggctatttatctattcccctttctctttaacacaatattccccaactttggtgtgatactgaattgaaatctctgggagtgtggcctaggactctacacttttactaacaatcagttgagatgcttatgaaggtggtggtagtagtgataatggtagtgatgatgatgatgattgtattagctctgctttcgaaggcttatgatgtacttactgcacttttctaggcagtttgcaactattaacctaatgttcacagcaagcctatgtggtaatacgctattatcttcattatacaaatggagaaactgtggcagatataaattaagtaacttgtcgccaaaatgactttcttataaataggtcaagaatccatgaaaaggatgaggcatatttttttggttgatagtttttaaactcactttctaaaggattgctttaagtgatgtgaatgatatgaatgtaaactggttcttatataaattgaagtatcaatatgctgactctatataggaatacttcaacaactagacctaaatatagatacttgctcttgcttttaggaagcctgtcacaattcttggtgaaaaagtaagcatgcacccaaaaacgtagaacattgaggaaaatttttaaataattacactttctaaaatacatgattttaggaagagtgctttattatatactatatatatatatatacacacacacatagacatacacacgtagatgcatatatatttactctatatggatgtgtgtctatatgtatagtcattcttcagtatcctcaggtggttggtgccaggacaccctcagataccaaaatccaaatactgtcccacagtatttgcatgtaagctatgcatatcctctcatgtactttatttatttatttatttattgagacatggtcttgctctgtcgcgcaggcttgagtgcgctggtacaatcatggcttactgcagcctcgacctcctgggctcaatcgatccccccacttcagcctcccaagttagctgggaccacaggcacgcaccaccatgcccagctaacttttgaacttttttgtagagatagagtttcattgtgtcgcccaggctggtcttaaactcctgggctcaagcgatcctcccaccttgacctctcaaagtgttgggattacaggcataagccactgcacccacccatcctcttgtatacgttaaatcatctctagcttacttataatacctaatacaatacaaatgctgtgtaaatagctattatattgatttttatttgtattattttttattgttttgttgttttttaaatttttttcctgaatattatgtgtgtgtgtattgagatgttactttgtgatttaatgtaattcaagtaaaactcgttaagcatttattttctgttttagtagcataagataaatttggttttatatgctaaaatattttatctttttaataataaatgataagaatattttgttcccttttagttcatagactatgggaagtggagtagggagtgaaagtggtggctgtggtggtggtatggtggaagtaatttgtttaccatcactgcctgtccaaaataattttgatgaatgattttaggtgttgcctaataagtgctctgacttttgaaaccagttgaactaacaagcatgttgtgctttgctagaaacatcttgtaagttctgactttgaacagacagtggaatctaaattgagttagtggaggacatatctttacaactaaatctaaagtgtttcaactatttctttttttaatctcctgtttatttttcttgtagaattaatatttttgattgaccaatcataattgcatacatttatggggtacaatgtgatgttttgatatatgtatacagtgtgatgtgcttatgctaattaacatatctgtcacctcacctataatatttcatattgagacatttgaaatttgcttttattattttgaaatacttaaaacgttattattgactctcgtcaacttgctacggaatagatctcaaacttattcttcctctctacctgaaacttcataccccttgatcaactccccccaccaccctcctaccctagcctctggtaaccattgttctattctctacttctatgaatttaatcttattagattccacatgcaagtgagatcatatggtatttgtttttctctgcctgacttatttcacttagcataatatcctccagattcatccatgttgttgcaaatgacagaattttcccctttttaaatgctgaatagtattccattgtctgtatataccacatttccttgattcatccattgatagacacttaggtgtttccgtatcctggctattgtaaataatgcaacaatgaacataggagtgcagatatccctttgacatactgactccagttcctttggctatataaccagaagtgggatcactagatcatacagtagttctatttttagtttttttgggggaaacttccatactatttaccataatggctgaactaatttgcattcccaccaacaatgtactgtataagagttatcatttctccacacactgtccaacatttacctttcatctttttgataaaagctactctaacaggtgtaaagtaataatgcattgtggttttaatttgtaattctctagtaattagtgatgccgagcattttttcttgtactagttggccatttgtgtgtcttctgagaaatgcctgtttaggttctttgcccatttttaaaaattgggttatttgttgttttgttattgagatgttggagttacttaaatattttagatattaaccccttattaaatgtatgatttgcagatatttctttttatatttcctgtttacaaatttcctgaacttctctggctgctcatttatatagaattgggatgagttatgtcacctgaagcagtcaagataagactgtttctactgatatccatatggcaggcttactttgttacccaatccaatgaaaaagggtgccaggatgtgaaagaaaaatagatgtgatggccgggcgcagtggttcacgcctgtaatcccagcactttgggaggccaagtcaggtggatcacgaggtcaggagatcgaaaaatagatgtgatgccatggaacattctagggaattaccatttttagagagagttttgataaaaattttacgtatttttaaaactcatattcttagtctgaagagttggaaataaggttgaatgtatgtcttaaagctaatagtataaaaagagaagtgtaaaatttaagttaatcatacaactttctttccctaactttatgaattgactttttgcaatttccggagctaatgaggtgaatgtctgaaattgagtatgtaggttaaaaagttgaaattttcctaataaaattgtatctctttctaaggtgtaactctttctttctttgattatagtaaaaggagcatctgtggttcttaagaggtcttgatttttctgccagctagttgtgtgactttgggtaaataatgtcatatgactggacctgtttctttatttgtaaaattgtgtgtggtgttaaattctaagactgtttttaaaaaaatttttgcggagactgggtgttgctttgttgccaaggctggtctgaactcctggtttcaagcagtcttccccaccttgacctcacaaactgctgggattacaggcgtgagcctccatgcctggccaaattgtaagactcttataatggatgagtagaatatatttaagattatataaaaacacaagtcacttcatgatcatcgtctgctggaacatgaaaccagctttcttgtgtagatgtgttatcagtaatgttattcacaccgagaggatcattctgtggtttttaattcatgattttgtaatctgatagtgacttttcattatgtctcctgatttataattacatcacagccattatgattggaatcattgggaagagttgaaatgagcaatttagaattgtttctgaaatacagaaagccttattttttggtgggggttgttggaggagatatctctgtgttctgtaatttcatttgactaaggaatttatctttggtcttctcccagagtgaggacatgaatacttccatagctatattccgtattaatcacagtttgctttgtgggtttcattaggctaaataagaaaaacgtcgttatgtattttctgctttaaaaaatgcttcttgatataaagtcttctcagatcagtcccacatgtgataaatctattcaaactattaaactgcctcaatgtgcttgtttctctcttggaaatctatccatttctgtgtctttatgtaccactcactctcccccatcatattttaggttataagctcctttcctttatatctcatagcacccaggaaagaactttgttagtctctgaatagtttataagtgttattgctattgagaattttggatttaaattattggaatgaatagaataatgctatttctagtatatctaactgagggtcagtgttattaactcaaagacatagcagttttattaagctctaggctttgtttctgaagtcagtttctcttaatcataagtggattattcactttatattctcttatataatgccttggtatcaggttattgataggtaaacatcagaaataggctggatagatatgcatgcatgtgtacacatgcacatgtatgtgagagagagagagaaggattgcacatagaatatatgagaatttgaggtgtgtgtaatgtttataactcatctgagtcttacatagctatctagttatgtacacttaattttgcaccttttatagttgaaattcagaaacattttttaaggaaaataaggacgtgtttttctttccttcatgttttcagtttagctttatttgattgtatttttgctaaagacttaaattgtcaataactattgaaatgggccaacttatagctgagcacaaagtatgttaggacactgagatatatcttaacatttgggaataatttaatgtgtctaatacttgagaaggatcaaaacagactgtacaacccaataatcataaagcctatggtcaaaaatcgtatataaatgacaggccctatgaagagtagccgtaagaatcaagagaaaaagaacctaaattggtacagaaaaggagctgagtcatttttatattataattagaagttggtaacgataaattttgtcttcccagtacaaaaagtatcatgatcaggcaggattacgctaaagtgtaacctctaacttcttgtggtatgtactattacaagtagttgatgatttaataaatataaatatagatgatactgtcagagtgtttccagacattacagttagcttttaggtgaaggcagtgcttgacagaacctaagtttgtgactcaataatttattatataatctaataccatttttatcttgtattaatttgggttataggataattggggtaactttttggtgagggattgaaattttcttaaaagcgttttcagaagatactagaattttatgggattcttttattatagcatgtcttctcaaatataatattaggactgcttgaacaggaggcaaatcatattcacgttattttccagtttagagttattgctcttatcagttggtgggtgtgggaacaacttaataaagtttgggtaatttagttttcagtttaaattctcaactggcaattggccgaaaactcccatctgaagacatgatcatccaaatgtcattttgtgatttggctactgtctgcttgacataggaaagcactatcaagaaagactaatggagtgactatcaaaaggaagtcaatggtaagagttttcatttaaattgtgtgtgtgtgtgtgtgtgtgtgtaaagcctaccaatgtattatatttgaattaaaattttagaacttttaaaatctaggacataatgacaagtgtttgaattttatatgtctgtcacttatattttaataaaatatatgcaaagaatggttttatagataagagattttacatacttaatgttgataaatagtataaaagtatggaaaatcaattatatagttcatgtctggtttaaaaattcaatttttgtagttttattgtagttatttaaaatagtatattataaaattgcttgactgaagtttaacttctaaaaaatttgtactaaactgagtttttctgttcagtttcataagtgcttcttaaaatagacatgcattttgtggtagtctgttgaatgctgtttggttttttactttcattataaaataggaaagaaaaaagtataatatcatatgacaaaatccatttagtttaacattagttctttaaaaatgtataattgctactatactttggcggaaactattaaatttgtaagataagacgtttatactctatacccaaaacaaagtgaagtagctgttcataatatggcgcagaatcaaattttggtgataaaatcagacatctctctcctgccttacacatactcccactgagaaaataatttctaaatttggttacattttcatatacttcagatgaccttaaatttatatttttctcctgaatatatttgattcctgcatatccctttttttgggcatctgtgtccaatcagatccatgattagtcatgttagctttggacaagagtggaggtaggatcttagcaagtttgaaatctttaagattgatgtttatctgagattattccagcatgtccacggacatagtagttttgtgataacaaggtaatggctgatgaagattagcatattaataatagattataattctgttaaccattctattgtcaaatacgtgatttttgcgattcacatagtttaagtaatttttcatgcccaattagagatgtcaaaattatgttaattgaatctggccatgttcttagctgttttctagagcttaataacaaacatatcaggaagagctcttgtgacaagcacccagcacagcatctgtcattatgtaatcattccaatgtttacagtgaactaagtacttgagatggcaacattcatactttagtccctctgtctagtaattcatacttgtatagtctgtctactatgtgtcacccatttaggtaggtgctgagaataaaatggtggggttaaaaacagatattccctgttattgaacttccagtgccaatggtaattacagtgtagataataattacacactgcaactggaaccaatactataaaatggcataagttcctataagggtaggaacaataaagttagtgtataaataaagcacagaacctacacatttatttattagattgaattgataacttgcttttgaacttttaaagttaattctattaatatctgctaagctaggcatcagaaagactaaattctaaccatagagaaatacattttttatgctgctattctattttcttagatttcttaagaatttacaacaaaaccctgtcaaagcagcattcttacgtgagaatttcacttacgggagagttcttacaggatttcaagaaggaaagccctgaagagggacactgatttcctcaactgaatttaaaattgttacatgcagacatttttaaaggtagtatgattttccttaatcaagtcaactttatatctttttatctttttaaagaagggaatgtgacatttatgtttttcatacacacacacacacacacacacacacacacacacacacacacacagagaagcatacatgttgattacgttttggaaaataaaatccaaagagcatttggatgtctgaatgtttatgcttcatctccgcagtgacttctaaatttagtttttttctggatatactcaaagtcaccaacctgagttcaagtattctgatttgaagatctcaacttagagatccaggcagtcccccttgtcagtgctaggagaaagatgtccttcccataccttccagaaagagtgtcttgaagaaatatattccttcctgggtaacgtgctttggaatgtacatgatattcatttttctttgacagctctttttggttctgtttagttggctttgatgggttcatgatgcccagtggagaatttggtatttagccacaaaaagatatttaagacacataattatgtaaatattgcagatggaggatgatacatagcatttcttttatcaaaatgaatttgaattgacttctttctaaaacaaaattctaccaatagtcatcagtttttaattatataacttctcaatataggaaataatcagtgtctgattggctgtgtatgttggagtgtaatggcttttgttttgaatttggcagtttctactctcagaagaaatgagttgcgaattacagtggtgttagaagaaatgaattggaagttcgaatgagaaaaatttaaataaaagttattgtttatagatatggaaaggaaaataatgtttttagttcaatatgagaaagaaccttttaaatgtagaaataaaatggggtgcctttctacatccattcttaagaatttggcagaagttatgaagaagttaaaaagaaggagttcctgctgatataagtcacgaggattatttgaaggaaatttatgtcacatctcgtaaaatcatcatattgacaattataaatatgtaaaactttatgtgcaatagttattactaaaaatactgagctactatttatagtgagatcattattaaataaatttaacagatagaatagcaaatcacatttattcattcagtatattcttaccaacaacctgctgtatgtcagtcattgcataagactgatgtgatgccataggtcttgcagggaatgtagacattaagcaagtaattacaataaagtatagtggcttatgatattataaaaacaaagcagtccttaagtataccttgcaattgatctgtagtatattaattttaatccgctcatactcctcatgaaatgaggttgttcattttgatgtaaaaattagactgacgttctttgcagttagtagagactgaaaaagttcttattatttgtataacttatttaaaatgagaaactgctgtggaaagatctgcaggtttctgagataccaagaaacgtgaatatgagcagaataaacacatgcatattatatacattataaacgtcatttaagacaattatatgaagcagttttacatttaaaactaccaagttgtaatagttaagaagttgggctccagagtcatactggttgggtgtgagtattaactctgacacttaccagctttgcagtcttaggaaacctgcataactctactgtgcttcagtttccttacctgtaaaatggggataataagagtatatatcttgtggaaaaatatattatttgatatatgaaaatgctagaagagtatctagcatatggaaagtgcatagaaagggctccatatgttgttttagttaataattacaataataatttcctcatcttaaaaatatcctgcttcattcataaagttgtgccaacggaaataattgcagatgatgcttaaaatacatacaatatatatttcagagtggtatgtaaagagcttttattattactgctaaacaaaaaaaaagtccgtgaaattctcatctaagctttggggcctctttagctgaatttcagcagtcactcaaaggctttctagagatgccatctagagatactttataacctagtgtctttttttttttttttttgcaatacagaatttttttttcattgtaagatgctgaatgagagaaaattatttcagtactacaagtatggtttcccatgaccacaattagttctaatgtaaccagtcaacagttgtctattgaaaaccactagctattaatatagtatcatggtagcctaaaagaattatgctatccttctacttaggctctagggagacaagagccatgtaaagaatacttaaagcacaaaatgtgagactgctctgccactagttcctgctctgccactaataaacagaggtatcttagatatatgaacctgttacaattatgaggccatcttagcatctcagtacccttattatatatatcgtgtgtatacacacatggccatccaatatttctttcccaaattgaaatgagaggaattcattaaggtggttttaatttccaaatttactgagtaaaagaattctattctaaaaattattttgtataatgcccttcaaattgagttttacatgtactatttcaaggcttctcagatattcccacataaattatctagtgtttctgcatcactttgcgatcttttcattaatgtcaagtgtaatgttttttaacttcacaagggaaacatgaaattcctttagtgtgcctcattttcagacattttcttgttgattaaaattcctttttaaataaagtttcaacatgtactaaataatttgtttacctttgaattaactttttataaatgaattttaaataatgacagcagtcattacaaactctgctgttggcaacactagagggcatttctagttcttcagacagtgtcatgagttctcagaataatttaccaattcattaaacagcagattagcattttaagggaaaggaactaaaacaagcacaatacatatatcatacatatatatagtatgtatatattatgcatagacagataatataaatatccatatataatatatacattatataatatatggataatacatatatattggatgtatgtatactcacgtctgctttaccaaatgttctcactgaatcactactcctaaaaaggcgggagagtatttgtgatctgctcactgaagcaccactatattatccagttgtttattagtgtcgtggaggtctatgctctgataggtttagcatcaagtgaacattgagtaaaaaagtatatgtatatactcatacatacatactcatcagaagttagttgctgtgcttattgaactactagatgctaacatagtcataattagaataatttttcagataaaaaatgagagttaaaatagatgccctttataggcttagtagaagatttaagactacctatattttgaattactgtattttagatgttaaaatattttcaagggttttgaatgcaaacatttttagggaaaagatacaattatgtaatattaaatatataatattaaatattaacatgcaatgatatgaaagaagacaagtttataagaaaattcaattagcgtaaagaaaaacttttttttcttgggaggatttgcttactgcggtgtattggggaaaaaatcttatatatcattaagtaatcattaacacggtaaaagtaaagtcaaggaccagcaaaaaataacctaattgttgtgaaaataaggtgacaaacagacaatcccatcttacactgtaacatactttgtataagaggggatacatgataaccactagaacagtggtggatgtgcaggtggtagatacacaagggatataagaaagtctttctagttcaaatgtatttctgccatgtactttacccagtagaaatgcatttacatttttaagaggagcgtataaatctctcaaatatttctgttgatacatatacctatcattcacttaaatacctgagtacctactaagtataaaataccccgttattttatgtttggcacagtgaggctgtaacagtttatactcctattatgtagctgagaccagttggtctcttttagagaggggagtatcagttagttacagaaggactcatttgaatcatgagataatttgtgagaatgcagacccaagtaatatgctctaataaaatcagaaggcagcatgcttttgttgagaaatggaggtaggaaggtaacaacataaaataacctactttgtactggttcagtataccccataaactgtcatctcttttgtttgtttgttttgagggtacaaattatttcattttctgatattctctttcctaaggtattgttggactgaaacttaaccaattctcctctttttctgtctctgtctgtctgtctctctctctgtgtgtgtatatatatatacatatatatacacatatattctttctacacacacacagtaacagtatgtgcaagtcaaatttaattttaaaataaatcttttaaagcgtgggtcaatctgtgccagtcacacacagggcagtctgccgtatcttttgcatccttgttttgtactgctcgtgaatgttcgttatatagtagagtaggtaattccatatttacttgtactagaatatatctggcttaatagatgatgttccaaaggcttgaattaaaaaaaaaaaaccttagtgtaaaaaatttcaggcatacacttaagagagactagtgtaataaaccccatggcctagatttaacaatcagcaaaattttgccacatttgcttcatctactctcttctttttcctcaactatttttaaagtagatcccagacttcaagtcttttcactcctgcattctttcatatgcatttctttaaaagaaggaatttttcttatataaccacaatacctttattacatccaacaaaattaacaataactactaaccacctcatattctctctgtattcagtttctctgcttttaactgaaaaatgtcctttttacgtttagattgttctttcagaatccaaccaagatctgtatagcatttggttgtttggactgctgtataattaaaaggtcttttctttcccaccacttgtttacctcactcacccccaaacccccttcttcctccttccctccccttttccctttaatgtgttaatgaaaaaactgggtaaactatcctgtagaatatcctccattctggatttctctgttgccttctaacttgttcctgtagcctctgaatttcctgcgaactaaaagttggcttgaaagacttaattagtttcaggttcagctttggttttggtgttgaggatggaaggcatgcaggaatactttgcacatggaactgtttcttcatactgcatcacatcaaggagcatataatgtctgcttgtcatactcttatcaatgctaaaattgggcagtggtgccaacccaatctctctattgagagttttctaccaatctttcctcccgtgggaaaagttgctgactgttctccaaatcaattctgtcattagggtttgcaagagaatgaatttttaaatctgccaccccttacacatttattagtggaaattcttctgtaagaagaagtttccttcataaattacacctttttgatttatctgaaacaatgtatactggaaagaagcctggtgtcttaaatatcatctgttaatacctagtgtaacattccaaaggtaacttgagatactgcaaggaccacatagcaccttgagtacctattttacatgtgactctgaggactttcacagaataaagatatttcttattttaatgaacgttgtcagtatcaggataattttatgtagtcaacatatatacagtgttggtcctataggagttggagaccttttgccagttttatttggtcaaatacattattttgtgatgaaataactgtgagtgatgagttgagcctcaaagaacatgatacttcattaaatcaacaagctgaacagtatcatctaaccaaagctgtagaataaatggtgataaacttaaattcaggaatgaaacaatcaccatttttgttacaaatttgtccacccgtcatcactaaccccatttttatttaatactggtaatgaacaaaacctgaagaagaaataaaactaaaatatttcatttgtagatgacatgattaattatctagaaaaatctacagcaatcagctctaaaatgatttattaaataataaaaatttaataaagtaccagatatactgtatctttataccatgtgaaaatcattctgggaaaatatcccattcagaattgcaacaaacgatgtaatatctagcaatacatttgagagagatgttagatctttggaaaataaattaacatccagtgtatttgaaacaattttaagattcaaataaaagcagagaaactgtttctaaatcaagaatattggcaaattatttgactaaaagtaagatttttgggtttaacctctaacttccaaaatttctagtgatttattttatagtgattctgtaatgagaagtctcgtcctactaaatatcaaaaggttttaaagcaagaatgtctaaaacagtgatgatgatgtaagaataggtgtgttacccagataccagaagagacttctctgtctgttggagatttaagtatacattttctggccaggcccagtggctcacgcttgtaatcccagcactttgggaggccaaggaggtcagatcacttgagatcaggagttcaagaccagcctggccaacatggtaaaaccccatctctactaaaaatagagaaattagctgggtgtggtggtgcacgcctgtagtctcagctactcgggaggctaaggcagaagagtcacttgaccccaggtggcaggggttgcagtgagatgagattgtgccactgcactccagactgggcgacagtgagactgtctcaaaaaaaaaaaaaaaaaaaaaaaaaaaacaaagtaaatttcccttgaagcccgacttcatggccggtgagagtcaagagacatggcctggatcccgtgacttacacaaatccctgtggctgactcagaccttagtttctctgcctctgcttgcatgccaccttggtttctgccagtgtcaatacatatgtgaaaccagcccctttactagtttcaaacatttaacattttgtgagttaagaaatcctgaataggtgatagaccagcaaatgattttcttaatttttgagtggaacatgctatctatgttcattcttttcttctactcatactttactgaattaatacagttgttttcttaagaggaatactgaacaaataagcttgttttcattttgtaaaacatagattactggagcactatgaggaatacaaaatttgtcccatctgttatcatatacagtaactaaatgtatgacaaaataatctttcctaagagaggggcacttaaaggatatttgttcagtggtgttggatagtactattcagtgatatgtcttaaaactaattagacaaaaatcatccgtatattacacaaccataggaataaaaaagaaaaggtaacagagagaatacctttacatctcatatttgaagaattagtagaactcacccagaagatacttgaatattaaaaatttttgttggaccaaaatattatgattaaaaggataatagaaaattgtggaaactacattaaaaattataaggaaagtgataataggtataagttatatattgttgtaaatatgcaagtttagatatcaagattataatacataagtgagaaatgaatatgacagattaagaatatgaaagtaaagacacatgaataataaagaaatatgaggtttttttcattgtattaaaggacataaatttttaaaaagagaaatctaatatttgcaagtaagcagtgctaacagacccttttgggaaataatgcagtaatacatgctgagagtcacaataatgtttagaaatttcataataacatattaggaaacactatgctaattattttacatatatatatatataaaatgcccagcttaaaaactaattatagaacagcaacataaaatattacatttaaatgattatttttggagactatagaacaacactgttcaggagagctttgtggtgatagaaatattctgtgattgcactatccaatatgtagccatttggcacatgtggctgctgagcccttaaaatgtggctagggcaactgagaaactgaatttttaatttaatgttaattatttaaatttaaatagataaatggggctagtggccacaattttagatagtgtagttccagaaataaagagaaatgtttggtataagtgaaaataaaatagtaaatttatatgccatgattacaagtatgtacataactaaatgtacgtatggaaagtgatagtcataattaaaatatttgtgttaggattgaaggaaataggtaatttttttaaaatgctaaatttttaaaaggttacatgacaataatgtaacacttcagcattgtactggtactgttcagtatggtagccaccagcctgatgtgcaatttaaacttacatctgtttaagtaaaattaaaaattcagtaccttaatcacactagccacattccaaatgagcagtagtcatatatggctaatgtttgccttttcgaacaatgaagctatagaacatttttgccattgccaaaagttctattgtacagtgttgtagaaagaactggtaaaaggaatatactggaatcagtcactgatagtttatttgtcagtagtttctaagggcacatgagaattaaaactggaaattggattcagtaaaaagtataaaggaagagtaacataagatcctactcctgtaacttagattagtgcttttttttttttttttttttttttttgagatagagtctcactctgtcgcccagactggagtgcagtagtgtgatttcagctcactgcagcctcaccacctcctgtattcaagtgattgtcctgcctcagctacccaagtagctggaattacaggcatgttccaccactcctgactaatttttgtacttttagtagagacggggtttctccatgtttcccaggctggtctggagttcctgagctcaaataattcacttgccttggcctcccgaagtgctaggattacaggcttgagccactgcgcatgacctacaccagtgctccttgaagaatgggctatgaactggtgctggtttgttaatcaatccatgactaaatgcttactctcaatttctatattggtttagaaactcttacagccatgtgatatttgtgtcattcaggcacatcacctgtctccccggttgaagttcaggccagtagttttaacgcagttgcctggagagttttatgcaaagtgagctgagtatagtcatgacggtagtccatgaacctgggtccccaaaagggagaaaacagtctttcactacagattgcgtgagaaacattggccagcattaaagaaggaaagtagattgctcagggaagttttgtagggaacttaaaatgagatgttagtatggcttagtaatctgtatttgcaggtgaaatgaaaaattcagccctaaatctctgaatatggtaaacttagacttcatcttctgcaggtggaaatgaggcaagggatccattatccacagcatgagtaagtttctagtcagttcctctgtctagggagtttgttttcccttttcgcccttgttggcctgggagactcaaccagcttagtagtcttttcctttcagtaagatttccaactttgggttggtctttacccctttttagctctttttgtcgtattatctgcacttagtactttgtaactgttttcaccccttccccccaaagttagttcaaaggcttacagcatgttgaaaataggaaaattgtttttaaattaagtgagtttttgtgtacacttatttctttagtctaaagttttgttttaaatctctttttcacatttaaacctgattccctgagacaagatataaaattgaattatttgtgaaatgtggaaaggtttttattgcctgtaatcaaagcataatctgtccattaaagcattattttagtgatgaagggtggacatacatcccaagtttactacctgttttcttactgtggttttgaccatacagcaaatggtattttatactctgaaatgaaatgcaccatacacattgtccagtatgttttgagttttaattctacattttcagattttggggtcaaatgaaatcaagtactttataaatagttgtttcttctgattctactggccttacatgttagatttttttaaagtatacacattcagtcctttatcagtaccattaatcaaatgttgatttcagcatttcttcattttgttttcttttttcttttctttttttctttttcttttctttttttttttgagacggagtctagctctgtcacccaggctggagtgcagtggcacagtctcagctcactgcaacctccacctcccaggttcaagcagttctcctgccttagcccccccaagtaactgggattacaggcgcttgccaccacatccaactaatttttgtatttttagtagagatggggtttcaccatgttggccaagctggtctcgaactcctgacctcgtaatccgccagcctcagcctctcaaagtgctggaattacaggcatgagccaccacacctggccagcgtttcttctttttctctctaatttatcaaatttggaaacagttggaaaacatttaaaggaaataagtctctgtgtttttaataatagtttaaaagttaaaggaaaacaaatgaataatattctgtttattatagtcagacaaaatgtacatacgaaaatacataaggaaatatagaatggcatcttctgattttaatttaatattatggtaatgatttacttaggcagaattatagctatagacaaccattttatcactttatttatatcgatctactctctatggatgaaaacagttaatactaaagcattaagaaggtatattgcttttcatctgtattaatattcttcttctgatatttgatatttaataatatattttaaaatactctgcatgatttcctgatcttaaagcattccattcctttcaaggaatttggattataatgatttatttatagtatttttgtcattaatattttaggatatggcatcttaaaatattgtattcctaacagttatttaatatataattaaacatctatattagtattattttatataacatattttcaaactcctcagaacatttgtaggtttttgtttaattttatgtaagtttcaccttaagaatattgactaatcggttaatattcttcttaatcatcgcaattttttaaaatgctttctatgtaccaggacctatttaaggtactacagataatcagtgtgtcaaaaaacaaaaccaaaattcctttcctcatggagttttacattctagtagattgattctactgttgattcatactaaattaatttattaattatagtagattattctgtggcatttaacagaattcaaagggctacttttctgttgttaggaaatagcatatgccattatcttggaaatacaaagggaggacagaatttccgctggctctaacccattgctttttaatgagtttagctatgtatatatattttaaaatggaatttataattatgatcatttggcaacctacagtttttctgtattttttcaacttctcaacttcccagtgatgggggtggatgttgaactagtcacttaaggttttgggtctaaggagtaatatttgaaacatgcagtatttagaggagatatttttgtgaatgaagagaatgtgattttaagaatactcatgattttatctaatttctgttctcaaaacttcattttgtaatatagaagataagcttgatcaaaatagtttgatcccagtataatcttttactcttctctcctcccttaggacaaccttaaacttccaccacaagaggaatataaagaggtccctcctgcaccaagaaagatctgcagatctttttcagtgttcttggaggtgtggggtgtgagaacttgatcagtttgtgtcagccaccttgttctctaaaggtaagcactgtgtagtgagtgcacactcgtgggcccaggctcctaacctaagactggttttggaatgctccattgagggtgtgagaccttcagacgttcgcacagaagggaggccctacctgtgggtaggacatcacacattcatcaagaggtgcttttcgttatttagaagtgaagcatgtcctggggatgtatggatatttttgttttgttttactttaaaaaaaatcccagtcatagtaaaaccttccagtttagtctgcatttattcagttaataactgctggagttaatcaaaaatttttcttgtatgtcttgagatatggattaagaattttgaaacaatgacaccatttaggcaatctagtgacataatagcttcagttgatagagccagctgtgaagaattacttttcatgatctttttgaagctgtatcttatctttacttcagggaaagcccctcaaaccattttgtattctgtattacacttcagaaagtgtggaagcaaaggtcatctaatctttaaaaggtatgtaatcataaaattttttatgtcagatcttaattgaaaaatattacttaaaacttgaaaaaattacttaaaattggcaatttctttttcgtcttacaacttcttcctgtcttcaggaaatgaagaataaatatgttggttctatcagggaaaccttatgaaggataagcaaattaatgtctgtgctttacttccaaattctgacatcagaaaaccttattgttaactaatataatctatagatgtctctcaaaatgaccagtcttaaattcaaatgtcatttggatatcattaattgactatggagaagagcagaagcatgctgatttcgaaaatgtcattaatattaggattaggtcagtcttaggcaagaatactttgaataacaagagactaaatgtctagtaaaacattttagattgtaattcccagtattctgtagtattaacaatgagacttaaagtactggtgaagacattaaatttgtccctttcatttatcttttcttaaagctcttaaagtgatcctgaagactttagttctacaaaatgtgaacttcttatggaccattaaagtggggagtaatctgctgatttttgtctagcaaccctacctctgatgcaggataatttttcaaaaccgttgttcttcctatagctgtataatagaagatattaaagaggaaaaatacttgtgtgtttgctgttagaatgaggaaaaaatacaaattggacctttttgaaaaaccttgagaaccaatttactttttttgtatgtaaatggtcgaggagttagaactagtcttggttattataactgcaggtaaacttaaaagatttaaatcttcaaaacagatatcatgtaggttttattagaaaagaaatatagattattgggtgtatagagataatctatatatacgtacagttttttttaatttttatttgcaagagcatgctaaatatcttagcctttataatagcatagaatagaatggacaaatatgttatccctttttgccagttgagaaaacactttgaattaaatctccaacctaatgaaaattataaggtgggttatagaaataactaaacaggttattatttcttaaccaaactaaaggtttattctaactaaaatacttgtaatctaagaagtctccctaaacatacaccttttttaaagtgagttttgttttatgatagtacatattttagcaacatactttagaaaagaaaagtttatttcactatcctagaactcgtgttctaatttcagatcagttttgtaggatgtataaataaaatggggacctatgagatctatgagatcttgccgtctgtatctacagtatcaaaaataagatcatttccttaacaattcttattaataacttatccatctcaattcataggaggtgacaaaatcaactgttgttctatgattttgatcataggtaggagggaaaacccaaaataatggtaccgagggcttcttccattgaaactaatatctgggagaagatttgattttcatgtgtacatatacacatacctatattagtgtttatttcttttttctaatcatgtaagaatttgtcaaagatcaggtttctgatttgtctttcatcggtatctgtatgccacattttgtttttgtttttgaagtgttcctagccagttcatgctagtccctactataaattttgtttccctggcatgatcatgctctttacctactctggtagctggagggaggtgagagaagcagtcttatgtgtttaccgtactgatttttttttagagatgggacaacaaagaaattctagcctttggagacatctagaccagcactatatggtacaaagataattcgagccataaatagaagctacgtatgtaattttaagttcttaatggccatattaagaaaataaaaagaggcaaaattagttttcattacattttatttaacccaatatatacaaaaatattattccaacatataattaatagaatgttttatgagatttttttcatactcagcattcaaaatctgtgtattttatactcacagcacatcttatattggactagccacagttcaagtgctcaatagccgcacgtggctagtaggtaccatattccacagttcagatctagacaatgagtggaattctcattttagcctcatacatgccaaaatccactggatgaccctgcgaactccccttgtttagagtttccaaatttagcagaaggaaaaaacaaaacaaaacaggatgtccagtgtaatttgaatttcaagtaaataacaaataatggtttagtgtaattttgtcccatgctatatttgaggcaaacttttaccaaagaagttactgcttattcgaaattcaaatttgactgggtgtcctatattttatctgacaacccttctctggtttaacttgagaagaggacatcatcaggctgcctggaatcttggaggactagaaaatagagcatctctttctctgcgcaggattttaataatcctccaaaaatcagcctgtaaactagaagatatctctagcccatttcttcctaatgacctagtatgtttaagacagaagaggggctcaaatggcaaggatttagtccatacatatttaaacattttacatctaaattattacattaagatataaggtttacgaaattttacaatttttgaatgattacttgaatttataaaatgtagatcatctaacagcacaacgctgctatcatttctcttgaaaactaattctcctttgacagtaaccacagcagttttcagggtcttggccatttcaaggtattttcctaccattggtttccattgcatctgtcacataaacctctggtagtcaagcatgaacacaaaatacaaggctactgaatgcagggattaggcttacttcgttacaagtatttaagtacttgtaattcttagctctggtgttgaccattggatcctgaccagttcagcaatcagtctcctaagagcttcttttacagaggaacatctttccgttttcattctttaacatttttaatgtattgattttagtacatttttgaagcatacagtcacctccttagtagtgtggatctaccctcaagtgctatagaagagactgtttgtctcgaaagacagtcattgcaccacctctctccagagaatacttttccttcacaaggtgcatgactcaagatgacaggcttacattattatttatgtaggcaggtggatgccaactgccagtgcagggtggcataagttagcgttccaaagttaagctatggtgcattccaaatccattcacacttaggagaatgtacccaagagtgtggggatgttttcaattactgcatttccttcagagaacaagaaccacaggtaagtttgtgtgtgtgtgtgtgtgtgtgtgtgtgtgtgtgtgtgtgtgtgtgagatccaataattatttctaaataagaaatttcagaatttgaaaatattgcccctcccccaaaacagtcacctgaaaggtctcaaatatagctttcggtatatatttttcttcctcactctaagaaggaaggtattggagttggtggtgatggtggagttgggatgagggagacaatttactgtcatttgaaagctgtgaatgtcacacattttcatgtctagaaatatcctgggtttatgtaagaatctgattttgcctaacctctaatgtctcaggtatgaattattttgtcagattaacacatctatataagtaagatgttcagccttgcttagctaatgtcttcaacagcaatgagtaaactaatgagttgtgtctgcatttttcacttttattctcaagactgacttccttttgtttaaaggcttttgccttatttctgaaaccataatttaaagctacaaaagacctgaaatataatctagtaccctttttacctggggatccttggatggatttcagagattctgttgaatcccctaaaattacagtcatattttgtatatatgtgtttttactggggagaatgtccatattttcatcatattctcagaggatttcataacaaaaaatttggtcgacaaccactgtgatctagtctaatgtgatcattttactgataaactgaagttgaaagaatttaacttatcttcatttgaaatttaatacttgtgaaaattaaagtttatttctttaaaattcatactgatttttaaaagaaaaatacatttaacttcaactaattaaacttgaaaataccagcctaaatgggagcagttagtttgctaatgctttcttctgttctgccctttgagtggactctactagttaacattaaaatggccttccaataaagtatgaggctatgtgataagttcttgaagatagattaaaaagaaaaggaattatccattataatttaaatccctttttctctcttcaaattctgtctccaaaactaaaactcaagaaaataggtgaataatgttatttttatatttccagaatattaaaaaagtaggtaattgccttaataaacattacactgggcattattgggacagttttaggttctgaaccctagttaaagaaattcttcagtagcctatatacacttcctgttggttttcagtgataagggcattttaaggtctttttgatcataagatgcttttaatgttatagtaggactttagaaatggtaagtaagcaagttctgtattaattagggaaactaatacctttttctcaaaatgaaggaaatattattttttctttttcttggtactaaccagtaaagtctgcctagtttaagatctagtgcatttataccataaactgaatattagaataaaaagaaatatagaggatgttatataaaagacaattattttctgaaaggagtagaaaacaaggcaacttggaacactacatatatataaatgtaaaatatattaatatacttttatatagatgatattatatatccatatatatatttttttgtttgtttgagacaaggtctcactctgtcacccagcctagagtgcagtggcacaaccacagctcactggagcctcgacctctgaggctcaagccatcctcctgtttcagcctcctgagtagctggaaccacaggtgtgcaccaagatgctgagctaatttttctgtgttttttgttgagacgggggtctcatcatgttgcccaggctggtctcaaacccctgagctcaagcgatcctcccaccttggtctcccaaagagctgggactatcaggcatgagccaccatgcccagctgtactatttatattttttatttaaattaaattgtgcttaaagattctaaaatttatagtataaagctcattatagaaaatggtattgacttctgaaacattatagttttggttttgtttttattccttcggacattttcacttaaggtagttatcactcatgcttttctgctattataaaaagtgaccagattttgcttttttatccaggaagaacagtttgtgaatgccacttgataggccacctgtgttattttccatgggtatttctaacaaataaaaagttatatttttactttgtattcatcaaattattttatgtttaatttagaaaagcttaaattcttcttaggaatatttgcaaatatttgtaaatagtttttttcaaaaaagttgaggtagatagatattaaatatttttgtgacttctcattaaaagaaactgaagcaattagttgacctcactcaattcattaaaacagtgctaggttcctggttttcgtgacattaaaaacaattcaacatctgtgtgtagacaatgactaaaactttatgattttgtttcagagttttattaccatagatattgtttaaaatagaactttcaaatacatttaagaaccattaaaagtgacttctccctgtgcctgaaagatacatgcatggcttatatctttttgtgtataaacaatttaatgtttaacttttatttcctttaagtttgcatatcaaacactcttagcaatctcatcatttatactggagtacttagactttgaaactttgccacagctacctgccacgtccttgtataggatataagtaaatatattcagtcatcaaatctatagagaactgtgagaatagagtggtaaacaaaacacattgcctgccctcacagctaaagaggagtgatggtgggaaagtggaagtgatcagaacccaatctgaggtcagaaaacaaaactacaatctatttcaggttgcacaaatgaaattttaactgaatctgagggacattagatttaatcaaaccaaatgagaaggcaaggtggtgttttgagctaagggcacagcagatgtaagagtcataaaggaagaagaacaaaacacattcaagataaaagacacggagagagggaaagatgacactgtacggtgaaatatcttgcaagtcaatattagatactagcctttgggctttagcttgagaacagtgggaagacattgacgctcagatttttttttctaaagttttttattaatgcctaatacatatagaagcattagcatactgcttcgtgaattttcacagacttagcacacctatgtgatgaacacctagatgaagaaaaacaacaatatcagcatcctaaaagttccccttcattttccttccagtcagtcctgtctcttgcccaccaagggagacctcttgcctgacttctcactgtatatggaggatattgcctacattgtacttaatataaataggggcatacaatgtgtattcacttgggtgaagcattacgattatgagatttatccatattgttgactgtggttgctaattgttctcatagctgtataatgttccgtcatatgcatgtactacagatttgcatttttctgagattgctgaatctgcatcatgaaggatgggagggtgtgaatttagtaagcttcacagtaaatctaggaaagagatactggggcttgagctagtgtggtgacaatgaggatgaagagaggtgggtatatagagagatatttacaagttagaacttaattggatgaggggatgaagaatcatacaccagagataactcctgggtcctgacttgggcaggggttaatggcagtgcccttcattaagtccaaatactggagaggaagtgggttgttgcttgtgctttagtgatacaggggattaacgaattcaatttctgatacagttaaggcatctgtgaaacattgcatagatctgctttatacaactgttttattaactgaattaatgaataaccttaccttcattaacaacagtgtgctaacaaatagttctacatatggaaaactgcaaatcttgtctagtctcactgttcttcacctctgaatctcacgagatactcttttcctaaatgtgttaggagtggttttgttgcatctcatgcttttttttctttttatttatagaatatacttcatctaaactagtgctaactttatgcaagaagagtagcacttcctaggtatatgatatgaaaggcattggtgaaatgccttcatacttaaaggcattgtttttccaacattatggtctttcctttagcacaataaagacaccttaaaatgagtttgtttataggaaataacctacttatttagtaagactttaatggactgaagtaaatattcatgagatttgggcaggggaaagaaaagaaagatagggatgaggtctgacctgagcacaaacctaggcagggtgccacagggggaaccctgaacatcagagagcaggttgaatgcacctgattttaaaggaagattatgccaaaagagtgacgtaggagctgtaaaggagggacttcacctcttttcgatgctgcctgggactagttatacttgtggaaaattttatgtgaagataactaataattctagcactgaatgaaacaaatgcctgagacctactggaacattaaatagacttttatgccagccagttatgattcagtgctatatttagaccacaaaatttgaactaaaatcaaggcagtttattcttatcccatcatgtccatggggtggagaggaacaactaagtaatcatgatcatgcacttcagtttatagcgttttctctagctttgggcattgtcacttaacagacaatacaattttaaaaattaaatgctcaatttcatttcactgaggttttttgttgttgcacaacattgtaagtatacagtaagttgttttttcttttaaatttttgcctctaattcaggtttacattgagcaaccaaatcagtattttcagaaaccattgaagttaattcatttatttaataattacttatgaaatatgtcatgtataatagtgctatagcctaagatgatgatggtgagaagtactcctaccttttgttactggcacgatggtggcgatactcagaacaaacaaaaacagtgtgataacacaaattattatatgactcgctgttttaatagtgtttacaaaagcagtgaatcccaggaaaataaactattggctacaatatcaaaaaagaaatgatggaagtggtagaatttaatttgggtcctgacaaataggcaggatttgaacatgtatggcaagaacactgcaggcaagggtaacatctcatgagaactgatgcagaaaaaaatacagcatatattggcagagtgagaaactggccagactgtagcagaaatcacaagctggtgtgaggagagagagaaaagcttcattaaggaagttttgaattactgaaaaattcaccagtcataaggcatggattattgtcttgctgtttagattacctataaatgtaattttactttactcaccaccatgtgataattatgtagggttttatctttttagaaacctgatgtgaaattacctgaaggaatgaagttagtgtgcttttaagttaagaatatcttcactcagtatccatggataggcttcagggaatctggatctctttgaaattaaagcaaaagtttggatgtatttctttttctggaggaaggatccattgcctttatgagtatgtaacagtccagaagaagttaataaaatagctcgagctctcctaacttaaaacttttttattttttattattattatttttttttttgtagagatggagtctcgctctgtcacccaggctggagtgcagtggcatgatctcggctcactgcaacctccacctcccgggttcaagcaattctgcctcagcctcccgagaagcttcatcttgggttttttattattattattattattattattattattattattattatactttaagttctagggtacatgtgcacaacatcttggggtttttttaatgcagtaaattaaaatggggaaattaaaacacgttaaatactttccctttatttcactatttactgatacggtatttaagagataatcctgaaaagtatatcagttgggttgattatataaccagagatagtggctattttatcaattccgtggctttcagtaaaaggacagctcaattgcctttttagatacagaatgtttctgaatatgctatttcaagtagaaattccttcctatttttggacaggcatatgtctgctttctgcagaatacaaagaattttcaatgtgtccagcttcagtcctgaaatttgacttacctggatcatatttaatcttttgcacaactgtttaaagcaggagtcaacaaattatatatagcccatgggccaaatccagccctcaaacctatttttgtatggcctatgacctaagaattgtttttacattttaaaattgttaaatttaaaaaaggattgtaagggattaggattttaaaaaggagaatatgcaacagagattttatgtggccctcaaagtctatggtatttactaactggccctttttttaaatgccaatccgtggtttaaagtacagtttttaagttctcctagatgcatgtgttattctacaagcagatacaatgcttgtggatagatattatttttgaagttgggagtatatttatataattttagcaaagttgactgaataagataacctgttttctatactgaatattcagctaatagtttcgctttctaaagtctggatttgaaagtgtatgaacaaagtgtggacttagtaatctacttcaaagaactatgtgaatatgaaagtagattttgtttttcatggatatattacacagcaaccacaattcagatcaagaaaaatattaaaatataatctttgttttagaagacaccacttaaggcaaagaaggcaaaagaaaacatttgtacctgttaatgagttgggaagggcagctcttaaaaattatactattcattggtttattcaacatttatacttatttttagaaccattatatatattggcttctttgtattatattttattaatattattgtatgagatactatgattctaaattttggataaatattgaaattatttttaatgggggatatgtcataattagtgagtctcaaaaaattggggcaattctgccttctctctctgcatcattatttttccttcactactggatcttttccaccaacatacaaataatgttgagttttttcccccatcttaaaaaaaatcttactcccagttctcctttagttactaccccatgtctttcatgtaaagcctatatctctgaagtatgtagttgcctgtgctgtctgaattcagttcctataacccctgccatttcaccagaattgtacttcttaatgactgccatgctgccaatcagatggtcatctcagtcttcctcttatttgacctggcaacggtgtttaacactccttgtttggccttttagatactatactacactgtcctgtttttttttctcctacccctctggctgctgctttttcaatctcttgctgatttcttcttgcctccccatctccaaattgggaatgctccaacatttggaattttgaggcctttaaaactgcatgttcactcccttagtgacttcatatagtaccatggctttatatgatcatccatttgctaatgatcagaagtcctttagtctttttttttttttttttgatatggagttttgctctgtctcccaagctggagtgagtgcaatggcatgatctcagctcactgtgacctcctcctccggggttcaagcgattctcctgcctcagcctcccatgtagcggggattacaggcgtgtgccagcacacctggctaatttttgtaattttagtagaaatggggtttcaccatgtcggcccggctggttttgaactcctgacctcaggtgatctgcctgccacggcctcccaaagtgctgggattacagatgtgagcctccgtgcctggcccctgtagtcttcttagaatgtaatatagtaaactgaattcctcatctttcccccaccaaaacctcctccggcagtttttcccatctgagtaacagcacctgctgtcttttaatcagccttggtgtcaccaaggatgcctgtcctcctttcattccacatatgataattcttcacatttctgttaccaaaatattatcttgcttctgtcccaaaaatatttctgagattcagttattgcttaccatctctactcctacaaccctgatccaaatcaccttcatctcttacctgtattgatgcaaaaagcctcctgtaattggtcttcctgttttttcctgttgacttaacttcagtccattcttaatatagcaggtaaagtagttatatttaaatataagccatattatgtcactcttttgatgaaaatcctccattgacttttcatctcaaccagaataaaaactaaagttcttaaaatagcctaccaggctctgtgctctgggctgtcattcccagacagccactgccaaccactcctgcctgctcacacccactttgctctagtcatccacactggcttctttgctgttcttagaacatgccaggcaagttcttgctttagagcctttgcactggttgttctctgtaatactctttccctgtatatctacagggatcaatctctcattacttgagatttgtacttaaatgtcaatttaatgaagctttctttagccacttgatctaaaattgcagatttcccctacttcaccccaattctccttcctgctttatgtttcttttcttgaagacctgttaccatctaccatcccatatattttacctacttttttcatttattttttgccttcctccactagaatataaaggctttttgtttcctttgttcactggtctgtcctcagcacatagaaatatagtgtttggcccacgttatacacttagttaatattgatgaattaataaataagtggaatttaaaaatagccaacacaaaattttaacatagttcagggatttttgagagctcctgggatcattgaataagcattcaaatattccagtaaatgacatgcatggagctaaaggtattagaaatatgactgtatacattggtatcattatatatgtagaactttcttttttgcacagatccttagctttgaccatttattctatttttaaagtgtggaatactaaaaaaaaatattatttgaacttaaatatgattactatttgagtatgctatgatgtgaatactttttaaaagaatcttttatcattaaaagtagtcatttagtacagtaggaatttttttacaaaaaaacttataaaataatttaaatttccagaagagtttcaaaggcagtacagagactgaacttttcaggatccttgttctgtgtcttataagttttcatcttcaaaaagcatggaacaaatactaattcagcctaccaacatagcttttgttaaagtaactgctttttaaaataatttttaaatacataaagctaccaaataattagtttcaaatttcataattattttttcttgactatatgcataactgatttaaatagagtcataatccaaattttctcaattatgacatacatttcttcatgtttcattatagtctttttaaatgactaataatagaccatcttgctgatgtatcattattaataaattgttttcttcctgttggacatcttaaggctgttttgttttactgttattaataatatggtaggtgatatatttgtgcatataacttcttgcatttgcctaaattatttcctttagctaattacccagaattagattgggcaataaaaatcatagggcttatgaggaaaatggggttggagtacagcccacaataattttgtcagtgacacatttttaaaaagacagaaaactaataacaagtgcagcacagttttacatatgttaaatggttaagaaatacataattactattatacaagtgacactttttaccttgaacaaaccctgatgtttgcttgtggaagtaggtatggaattgtgatctccaagttaatgtgaagtggtagaaggaggattatctgaaatcagaaggaaagttgtaacattgcatgtgatgggtgtggctcgtaacagaagcacggtgaactgaagtggctggtaacttgagatgtgtgcaggtgtgctttttgtttattcttatgtgacttagttaagctggcagcaattttctgtgttcacttagtgtttctcgcagataaaatcatgcataagcaaaggtgacattctctttatgctcatgtagttctctaataaaccaactgcactgaaacaaatttgcattttcaaaataagtgttatggcagaagagactccactaatttgttatcccatcaattttactgcaattttaacatcgtgctaggtttttaagcttttatatggtaatttttctgatatatttttaaccagatgcctttagaatacagtttggtgcagtcttacagatataactccaaccataataggcagtggagatgttattttaaaataataataaagcttggttaattgcacagagacaagaaaaaatggaggacaggtttcttccaagaatgactgaagccagaatagaggttagagaaaacagaagaagaaaaaaaaaaccctaaaacctgcaaagggagtttgtacctaggtagagcagtaccttgaataccagattaaagtttcaacttccagaaggcaaccaaaagtcagtattttgttgttgttgttgttgctgttgttgttgttgttgttgttgttgttaacaggaaagatgaaagaccagataaggaagaaaggccaaggaggaggacataggaaaagtgtaggttggagatggtatggttaccatccaataagaacagaaaagaaagtataaatgtaagggttttgttagcagtactatttgccttctgattaaatgataaagaagatgtaaaataaatgtttgtctaagattactccaaagtattatcctgagtggctaaagaatagcgatcctagaaaaaaaaaattgatgatcaggaagaagagctgtatgagtgggaggagaaggtattcctgaaatgatgagtttagtttgaaaggaagcctgactgagtggacacagcccctgattgagcattaagaaaatttttgattaattactggtggggccctggacaatagtatacttctctggctttcagttttctcacctgtaaaataagtattgaactactagtgactgctgaagtttcttccagctttgaaacaattgctgtgtgttttttttttatttgaactttattactgtttcttcatgattgctgtctagtgaccttttatgaagactttggtttataatgaaacaaggataaagtgctcagtcttgagtctgttggagattaaactttcctgactcctgaaatgcttgacttgacaccggaagtgccacaactgccatctcactttatcttttttctgccaaaggaagcttcttgcagatcaaaattgggagcaaggagaattggatgtataaagccaaacttggaaaaagcattctgcaatttttcttaatacaatcttttggggctctatttgttattagctgttagaaatcccaataaattatttggaaagaaattcagtacaaatataataatgttatagaagtatatgtatatagtaaatataatctaggagaggcttaccatagaaaaggtgcaggctttggaattagcttgaattcaaatattagttttattactctactagctgtgtaaccttaggtaaacagaaatgaaaagctttattttggaggatgattttatttctttctgtgtaaaatggaaatagtaatactaagtttcagaattgttgtgaggattagagacaatgtttgtaaagaactgagtatacaacctgatacttaataaagagtaacctttatcagttaccaggtaatagttattgttgcagtatgaggacttggttaaaactttttcaaattcttacctgtattaaacacttaacctacattctcctcttgtaatcagaatctcgtgtgcatgtatgtaatgatgggttctctaatattcagttttctggcagattaaaacatctgacaaaactaaagaattattttaaaaatatttagagtgtcaacatattcaattcttagatggaataatgatctttaaagagatgagactagtatgtaaaaagttcatttttaaaagtaagaatcttcatcctaattatctgctagctaagacaaaataatagaatcaacattcttacagattttcgtttacactgcctcctttaaaagatgcccaatactgtggatattaaagagtgattactagtatattatgtatattatatattcagctttccttttgtaaattgattttaaacatttccaagaaatagtttcaaactaggtacttcttaacatctcttatacttttgccttaaataaaaacacattgataatgctaattatatggtaaaactgttaggtctgcagaagtcatattttatttctgaaataataaaaatacattttaaaacagatgcagaaaatgtgaaaggtagattgctgctggaaattcacatagtctttaaggaataaactatgtacgtgttgactatgaacagactagtctatatttactatattaaattttcaccaagttataaagattcagtatgttatccttttggaaatttaaaaaatagtaaaacacattctttttaagagcaggaacaatgtacttgaagcaacaaatttatgactgaagattatatatcagtataatccttgcttctctgattgctgtgtacccttttctgcagccgttttttttttaactcttaaagtctgtgctctattacagtgattctttttcttgtttctaaaagaataaatgaatagttttttgttaataattaatgtaggcctctgcttacctgctttatacattctttacctgcctgtacgtagcacttgcctatgcaagtattcatttactgaaaaagttaccaactttgtagccttgaaatcatttaaaaaatatgttaactgacttgaatactctggttagaagcaaaatgcataccttctacttgaaggaatttgttttcacctttactgaaaaaaatacatatttagttgtattttaaacactacttattttgacatagtaatcactttatagttttctaggaagttcatctttgtatgcattttatatctcctattcttttcttgtaaagattaggttacaattaaaataattcaaagatcattgggaggtactgcattaaactgtgggttggatcttgccttttgtcttgttcaaactgcacctctccttttatttttttcaatctgaagatagtagcatgcttagagcatgaatgtaagccatgtggtggctaagatagagaaggcagagatggatgacttcagaggaagtaagtgtttgacaggagactggactgggtgatggtgtgaaccaaagtcaaggtcacagggagaaaaagagcaggctggcttcatgggtgtgcaacctgtacagttacacaaggctcagcttttttaatgttctgctactgctatgttgaaattcttaatcaatttcacacaagaggccctgaatttttattttgcactgagtctcacaaattatctagcctgttctgcagatgagaaataacaggaagcagaaatttcttgtctttttagttattaattccttttcccagattagccaaaatgggaattattttttaaatgatgacttacggacatttaaaaaaatgtggaaaattaacctaatttgaaagcagttgtgtgtgtatgtatgttatttagtaatttacccaagtattggagaggggaaaaaggagcttgttaaattttcttatggaagtgtcaaaggtggtcaaacttccaatagactttaccaagtcagtatgtaatatacatagtttgagaagtaaaaacaattggtattacagaattgtatgtctgaattacctactacgtgctgggctttacccagaaaagtgtttctttacccataaagcctgatgctttatattcagtacagtactttattatttagtaattattctttcctagtattatttctaaagtggtaattgtttcttgcctttatagtgcttgtaaactttattttttaaagattttggaaattaaaatttagaaatttataagcccattgtggtttttacacagtcctgtcagtttactagttttatttgatagctatctaatacgcacctgtttaaagtggaacgtgtttctattacacctaggctctttttttttttaaaatttaagttctgggatacatctgcagtttgttacataggtatacatgtgtcatggtggtttgttgcacccatcaacccgtcatctacattaggtatttctcctaatgctatcccccacctagcctcccacacctcaacaggccccagtgtgtgatgttccctccctgtgtccatgtgttctcattgttcaactcccacttatgagtgagaacatgcggtgtttggttttctgttcctgcgttagtttgctgagaatgatggtttccaacttcatccatgtccctgcaaaggacatgaactcatcctttttatggctgcatagtattccatggtgtatatgtgccacattttctttatccagtctatcattgatggacatttgaattggttccaagtttttgctattgtgaacagtgctgcagtaaacatacatatgcgtgtgtctttataagtagaatgatttataatcctttgggtatatactcaataatgggattgctgggtcaaatggtatttctagttgtagatccttgaagaattgccacactgtcttccataatggttgaactaatttacactcccaccaacagtgtaaaagcattcttagttctgcacatcctctccagcatctgttgtttcctgactttttaatgatcgccattctaactagcatgatgatatctcattgtggctttgatttgcatttctctaatgaccagtgatgatgagttttttttttttcatatattttttggccgcataaatgtcttcttttgagaagtgtctgttaatatcctttgcccactttttgatggagttgtttttttcttgtaaatttgtttaagttccttgtagattctggatattagccttctgtcagatggataggttgcaaaaatcttctcccattctctcagttgcctgttcactctgatgatagtttcttttgctgtgcagaagctctttagtttaattacattcatttgtcaattttggcttttgttgccattgcttttggtgttttgttcatgaagtgtttgctcatgtctgtgtcctgaatggtattgcctagtttttcttctagagttttttatggttttaggtcttatgtttaagtgtttaatctatcttgagttaatttttgtatgaggtgtaaggaagggttccagtttcagttttctgcatatggctagccagttttcccaacaccatttattaaatagggaatcctttccccattgcttgttttttgtcaggtttgtcaaagatcagatggttgtagatgtgtggtgttatttctgaggcctctgttctgttccattagtctatatgttttgtttttttgtttatttttaacttcttatttatttatttatttattattattataccttaagttttagggtacatgtgcacaatgtgcaggttagttacatatgtatacatgtgccatgctggtgcactgcacccactaactcgtcatctagcattaggtatatctcccaatgctatccctcccccctccccccaccccaccacagtccccagagtgtgatgttccccttcctgtgtccatgtgttctcattcttcaattcccacctatgagtgagaacatgcggtgtttggttttttgttattgcgatagtttactgagaatgatgatttccaatttcatccatgtccctacaaaggacatgacctcatcattttttatggctgcatagtattccatggtgtatatgtgccacattttcttaatccagtctatcattgtaggacatttgggttggttccaagtctttgctattgtgaataatgccgcaataaacatacgtgtgcatgtgtctttatagcagcatgatttatagtcctttgggtatatacacagtaatgggatggctgggtcaaagacaaaaaccacatgattatctcaatagatgcagaaaaggcctttgacaaaattcaacaacacttcatgctaaaaattctcaataaattaggtattgatgggacgtatctcaaaataataagagctatctatgacaaacccacagccaatatcatactgaatgggcaaaaactggaagcattccctttgaaaactggcacaagacagggatgccctctctcaccactcctattcaacatagtgttggaagttctggccagggcaattaggcaggagaaggaaataaagggtattcaattaggaaaagaggaagtcaaattgtccctgtttgcagatgacatgattgtatatctagaaaaccccattgtctcagcccaaaatctccttaagctgataagcaacttcagcaaagtctcaggatacaaaatcaatgtacaaaaatcacaagcattcttatatgccaacaacagacaaacagagagccaaatcatgagtgaactcccattcacaattgcttcaaagagaataaaatacctaggaatccaacttacaagggatgtgaaggacctcttcaaggagaactacaaaccactggtcaaggaaataaaagaggatacaaacaaatggaagaacattccatgctcatggctaggaagaatcaatatcgtgaaaatggccatactgcccaaggtaatttacagattcaatgccatccccatcaagctaccaatgactttcttcacagaattggaaaaaactactttaaagttcatatggaaccagaaaagagcctgcatcgccaagtcaatcctgagccaaaagaacaaagctggaggcatcacactacctgacttcaaactatactacaaggctacagtaaccaaaacagcatggtactggtaccaaaacagagatatagatcaatggaactgaacagagccctcagaaataacgccgcatatctacaactatctgatctttgacaaacctgagaaaaacaagcaatggggaaaggattccctatttaataaatggtgctgggaaaactggctagccatatgtagaaagctgaaactggatcccttccttacaccttatacaaaaatcaattcaagatggattaaagacttaaacgttagacctaaaaccataaaaaccctagaagaaaacctagacattaccattcaagacataggcatgggcaaggacttcatgtctaaaacaccaaaagcaatggcaacaaaagccaaaattgacaaatgggatctaattaaactaaagagcttctgcacagcaaaagaaactaccatcagagtgaacaggcaacctacaaaatgggagaaaatttttgcaacctactcatctgacaaagggctaatatccagaatctacaatgaactcaaataaatttacaagaaaaaaacatacaaccccatcaaaaagtgggcaaaggacatgaacagacacttctcaaaagaagacatttatgcagccaacaaacacatgaaaaaatgctcatgatcactggccatcagagaaatgcaaatcaaaaccacaatgagataccatttcacaccagttagaatggcaatcattaaaaagtcaggaaacaacaggtgctggagaggatgtggagaaataggaacacttttacactgttggtgggactgtaaactagttcaaccattgtggaagtcagtgtggcgattcctcagggatctagaactagaaatggtctatatgttttgataccagtaccatgctgttttggttactgtagccttgtagtatagtttgaagtcaggtagcatgatgccttcagctttgttcttttggcttaggattgtcttggctatacgggctcttttttggttccgtatgaagtttaaagtggttttttctaattctgtgaagagagtcaatggtagcttgatggggataacattcaatttgtaaattaccttgggcagtatggccattttcacgatactgattcttcctatccatgagcatggaatgtttttccatttgtttgtgtcctctcttatttccttgaacagtggtttttagttctccttgaagaggtccttcacatcccttgtaagttgtattcctaagtactttattctctttgtagcagttgtaaatgggagttcactcatgatttggctctgtttgtttattattagtgtataggaatgcttgtgatttttgcacattgattttgtatcctgagactttgctgaagttgcttatcagcttaaggagatttggggctgagacaatgaggttttctaaatatgcaatcatgtcatctgcaaacagagacaatttgacttcccctcttcctatttgaataccttttatttctttctcttgcgtgattgcccaagccagacttccaatactatgttgaataggagtggtgagagagggcatccttgtcttgtgccggttttcaaagggaatgcttctagcttttgcccattcagcatgatattggctgtgggtttgtcataaatggctgttactgttttgagttacgttccatcaatacctagttcctggagagtttttggcatgaacgggtgttgaattttatcaaaagccttttctgcatctattgagataattatgtcgtttttgtcattggttctgtttatgtgatggattatgttgattgatttgcatgtgttgcagcttcatcccaggtatgaagctgacctaatcgtggtggataagctttttgatacactgccggattcagtttgccaatattttattgaggatttttgccccaatgttcatcagggatattggcctgaaattctctttttttgttgtgtatctaccaggttttggtatcaggatgatgctggcctcataaaatgagttagggaggagtccctctttttctgttgttcgagatagtttcagaaggaatggtagcagctcctttttgtacctctggtagaattcagctgtgaatccatctggtcctgggctttttttggttggtaggctattaattactgcctcagtttcagaacttgttattggtctattcagggatttgacatcttcctggtttagtcttgggagggtatatgtgtccaggaatttattcattttttcctagattttctagtttatttgcatagaggtgtttatagtattctctgatggtagtttgtatttctgtgggatcagtggtgatatcccctttatcattttttattgtgtctgtttgattcttctctattagtctggctagcagtctatctattttgttaatcttttcaaaaaaccagcttctggattcattgattattttaaagggtttttcgtgtctctatctttttcagttgtgctctgatcttagttatttcttgtcgtctgctagcttttgaatttgtttgctcttgcttctctagttcttttaattgtgatgcacttattctaaaatcaaccacatagttggaagtaaaacactcctcagcaaatgcaaaagaacggaaatcataacagtatatcagaccacagtgcaatcaaattagaactcaggattaagaaactcactcacaacctcacaactgcatggaaactgaacaacctgctcctgaatgactactgggtaaataattaaattaaggcagaaaaaaataagttctttgataacaatgagaacaaagacacaccataccagaatctctgggacacagttaaagcagctcacgcctgtaatcccagcactttgggaggccgaggcgagtggatcatgaggtcaggagatcgagaccatcctggctaacaaggtgaaaccccgtctctactaaaaatacaaaaaaattagccgggcgcggtggcgggcgcctgtagtcccagctactcgggaggctgatgcaggagaatggcgtgaacctgggaagcggagcttgcagtgagccgagattgcgccactgcagtccgcagtccggcctgggcgacagagcgagactccgtctcaaaaaaaaaaaaaaaaaagcagcattaggagagaaatttatagcactaaatgctataaatttctctcccacaagagaaagcaggaaagaactaaaatcgacaccctaacctaggctctttttctgggtctctttctttctaaagttttgcttattttgtttactgcacaatccaactaaaaccaaattttttacatcatttcatttgagagttaccttttattctaataaactgtggaataactggggttggggagggaattgcttaagttcataaggattcttgcaaacttgaatgtgtcgatacaagattttttttgaaaatttgtaattccatttcacgatctcaaccagaattcattatgtttaaaccacctgatatagactaaaacattttttcaggagcacaattgtaaaaaggatgcagagaaatatttacaacattacttatttctttgcagatttagtgaaagtatgtcctacttttacaaaatatcttattttcctctcttttttacacatataatagagaactaacttttataaactaaatgagaagggaatactaatttttaaattatgatgtcacttgtagaatttgttttaaaattgataaaatacacctctttttttattattatactttaagttctaggctacgtgtgcacaacatgcaggtttgttacatatgtataaatggccatgttggtgtgctgcacccattaactcatcatttacattaggtatatctcctgatgctatccctccccactccctctaccccatgacaggccctggtgtgtgatgttccccttcctgtgtccaagtgttctcattgttcaattcctacctatgagtgagaacatgcggtgtttggttttctgtccttgtgatagtttgctgagaatgatggtgtccagcttcatccatgtccctacagaggacgtcaattcatccttttttatggctgcatagtattccatggtgtatatgtgccacattttcttaatccagcctatcattgatgggataaagcacacctctttaagactgcttatagaatgctatggactcattggcttggttttttatttccttggtttcagtccaaagtgtaataagcttttcagaaagtttctcctggatgtgtaaagaataccaacagatatcagaaagcatctggctgaaagtttaagcagggagtattgttattcatccagcgaaggtggtaaaactctcctgtatcctcgaagtataactaactgagagagagaggccctatataaagccagctgacttaccctgcaattgcttgtctggcaaacagacaatttttaaagactcatatatttaggaatttttaaatgccatagaatcgatggacaaaatgattttcatttatcttaatccaaaatcacaagattgattatatacttaggttatatggaaaatcagcattagaagcattagttctacacctcatttgcatgacattattacaagatattaactgtaaaaatgaagtaaatataatatctgttcaccagatgcctaaaacatacaacattagtatagacatatagaaggatctgcaagcaactaaacaagtagcgtaaatcaaagaatatactgataaagtggtaagtgccttttgggcttcttaggtaataagcccttgtatctgccagaatagtctagcaaaaaatgcatttttttctttagcctagggaaacttttcacaggagatggagttttaggtattgtgtagatgatgggagaaattgcttttgataagcttcagtgaaaaaggaagggaatgtgtcattgcagatagagagggagagaaacactggtagttggtcgtagactggtagtggtgtagaaatagaaagcaaaacctattggacaaaggaactgaacagatttgttaaaaaggaatgagacaaacagatatgaaagataaggagtaagctgatacaggctggtgagctcactgatagcagagtccaccaagaggcatttagtggttttccttcagggcaaaaagtttgaaagagaaaaatatgatctctaaatagggctactcataaaaaatattgactattaagaatatagatacagtctgtatctttaagactgcaatttagtacaatttaattttgtttataggctaaacatttttataatttcatagcgattaacttgataaaaaagggaaaatttcttggtctttctgccaatctgtgtttctaactgaccctaaacagctctgttggtttcctgctcatgcattagagcttgtccatagccacaagcccctcttttcctgtcagccctgcaaagaccgccccttccaaattgccttctcctcttgatggcacatccaagcactagcaaattcggaatcatttttgacttatcgtttccttttaccctttttaatcataggtacaatcttttgcaagttgctttatctctctgaccttagttttttcatatataacatggagttaataaaacaatattgccattttcagaattcaataagttaatgtgtaaaagcacacaacatagtgcatggcacataatagttgagctttaattgtacatgttacttgttttttctatcttctcaactggtaataataactctactgaataggtagtaatttaatgaaaaaaattaaatgcattgtggtgtttgccaaaatttttggtttgtatgtatacactggattacagttttataaatttgtcctcatgaaattgattgtcaggtgttttctctttagttgttttgttaaaaggttaattggagcataacaaatgcatcactatcttatgtagctcctataaaaacataaatactttaaaataaatttgaaaattagaggggctactacatgcaactgattatagttctaattttagttatgaaatttacttctcaactaaggcacaatctctaattctgtatctgcattgatgactcagtgattttagaggttgtgagttgatattttcacatttctacctatggtaactcattacagaatgtctgatcatgatatcctgttctgtgtagcatcatagtggacacttcatgatatttctgctaaaccctttacctgtcataactgtctcctttctgttttgcaaattccctcagcaaagtcaaattcagtcctcacttggttataaatagcattataaaccatatttttgatttaaataaagcacacaaatctcaaagaatgataaaagcattgttcatactttgtaaaacttaatcattgattatagattaaaactgaaacaacatgaagggatcagactcactcacagaaggttattgagaaccaggaatcatagatttcattcaattcaaattatcagttgtacattgttgcttgttcaaaatcattttacaatccactttgcccacctccatcttcttacgttacaaagaactttcatctgctaggcactgctgatggtagaatgccatgcctttaaggtttccctttggaatataaagtctatgttttcaatagaattaactgttcgacagagagagaacaggatttctgtgcaaagatggtacagtgctagtaaaatatatagcccctttactgtctacattaagcaaggatgataccctaagaattctagctgctgctgttgatgctgctgcaactattactactactacttctactaatcacgagtatagaaaaatatctctttgatcctgtgtgtgtggtggtaaggttttgggagaagccattatctatgggtggtggaatcacatatattttaaagtcttttcgaccatgttcgttttctaatttttctcaagtaaaagattcttctatacttttaaaaaaattataatttaaaaaaaaatcttattggacttgtttaaattatcagatatttttcagttatgtaattggtttctggcatacatagacttttatcatttgctctgctttaacataccttcatcagttttataaatacagttcgaaaggattgttctaaatatatataaagggaaaacttcatttgaaagcaaaatctgtatttgggatatttgttgtcttttttgccttctaaagggcaatctagaaacactaatattgattggttattttgtttcataatactttatagctgattcttggcaaaaatggttgatttctctttcattgtaatacaataataaaaaagttactcagaatttctccagtgttttaagagctgtccaggttgacatccaaaaatttaagagagcgttagaacatgggatatctaattgttaattgagactggaattatttctaataatcttagttgtaaatactaatatcttattagtcttcttatctttgctggtataaaaatggttgaaacatttgaaattattttctcagttacagttttgccctgtgtagaagtgtgattatctaagaagtgattttttttcagatttcaaatatgaagtgttgtttaatactaacatatagttacaaagactatcgtgactatttttggtgttcttgattatgatttaatacttcatactttaggaaagacgatttagttctaaatatatttataagtgagttcctaattttttgtgtgctgtagacttctaagctattgatataattgaatgttaagcattttcattttttatggcttactactttaatgcaaagcagaataaaatactaatttatttcttaccctcagatgatgttgtgctgatgtatattttccagtcttgtcataagctcacaattacctacataatggtcttgaaccaaacgattaaatggaagacaacatttctggtcttccattttaattagtgtggtgcaagactattatgtaggtttttgtgtaaaatgtggaatgtgaatcctcaactctttagtcattcttcctattagatattgaagcaaaatttaaaatatgccatttgactaaagatatcaaagtgctttataaagatattacaatgtacctaagtcctgttttagagcaccagagagaaaaatagaagcgcatagaaggaataaattcagttgcacattttgtatttaatccaatgactcaaaaacatgggcacatatttaccaaattaaacgctttcatcaaacatcttcttgatcataccataaaagcccccaaagtttttattggtagcattgctctgattaatgaaatgagcttcagtgcaaaaacttgggctgttagaatacttacaaaaccattattgtccagttctatagctgctaccctagtccctggctctcatctttttatacctggtttaccacatcagcatccatgctgagaaccatgcctcagtcttgcactgctcaaatacatttagtcatgaacttatttattcagcagacctttgaggacctacaatgtgccaacaatttatttaaacaatatttgtatattttccatccccaggctaggacttatagtccccagttggttatcaaatctaaactaaactcagcctaaaaatttagagttctccaaatctcacttattcttgttctttcatgccagtctccttatggtaacattcattcttagcacaatgtgtgtctgttcccacttcttgtcctagtgcatcatctttcctcttcaaggatgtactccttctcctccttaaaattttaaaaatcatagctaaaactaccctgtgaggtgtgaggtttaggttggtgtagtcatctgacttggatcattctttttattctggatcctgagagtatctagaggaaattgcgtattctggttaatgagtggcttatcacatactgtcttaacaacactaagcactctttattcagtaaaagttcacaccataagaaaatatattgtaatgtatttagtgcttcttcggtgatatataaggtgttctacttagaaatttagatttgtaggaatgctggttaatagaagtttctaatatttactgtcttccatatttcctgatgttttgtttattttaagctattttaaatattttgcatttcatatttttaaccaggcagtatctctgttcctcattctgaacacccaatatggtactttgaacataatagggtttcataaagtgcttgattcagtaaaaaaaaaaattgaacatctactatgttccaggcattttgctggatttctggactacaatcatgaaaagacagtctattctctcagcctgcttatagtctagtgggaaagataggttgacagacatccctaatatagtataagttcttgaatacaggtaaatacaagagtatagagtacctagtctcttctaggagtgtcaagcaaacttttttagtagaagcagcctctgcaccaaggagggaattaggaaattttagtgcctgataatctccttcagtctcctaaattataccaaatgaaacaaagtaacagtgtgtgtttgctatgggaatacacctggaagtcaaatatccagcatgcactccctaaagagtgccaccctaaaccttcccatgtaggaatgccagcgccacctctgagaggaagggatggctaaacagaggcaagcagcagacaagagcaggaggattcctgcaaggggaatatgaacaaatacccagtggcaaaaacaaaacaaaacaccaaggggagttggaagaagtcattttccaaggccagaatgtagatttgtttggacggagtggatggggggatataggcacagtctttgagctgcagaagaatgccaggagccaggtcttaaaggattttaaatcagtgattttttaaaacctttattttcttaacagtagaattcttaagaattttaaaattttaactttagctcaatatttaaaaaataaaaacagaactagtttggttttgatgttgtttaaggtttattttgctgtgcgttttggtggggtggtagaagtgttagtttccttggttgcttgcttctctctgtactctactgaggttaggaattgtgttctagagtcacatcatgttactaactggggctttgtgttctgactggtagtagcaataggtttcaccctttgtgattgagtaggctcctaggaatttactttcatctattcaacaaaaatgtgtatacaggttgagcgtcccaaatctgaaatgctccaaaatctgaaacttgttgagtgccaatatgatgctcaaaggaaatgctcagtggaacatttttagatttcagattttcagactagggatgctgaaccagtaagtataatgtacatattcaaaaaaaaatctgatatccaaacacttcttttctcaaggattttggataaggtatgctcatcctgtattcttagtactagtaatgtttctctgagcaaaatagacacaatccctgacctcatggagtttccagtataatgccagagatggatattagaaagtaatcctgtaactataagctgtgagataaatgctgtacagaagaggtcacttacattgagagatctgtaaagaaatgacatttagatagaaacttaagtggagatctgaacaatgagctggtggtagacagtggtgtaggcagaggctgtaacatgcatgaatgccctggggggataaggtttgtggcagcagtaaagccggagagggaggtagaacccagattatggacagccaagttagggatttcgattttatcctcagtgtaatgaaaaaatcatcaaaaggttttgaatagtggaataatataagatgacttgttttattaaaatattaattatactatggctaatgtgtggagatttgctaagagaacaggtagaatgagtgagtatggggacatcagttacaggagtcatattctcatatccgccacatagtgggcactcattcaccattttgtggttagctgaatgatgactagatcactgcctctgttgtaacatctcaaattatttgcactttaaccatgagttaagttggatatttttgaggaatcatgaagtgttgctgatttgtactaatttttcctcataaaactttagatattttgaactgctgcttcatcttgccaagggtgaaaacaaagcatttattcattcattcgagaagtgcttaagctgtgccaggtactggctgagagctgaggatacagactgaatgaataagttaggcatgatatctgccatcaagtggcttgtagtctgggtaaccagagctgagtagagcaggcggtatgttggcctcatacctccgaagtagtatgtctggaattagcctgtctgtagtcccagcctcagtatctggaatatcctaggtgaagatgagatctcttaacaatttaattacattttctcctacctcctctttgttctaatgtatactactaaatttctacttcgatgacctttgctgaaaatacagccactcttaagtcctataacacatgtgcccaggaccggacaacctaaaaattaaatcctgattcttctttactcttagaaaagctgggaccttccttaatggattaaccttctattgctgcgtaacaaatgacaagaaatttagtgatttaaacaacacgtatttattgtctcgtgcttccatgggtcaggagtccaggcactgcttagctggctcctctgcttaaggcagcaatcaaggtaccagccaggctacattctcatatctagctcagggtcctcttccaagatcattcaggttcttgacagaatttgttcccttgtgcttgtaggaaggttgcttctctccacaggcagttcacaatatggctcttcaccttttcacaagtggcagaatagagagagtttactgctttgcctctctgaattcagggaaggcctaactcctcttttaagggttcacctgattacatcaggctctcccaggataatctcctttgataaacacaaatagctgtttgggtaccttaattacatatgcagaatcacttcacatttgccagataacataatcacaacagtaatattccatcatattctcaggtcctacttatactcaagggaaggggatgatagaagaccatggatcattggaggtcagtcatcttagaattgtggccacctcacttgctttttagtaaaaactctcacatcttttagtttccaacaagtgatgcttgtctcagtctcattatatctttgatgacttcttcaccattctttctcttccttcattccgtagatatcgagatttctcaaaacatctcatcaacagtccagcctgtttcttgaccctgtacctcttatttttcattggctgaggaccaattttcttgttctaaaaataaagctaagagcaggcacttttttctccagtcatttgctgaaaaacataaactcatcagataataaaacaaatgctgtttcttgcctgccttgtaccaatttagggagaagcctaggggagagtgactgattttagctccagccactccaggtagggaaaactgtgcatggatgattgggagaaccttacttagatgggggacaggcagttgtgttagtgagttctagcagatgcaccctccatggcatggaggagtattgtccttttatgccagggtaccttagaagagtatcggtgtgggttgtgacttatgagaggggctacacatgcatgggttgggacaaccatgtggtattaatctaccagtggtttcaagttatattgataaaacaaatacattcttacaatttaagtgtagcctttacacctgaattcaaccatctgctatctagcaaaattcagtatcttgcaaacttaaggctgtcaggcgtctgctgctaatttaaggatagcttggtggaatttgcatggagggagcagttctcttttctctttctgaaatgaccttcatctctctttttatctgattggtttatctgttaaaacccagcttaggaaaaaaaaagcttagacattgcctccctgctaaagcctttccatttctagaaacctatctccagtgtccatccttgagaaagtcaatccttcttttctctttgttctctacctggattgaagttgtttctgtcaattaaaactaccatattttattataatttatttacatgcctgtctcctctactagtgagatccttggggatagaaactgatttattaattttcttaactataaagtgcctgacctgtgacaaaagctcaatacatgttttgagtaaatcaatcactgcaccaactcaaatcacagtattccccccctccccgctgatttcaagtgaccacctctgatccccttagacacaaacattgaccctgattaaacctgtgtttgctttgatccatagatacacatttgaactacaggccatcctttctggacggggttttgttactctggcctacagttctttattctttttctccccactgaccagcatgtattaaagtcacaagaccagtctttcaaatagatgttttgaatggggcaaagccttttcatcttgaagccctgtaagtcactccagagagtgtgggaaaagcaaagtgcttggcatagggtacggtagtagcagaggatcttaattatagttcttcacatttgagtgaagttctgaagctatgaagtagaaagtaggaattatcatctcagttaccttagttttgatgtgtggaccaaagaaaatgttcaggaatcttcatattgtgaaatgtgcagtacatgtttaaggttgtagaatattggctctaaggagaattttatattcattcttaaaagagaactaagttagagacagtatcttcagattattgtttccccaaagacccttacctggttttactgttgaattaaacagtaaaattaaactgttgagttaaacagcattaaagatggtgcagtagcatcattagatgcatggccttggaagaacatagctttcatatcagaaatgtacttttcaaaaaatctatatttccttttaaataattttataatctcagctttcattttagagttgggggtacatgtgtaggtttgctatgtggatatattgtgtgatgctaaggttttgggtgcaaatgatcctgtcactcaaatactgagcatagtgcccaataggtacctttccagcccttactccttttcttttgttcccccctttggttgtccccagtgtctgttccaatctttatgtctatgtgtgcccaatgcttagctcccacttagaagtaaaaacatgtagtatttggttttctgtgccagtgttaatttgcttaggatgacagactccagctgcatccatgctgccgcaaaggacatgatttcattctttttaatggctgcgtagcatttcatggtgtgtgtgtatatatatatacatgtatatatataaatgtatatataaatgtactttttcatgtgagaattcttccaataaaatattgatgactgtggcataggagtgtaaaattagaagtgcttcatatggatacaatgcctacatttcagaaatcttcatgcagctcttctggaatgtgggcaaattagtctcccggttttctctatggtcaaccattttctattatactcaccttgtcagaagatatttaatttaccacaattaactaaaagcttttgtttaaaaagtatgtcttatggaaaacagaacagaggtgactaattttttgtgtgcagtaaatgtttttaagtaagcatttctacaaccaggtgaaggaaatgattaagtagaaattgggacttgcatgtaattttttaaaagattgtgaaacttgttaatattatgcatgtatccaacttcttttctattttcaaattattccagtaacaaaggtttatgcaataggtatactcccaaaaggttgtgttactatataatgcaaatgcatgaggatcagtgtttaagcaattagtcaaaacctctaatttacctcttcccaaacataatgtattatctcttgagttatctataagcggctagttgtaggaaaaaatgagaaaagctggctatatagcaagtttgttcatccagaaaacttcagggtttttagtttgaaaccttcatgagaaatttttaaatagttaaaagcaactgtaattgtagctacttgttatcagttgttcttcaggcctagttcttaaaagagaaattttaggagtatgctactctaatttcagcagataatcatttaagatgctgtcatgatagaaaacgactccagaataataaggatagtttatatgtttcttagagattctgtaatgatcaatttttagaaagtatacttcatacaaagccaaatatttgcttttgtttttttgttgttgttgtttttcttttgtttggttgatttcagccaaccccatttaccccattatactcaattttaatttaattgttttggaaaatgttcttccatttcattacaacattttacgttttctctaatatgtgtttacgtaaattcactttgaagaaatgcatttataccatcagctttatggagttattgcaaaccaatgccatcatcagtgagactataaatttttttttgcagactagtcttttcatcatgactttgcataacattgttccagctagatcaacaaattgattattatattttactatatcatgaataatgcccagaggcttagtaatatgagtgaaacttactggggatgatattttatttaagctgctatatttaaatggtgctgcaatttaggtattccattgaatctacatatagtgcatacttgacatagttaagaaaaggttttgttacttttcttatattgaatatttgagtaatacacagttctgttgtacgttaggatttgagtcccttatgtacaaaaatatttactaccttctttgtttcatttcagaatgaccttatttaaaagtgtatgaggctatttataatcaactctgtggaagtgattaaagaggtgtgaataataggttattggaacttgacagctcatagtttgctaaactagtgttagaacatttatgctgctcagatgtaccttattttccttaagtgagaatttctgttttgacatgtggtttgttgatataatatattgcataggtttttctcttttaagtggtttaccaaatcttgatattttattgccttattttacattttcagcttaatcaacattttatgcttaataagaataaccttggtacaggctataaacaaaacagtcagtatagacagagtacggtccttaagtggagcatcagccttccatttcaagctatcctataaaataaatacaatcaaattttttttaaatgggaaaaaaactcttttcttacagaaaatttgaaaacatttggtaggttaacattcagcagttgttactctgggaggaatgttagaactcctgaagaaatttgggatagccaatatatccataaaaagaagaggtgtgtatttggtatttcattaaatctttactaattttaaatacaaagaccagaaaaccacgaatttgaatcaattgaatttgagttagacagcctttttatttgagaataaaaagaaatctaggaaagcatttttaaaattttgaaaccattacttaatgagtttccactgttctcatggattcagagcattgtcatttggtagtactctcaagtattctcaagatttactaaaatgcattttaataatcgcaattcagttttccctaaccagccaggaggtaatgtttctaaaaagaacgtggttgggaaaactgtggcagagaaaatcaggcctcatagacaacaaaggttagagaaataaaagtaaaaattactgtgtatatattctacaataaacctgagaaattctttataaaaaaatccaaaattaaccacatttctcaacatgaaaaacttcctagactaattcatcactggacccatttactcagttgtgattttagcattagtcacccacaaattttgaattatgtaaattacacccattttaaagtttttgaactatctggcttgaaacctaatttttctcttgatttcctcttgtcttatttttcaagtctgagaaattattgtgcagcagtctatattttggtggaacttaagggtatatttttctagacctgacttcatttattaaaaagttggagtacaagtgtttatgaaaggatggtataattgtttgaaagtatcagttgtatatgcatacatataaatagcccaaatgttttataaaaatgaagtgtgatgatatattcaaagaacgctgcaataatttatttttggagtaccatggtactttggagagaactctagagacctgtttttaatccttttcttctaattactctctgtgtgaatttgaatagtttgcttagctttactaagcttcctatatcttttccttaaaaagtgatgataataccaactctaccaatgttacagtatgttgttctgaggatgttctggttaaagtgctttgtaacttgtgaattgcaagggaattgtaagatttgccaatgttgcacttgttgccaatctgaagattcaagctataagttgaatacaaagtatgtgacctagagaaaacattactctgccccctaccctcatcccacccccatgactcaggttgacagctattcttagttaagagatacttggggaaaagaggacagtttagagaacttcctgtaggtattcattgactcgtagttccttttggccttctcagacacttttcttaaaagacagttttatatcggtaacctcactctaaagtctgtagaataatagcacattctgattatagagtcagtctaactttataacgctagagtagtacagagaactctcatgttgtttaggttttccaactggggacatcctgtgatctgactgttcctagtgcacaagctaatcccacccatatcctgtttgtgagtaattggatggatgcctggaaaatctagtgccagattgtatagtgcctttacaacagaaatctctagtttgaattgatttaccctctacctaaacaaacacctctcataggtgagcctctactctaaaaaggcaagattatataacatagatccctagttcttgtttccatagtcatgctttggatggtactcccattgatctggatcagagacatatgtaaaatacaatttcagggtgttgtttttctgtataactgaagcagtagattttgaattgtatacctcttcccatgaatatagaagacagctttgtaggaaaaaatttcttcttaaatcatcttttttatctaaattattaagaataggaaaataccatttgcatcattgtagtctctcttacttcttgggttctctttacaagatatcaaaatatgtttaaaaaaaaaacccggatgcatataggtgtgtgcaagcttgtcgtaattcaaaaaaaaaatccattgttaaatttcaaagacgtgtaatagtgctagcatttactacagcattgtgataaagggcacaagctctagagtcagtatcctggatataaatgctaaatccaccacttactgaagaattctaccaggcatggcaaaaataaaacctttcttctaattgccatattcttagccataatttgtgaattattcaaaattaataatttgttttggaaccccaactcagtaggtataagccgaaaaagggaaggactgaaaagtatgaaaagtgatagcttcagtgagccctggttgataccagggctcaaattatattatgactcactctctttctctccccccacctcccttgtatttcttcctccctttcctctgtctgagacatagggcttgaactgattgctttaaaaggcaatgaatcttggccaggcgcggtggctcaacgcctgtaatcccagcactttgggaggccaaggcgggtggatcacgaggtcaggagatccagaccatcctggctaacatggtgaaaccccatctctactaaaaatacaaacaaaaaaaattagccgggcgtggtggcgggcgcctgtagtcccagctactcgagaggctgaggcaggagaatggcatgaacccaggaggtggagcttgcagtgagccgagattgcgccactgcactccagcctgggcaactgagcaagactccatctcaaaaaaaaaaaaaaggcaatgaatctctaatggttgattgtatttctgtggggtcagtggtaatatcccccttgttgttgtttctgattgtgtttatttgaatttttggtctttgtctagctagcagtctgtttcattaatttttttcaaaaaaactagctcctggattcgttgatcttttgaatgttttttcttgtctctgtctccttcagttcagctctgattttggttatttcttgtcttttgctagctttgggatttgtgtgctcttgattatctagttattttagttgtgatgtcaggttgttaactcgagatctatcttttcgatgtgggcatttggtgctataaatctccctcttaacactgccttagctgtgtcccagagattctggtacattgtctctttgttcccattagttttaaagaacttttttattatgtccttaatttcattatttacccaaaagtcattcaggagtaggttattcagtttccatgtaattgtatgagtgagtgaatttcttagtcttgattttgaatttgattgcactgtggtccaagagactgttaagatttcagttcttttacagttgctgaggagggttttacttccaattatgtgagcagttttagagagaaagtgccatgtggcaatgaaaagaatgtacattctgttgtttttgggtggagagttctgtaaatatctatcaggtccatttgatccagtgctgagttcaggtcctgaatatctttgttaattttctgtctcagtgatctcatattgtgagtagagtgttaagtttcccactattactgtatgagagtctcagtctctttgaaggtctcttaagaagttactttatgaatctgggtgctcctgtgttgggcacatacatatttaggatagtttgatcttgttgaatgtaaacctttaccattgtataatgcccttctttgccttttttaaaatctttgtttggtttaaagtctgttttgtcagaaactagaattgcaacccctgctttttgttttgttttgttttccgttagcttggtagattttcctcattccctttattttgagcctatgtgtgtcactgcatgtgagatggatctcttgaatacagcataccattggatcttggttttttatccagtttgccatcctgtgtcttttaattggggcattgagcccatttacatttaaggttaatagtgatatgtgtggatttgatgctgtcataatgatgttagctagttactttgcagacttgtttatgtggttgactttatagtgccactggtctgtgtacttcagtatggttttgtaggatctggtaacggtctttcctttccctatttaatgtttcctttaggagctcttgtaaggcagatgtggtggtaacaaattcagcatttgcttgtctgaaaaggatcttgtttttccttcacttatgaagcttagtttggctaactatgaaattctgggttagaatttatttaagaatgttgaatattgactcccaatctcttctggcttgtagggtttcggaggccattatccttagcaaactaacacaggcatactgcatgttctcacatgttaagtaggaactaaatgatgagaacacatgggcacacagaggggaacaacagacactggggcttaccagtggtggagggtggaaggagaggatcagaagaaataactaatgggtactgggcctaatacctgtgtgatgaaataatctgcacaacaaaccctcatgacacaagtttaactatgtaacaaacctgcacttgtacccctgaatttaaaagttaaaaaaaaaaaaaagccagtgaatctgttgtgaatacttacaggcagaactttttttttttttttttttttttttttgagacgaagtctcactcttgtcccccaggctggagtgcaatggcataatctcggctcactgtaacctccacctcctgggttcaagcgattctcctgcctcagcctcctgagtagctgggattacagcctgccaccatgcctggctaatttttgtatttctagcagagacagggtttcaccatgttggacaggctggtctcgaactcctgacgtcaggtgatccacccgccttggcctcccaaagtgctgagattacaggcgtgagccaccacgcccagccataggcagaacttttacttgagggaaggattgatataagattctgacattctgttttttatgttctttgtatataattgcatatgattttgaaatataaatcttttgaatttcttattaaacttgtaaatgatgtttgtaatcgtaggcaatttaagatttcgtactagttaaggtatagactgttagaatgaattcagggtaaactgtgtgtgtttgtgtactggggaaactgtgtagtggtagcttatagggtcatctgttaattagttactgagataggcagtttatataaattgctcattcagtccttaaaaaatcttataagtagttattattctcccattatatgtgaggaaaatacaagaaactgcttccttttgcaaaccaaacactgcctttaaacttagcatcttagactgccactacctgcagacatgactagaacttattaaatattgtcttttttcagtttaatagttacttagtaatatggcctttatctaaatttcctaattttgccatgttaaaatgtaatcctatttgaactatgaactttgaatttactttaataaaaataatttctaccactgctaatacaatgtaaaatttttaagcttagcttaagattaatgttactttggaaataaattgctacacatttacacacataatttatataggaaataaatcagtctatggaaatatatttagattataagcctttttagctacagaaacaaaattgtttagaatgaacttacatagcaagacaaaattgaaaacagaggctttagaagctagtgtaatataaagtttacaatttacaaaaattacttcatttaaatagcagttatttttacttactttcattgaagaaataaaatcctatgattcaacttacagtatacagtctttttgcatggagggatgattttgtaaggcccaaatcagtactgcttaaatcagtacaaagagtgtatttgttttatggatcatgtttctggttttttcacccagaataaaactttaaaaggaaaaattttcttctgtttccaaaaggaactattggggtatgtggaggggttgatccacaaccctaaactggcagagagcttgggtgtatatataagcagctaatctctcacctagttccaggtacatatctttgttgttgaccagaaaagtgcctgaccagaagtccacatacctctcctgttattttccttcctataaatgtggccttgcctgccagggagcattgccttaaactaaactggaaataagaagcagcattcattatactatacacttgatcttagccaaaaggccaagaagcaatcattcattatactataaatctctattgtatgaggagtaatagagggcagatatatcactacaggacatgcctagtatttttacatcccagagtatgttgcagggatcctagtatgtaaaaatctcagaagcataaacaaaatttattttaaattttagttttaataagcttttttaaactccgcatcctacttttagtgggatataagggttattaaatcacacttcaaaaagttagaaaccctacaaaggccatacagaaaataaaatcctctgaacctaggtgctactaattcactcaagataaatttaatcattttattatttatggatataatctaatggaataattttaatactttaatgaaaacattactttcaatcagatgtacagaactcacaggaaaacttgaaaattcttaattataactgtaagacctacgtagtataactaacagataaaaggattgtctttaaatctttatgaaaacgtgaaatgaagcaacataaacattaattcattgacaaaacagtttattttaaacacgtaagaacagaaaaggtggagacttggtggttgtaaatttggacaggaatatattgaaatatcatgtgtatgtggatacagatatcagtattctggttactgccctcaaaaagcatatgttctttttaaggagttaacaaagatatgataaaatactgaaagaataataccagtgatacttagtaagtgctaataactaccttcagaatatagtatagaccaacactgtccggtagaactttcttggatgaaagaaatgttctctattttatctaatagccactggctacctgtggttatttgagcacttgaaatgtatgctgtatgaatgaggaatttaattttatattttatttagaaatttaattaactaatttaaggatagacatggtggctcacacctgtaatcctagcagtttgggaggccaaggcaggtggattgcttaagcccaggagtttgagactagccttggcaatatggcaaaaccctgtctctacagaaaatttaaaaattagccaggtgtggtactgtgtgcctgtggtcccagctactcaggaggctgaggaaggaggatgtcttgagcctggaaggttgaggctgcaatgagctgtgatcatgccactgcactccagcgtgagcaacagagcgcaataccctgtctcaatttttttttaattcagtgtgaatagatacatttgattagtggctaaccttattaaattctacaattctcaaaagatgcttgtctcaggaacccttcatttaaaagtgatttacggccccagagtgcttttgactatgtgggttatatttactgatatttacagcattaaaaatagaaaaattttaaatatttattcattcttaaagttactacatgttaacataaaatatctttgaggaaaagctatttttaaaaaagagtggcattgttttacatgtttacaaatctctttaatgtgtgggttaatagaaggcagttgaattctcatatctgcttctatattctagctgttgcaatgtgttgaactgtattaaaacctaacctcacatagatagttagttggaattagcctttttagataattgtggatattctttgattaccaaaactcaccaagtagcagtttcttaaagtttagttgtgatgtaaaatataaaaccatatcaatgaattttatagttacattaaaaaatcactgctctcttgaactttgagtgggccttttacccacttactaatttgcaacatcatgcattagttatttggaagatattggttcactgaattgtccagatcttccaaatgttgacacattccattttacccaatcaaaaaatcactaatagcagcaccaatctcttcagaagggtcttcaaaattaggaaattgcaaaattcaactcagctgcagttaacatgttttccaaaattctcatttacatctgaaagctcaaattttattggcaacaaatttggccaatttgtcttcctttaaatgacaggcttatttggcttatttttgagaaaatatctgccaaatactcaaacctgaataaccattgtttgtcagttggttattctttcaagttaaatagatgtaccatgaaaaaagcagctacttcggtagcaacttaattccaggagtgattttccataagacatctgttatactttgatgtccagcagaagtgttttgtgtatacatcccattttgttgtacagaacactaaaaagacatacactacagggtcaaaacttattaaagtaatttttactacttcatcaaggatgtacttaagtgaaactggcaaattttttaactggaaatgagtggcagtgagggctacaaggatatagtttgctgctgctgccttggtaagtgctaagatgccaacagtttgacctaccattgtctttgtatcatcagtgcaaatgccaaagaagtgaaaagggcaagtactgccttagtattattataaaaatggttttgaccttgctgaaaagacaataatggaggaaagaaattgcttttagttcaaataagttaaagaagactccatgataaagatcaatgtaatatgcatgccctactttatttttctttacctgcttttttctataaaaataaaagtaggaaagcaattagcatgttaaaaattatttaaccatgttacttttaaaatcattctttgattcagcaattatttattaactattttgcataagttatttttgttgttgataagtgggcaatatgtaatgtttagaataatgatcatgccaataaagcatctgtgcccccactataaagcactgctatgtgctgggcactgtgtttatgtgcttttaaatgcattcacggaatcttcatggtaaccttaggaggtaggttttatagaaagttaactggaattagtgccagctcacaatttttatataactagataaattacttaacttatttggatttcagttttctcaagtataaaatacgaagctgagacatatcttcagatgcttaaccaggcttaaaattcattaaataaacatatatttcacagcaggataaccctttattgacacattatcagaatactctgaattttattaggaagccataaaaacaattaccaaatcattaacataaactttttgaaactttatgtccctttcattttaaaattcgttgagtcaatacatttttcataacacttaatcctttactgacacatgatcagaacactgaacacttgaccaaagacctaatgatagatgtgaacataatgtaaacatgaagggatatagtcactattgtagcggaataaaaaataatacaaaagcgcaaagaacaagagtcaggaaaggtcaagaagagcatcaataaagcagcagtgttttagtttgttcattagttcaacagatgtcttatatgcctttgttatgccctgtaaagcttggaatttagactactggagggaacaaaatgatgtccttgccctcatggagcttacattttagtgggggagtgtggtaggtaggatagtggcctcccaaatatgtccatgtcctaatccctaaaacctgtgaatatgttacattacttaaaaaaagattattaagtagcaaaggaatagggagattacttcgggttatgtggctaggcaaaatgcaatgttaaaagtggaagctggagtttgaagaagggtcagtggcagaatgatgcgacatgagaaagtttcaactggccatttctggctttgaagatggaaggggccatgtgccaaggaatgcagcagcctctacaagctggaaaaggcaggaaagtggattctcccctagagtctccagaaagaacacagttctgccaacatcttgattttagtccagtgagacccatattgggcatctaattgtgaaataataaatgtatgctattttaagcctcttagggatatgtcagtttgttacatcaacaatagaaaactaatacagagtaaaagaaagtaaacaagtaactaaacaagataattacaaactacgatggatgctttgaaggaaataggatgatgtgaaagagtaaaggataaagcatgttggtttaggtgatcatggaagtcttctttggaactatgacactggagtggaaaagaaagacccagctgtgtggagttggaaacagaatctcaggccaagggaaaggcaagtgtaggggcatggagtagagaaggcttgccatttacaaagaacaaaaacaggtcatttagcgagaatgaatagaatagtggaaaaggtgcaggcccaaaaatgtggagccttgcaggaatgatggaacaatggaaagccattgaaaggttttaagaaggagagtgatacattttgctttacatttttgaaagatcaccccggctgctgtgtggtaaatggaaacaagggaccaatgacatggtattgtagtcctgaggaggaagtttacaggcggaagcaaactagtggcattggtgcctggagaggattgttgatgatagacgggatatgagttccaaaagatgagtaggaatttgcccctagagaagaggaagaatacatagcagaagcatgaaagttcaggatgtctgggaaattgaatatactttgcagaacagtagcaagtgaagatgaagagattgtttaagcgataatgtatgcagtcgggagacccttattcgccatgtatgggagtttggaatttatggcatatgcaatggagagccatctgaaatttcgaatcaagagaacaaaacaatctcttgacctgaagttttgtgattattatgtatgtccttcattttcattctgaagtaaaggagaataataagggtgctttaagttttatcatcttagattctgagaagttcagaaagatttgattaagtacttgtcaatgaagtctttaataattcattgggaaccacacttttattctgttttgtttttttgtaaggacttttttttcatttatgggctctactcttctgctgtctttggagagacagcacagtaacctgttcagagcatgtccggagccacatggcctagggtacagtcctggttaccagtactaactggtcaacctttggcaagttatgtaatctaagtcttagtttcattgtctataaaataaggataataaaaattcttcaagtggcttctgtaaggattaatggattcagtgcatataaagcactgaatatgtaataagcactttgtggatcagggttgaagcagggtgcagaagtatacgaggagcattggttgtaagcttttctatatatcagtagtagaaatgtgacaggtcataatttctttaaagtacgtttaaaatacctatttcccacttcatttttatatatggtattaaattttctatttgtttgtgttttccaagaatgtccacttctttcatcacaaagcccacttattctccaaaaagtttatataagaaaatgggtagttagtttgcatgatcttctgctttattggatattatttattttctggaataagttatgtccacagatgattttaattcacactgctactcaggtaacttaggtaaaacaaaacatcaggattttttggtactacagttcaaatttatttaacttcccaacaatatattttaaataacaaagaaacaaaatactcaattttacctctgttgcacattagcaaggcataaaagagagattaatataattaggtaaggattcttatagtatttattttctgcatcacttttaatttagcatttaattatgtactatgacatttctctatataatacttcatgtatattactcatatttgcaaagattacgtatatctcagaggtggagactagatattaaatgtcttcattctcctatcttctgaagcacttaagtcagaggaactaaattattcattctaatttgacaactcaagcttgtaacatattataatgcttagaaaagctcagtaaaactaaactctagttacctataaattgtttgtttttaatacttcatcaggaaataaattccaattaaaatttcattaattatcccccttgttctttcatgtctttccaatgaaggagtagaaagactttctttacaaaactaggctcagggaattagtgtcccatgttgaaatttggctctcaggaaagctcccagaaaggaagtctcctagttggcaaccaataagccttacttagattactatatgttgtcattcccatggaagtaagggaggatccgtcctcaaactacatccttggggttcatgatctttttcttttcacttttcctatgatttctcttcccatggtcaggagttttaaattacacatacagcattactagtttgaaggaatcttggagaaccaaataaaatgaattagaatgtaattcttgtcctcttccttcatcttatttttcacaaccagttctgctactaatcgataagcctcaaagccaatcaaaggagaattaccttctgggattagtaaatgtcaaaatatttcttaaaattttttcataagatgagaaaagctgaaaatcatgccaactcctgtggttgaaactatttaaataattgactgtgtgtttgggtgtatgtgagatactataacctgtactttggggatgctcattgcccttgacaagtgaaagcgtgcgctctccacgaggcctccctcctggcgtctgtgcagtaagagagcagcttccctcagcactagctggaaggagaagtcacttgtgctggtgttcagcaagtattaccttccttttcattttatataatgttatgtagccatgaataggaaaggtaaatgtttttcatactttaaatagactactatctttcaaaaataagaaaatagatcttattattgtctcataaaaccataaaataaaaattgttttatttcaaaatccacagatatttatttacaacatagtattcatcaactaataaatgtcctttttacctttcattattctttagattttatttcagtatcctgattagtgtttttaattatacctcctattcaccgtgataacaaattcaaataacataaaaatgttaaggaagagagctgggtgcagtggcacataccagtaatcctaacactttggaaggccaagccggaggattgcttgaggccaggggctcaagaccaccataggcaacatagtgagaccctgtctctataaaaaaaaaattttctttaaattacctgggtgtggtggcacaggcctttagtcccagctacttgacagactaaggcacagaggatcgcttgagcctagcagtacacaggtgcagtgagctacgatcatgccactgcgctccagcctgggtgacagagtgagacctcgtgtctaaaatatacatacatctatagaaatatacacatatacatacgtacatacatgcatacatagagagccagcaaatattttgcccaatcccagttcagttttctaaagtttgccactagcaacattatgctgaaaattatttggctttttctttgcacatttaaaatatatctttaaaatttttttaaagtaatataaacattaaaataatatcaaaggaataagccagaaaaacaagtcactcctttggtacctgatttcctcatttgtatgtcctagacatcatgaattgatgttaaggcacatgtatagtatggatactatactgcatctactgtattttctggaaggatggaatcaaactattttggaagactttctatatcagtaccaaacaatatatcttagatgactattaaggtttttttgtaattaaaaacaagttttcagataaacatatgtatgcatatttgcatacatgtgttaatttgcacggtgccaagaaattgttagatcaacaggtcggcattttaaattttgataaatattgccaaagtaacacagcatataagagtgtactcttttatttaaaccttgcatatgtcaggcgttactgggacttttttgccgatttactaaacatcatttatctagggattagtatctacagccagtgttctagatgaggggaacagtggtgatcgaaacagaaaaaattcctgtctgaatggaacttgcattgtagtgtagtagataatcaatcaataagatattatagtgacaagtatttttaaaagaaataaattgagggagaatagggagtgcaatgggggtgggggtggtatttaaatagagcagtcataggagacctccctgaggaggtggaattgggcagttcataaagaatattacaggtagagtgatatgaagcaagaggccagtatacctggaatgcagtgagccggggtaaagtagaagacaaagtctgagagagacaggtgaggagagtcagcccatggagggccttggattacagtgaataggatgggaagtcattagatggtttgacaagattccactgatgctttagaaggttttgtctgctgtgttgagaactgactacaggaagacaaaggtggcagcacggagaccagataggaaccagtgacagtactcgaagtgagagatgatggtaccatcaggtagttagtggcagggaattggtagtgggtggtcagatcttgaatatatttttataggtatttccttccagagtagatgcatgggatatgagagaaaaagaggagtcaaaactatcactgagacttttggcctgaacaactggaggaatggaattgccgtttactgaaatagagaagactgagagaccaggaattgtatttggctatggtaaaaaatttcccattagaaatccaagtggtgatatcaccaaagacaaaagccacatgattatctcaatagatgcagaaaaggcctttgacaaaattcaacagcccttcatgctaaaaactctcaataaattaggtattgatgggacgtatctcaaaataataagagctatttatgacaaatccacaaccaatatcatactgaatgggcaaaaattgggagcattccctttgaaaactggcgcaagacaggggtgccctttctcaccactcctattcaacatattgttggaaattctggccaggacaatcaggcaggagaaggaaataaagtgtattcagttaggaaaagagggagtcaaattgtccctgtttgcagatgacatgattgtatatttagaaaaccccattgtctcagcccaaaatctccttaagctgataagcaacttcagcaaagtctcaggatacaaaatctatgggcaaaatcacaagcattcttatacaccaataacagacaaacagaaagccaaatcatgagtgaacccccattcacaattgcttcaaagagaataaaatacctagaaatccaacttacaagggacgtgaaggacctcttcaaggagaactacaaaccactggtcaaggaaataaaagaggatacaaacaaatggaagaacattccatgctcatggataggaagaatcaatatcgtgaaaatggccatactgcccaaggtaatttatagattcaatgccatccccatcaagctaccaatgactttcttcacagaattggaaaaaactactttaaagttcatatggaaccaaaaaagagcccacattgccaagacaatcctaagccaaaagaacaaagctggaggcatcacactacctgacttcaaactatactacaaggcaacagtaaccaaaacagcatggtactggtaccaaaacagagatatagaccaatggaacagaacagaggcctcagaaataatgccacacatctacaaccatctgatgtttgacaaacctgacaaaaagaagaaatggggaaagaatttcctgtttaataaatggtgctgggaaaactgactagccatatgtggaaagctgaaactggatcctttccttacacctgatacaaaaattaattcaagatggattaaagattgaaatgttagacctgaaaccataaaaaccctagaagaaaacctaggcaataccattcaggacataggcacgggcaaggacttcatgtctaaaacagcaaaagcaatggcaacaaaagccaaaattgacaaatgggatctaattaaactaaagagcttctgcacagcaaaagaaactaccatcagagtgaacaggcaacctacagaatgggaaaaaatttttgcaatctacacatttgacaaagggctaatatccagaatctacaatgaactcaaacaaatttacaagaaaaaaacaaccccatcaaaaagtaggtgaaggatatgaacagacacttctcaaaagaagacatttatttatgcaaccaaaagacacatgaaaaaatgctcattatcactggccatcagagaaatgcaaatcaaaaccacaatgagataccatttcacaccagttagaatggcaatcattaaaaagtcaggaaacaacaggtactggagaggatgtggagaaataggaacacttttacactgttggtgggactgtaaactagttcaaccattgtggaagacagtgtggcgattcctcaaggatctagaactagaaataccatttgacccagccatcccattactgggtatatacccaaaggattataaatcatgctgctataaagacacatgcacatgtatgttgattgcggcactattcacgatagcaaagacttggaaccaacccaaatgtccatcagtgatagactggtttaagaaaaggtggcacatatacaccatggaatactatgcagccataagaaatgatgagttcatgtcctttgtagggacatggatgaagctggaaaccatcattctcagcaaactatcgcaaggacaaaaaaccaaacactgtacgttctcactcttaggtgggaattgaacaatgagaacacttggacacagggtggggaacatcacacaccggggtctgtcgtggcatgggggtaggggggagggatagcgttaggagatacacctaatgtaaatgacaagttaatgggtgcagcataccaacatggcacatgtatacatatgtaacaaagttgcacgttgtgcacatgtaccctagaacttaaaagtataataataataataaaaaaaaaagaaatccaagtggagctatcaagtagataatttgggattcataggagaagtcacctgggatataaaactgggagtcaacaaatggcatttagagccatgaaacagattgaggaagtggaggaaagaaacgaaaaagaagcagttggtgagttaagaggaaactgatagagtcaagagaagagattgttttgaaaaggagagagtaatgaattatgtcaaatgctgctaaaagatcaagtcaaatgaggactgataattgtcattgcatttagcagtgctcacagtcatgacaagaacagtgttggtggagtgttgtaattggagtaatttaagataaaataggaagaaacaaattagagacacatgtaggcaacttttccaaaaagctttgaagtatagagggactgagatatagaattaggagtgctggagtttaatcaaggtaagagattagccagcatagagattttgaagccagagagagcaagaaagttgagagtgtacgtgagaagtgattataaaaatataagattaaaatggatatttcttctgttactgaggttgagcatctttttacatgtttattgggcattcatttttgtgtgtgcgaattgcttgtgcatattcttactgggtggttcatcttatgagtgtttaagaattctctgtaaaataaagatgtcagcctttagtcatatgtgttgcacatatttttcacaatttgtcgtttgtcttttgacttgatttttttctgtgtatagttatgggtttcatttcatgcttataatggccttcttattccaggtttgtaaaaggatttgcctatattttcttcttttttttttttattatactttaagttttagggtacatgtgcacattgtgcaggttagttacatacgtatacatgtgccatgctggtgcgctgcacccactaactcgtcatctagcattaggtatatctcccaatgctatccctcccccctccccccaccccacaacagtccccagagtgtgatattccccttcctgtgtccatgtgctctcattgttcaattcccacctatgagtgagaatatgcggtgtttggttttttgttcttgcgatagtttactgagaatgatgatttccaatttcatccatgtccttacaaaggacatgaactcatcattttttatcgctgcatagtattccatggtgtatatgtgccaccttttcttaatccagtctatcattgttggacatttgggttggctccaagtctttgctatcgtgaatagtgccgcaataaacatacgtgtgcatgtgtctttatagcagcatgatttatagtcctttgggtatatacccagtaatgggatggctgggtcaaatggtatttctagttctagatccctgaggaatcgccacactgtcttccacaatggttgaactagtttacagtcccaccaacagtgtaaaagtgttcctatttctccacatcctctccagcacctgttgtttcctgactttttaatgactgccattctaactggtgtgagatggtatctcatagtggttttgatttgcatttctctgatggctagtgatgatgagcattttttcatgtgttttttggctgcataaatgtcttcttttgagaagtgtctgttcatgtccttcacccactttttgatggggttgtttgtttttttcttgtaaatttgtttgagttcattgtagattctggatattagccctttgtcagatgagtaggttgcaaaaattttctcccattttgtaggttgcctgttcactctgatggtagtttcttttgctgtgcagaagctctttagtttaatgagatcccatttgtcaattttgtcttctgttgccattgcttttggtgttttagacatgaagtccttgcccatgcctatgtcctgaatggtaatgcctaggttttcttctagggtttttatggttttaggtctaaagtttaaatctttaatccatcttgaattgatttttgtataaggtgtaaggaagggatccagtttcagctttctacatatggctagccagttttcccagcaccatttgttaaatagggaatcctttccccattgcttgtttttctcaggtttgtcaaagatcagatagtcgtaggtatgcggcgttatttctgagggctctgttctgttccattgatctatatctctgttttggtaccagtaccatgctgttttggttactgtagccttgtagtatagtttgaagtcaggtagtgtgatgcctccagctttgttcttttggcttaggattgacttggcgatgcaggttcttttttggttccatatgaactttaaagtagtttttttccaattctgtgaagaaagtcattggtagcttgatggggatggcattgaatctgtaaattaccttgggcagtatggccattttcgcgatattgattcttcctatccatgagcatggaatgttcttccatttgtttgtatcctcttttatttccttgaccagtggtttgtagttctccttgaagaggtccttcacgtcccttgtaagttggattcctaggtattttattctctttgaagcaattgtgaatgggagttcactcatgatttggctttctgtttgtctgttgttggtgtataagaatgcttgtgatttttgtacattgattttgtatcctgagactttgctgaagttgcttatcagcttaaggagattttgggctgagacaatggggttttctagatatacaatcatgttgtctgcaaacagggacaatttgacttcctcttttcctaattgaataccctttatttccttctcctgcctaattgccctggccagaacttccaacactatgttgaataggagcggtgagagagggcatccctgtcttgtgccagttttcaaagggaatgcttccagtttttgcccattcagtatgatattggctgtgggtctgtcatagatagctcttattattttgaagtacgtcccattaatacctaatttattgagagtttttagcatgaagtgttgttgaattttgtcaaaggctttttctgcatctattgagataatcatgtggtttttgtctttggctctgtttatatgctggattacatttattgatttgcgtatattgaaccagccttgcatcccagggatgaagcccacttgatcatggtggataagctttttgatgtgctgctggattcggtttgccagtattttattgaggatttttgcatcaatgttcatcaaggatattggtctaaaattctcttttttggttgtgtctctgccaggctttggtatcagaatgatgctggcctcataaaatgagttagggaggattccctctttttctattgattggaatagtttcagaaggaatggtaccagttcctccttgtacctctggtagaattcggctgtgaatccatctggtcctggactctttttggttggtaaactattgattattgccacaatttcagatcctgttattggtctattcagagattcaacttcttcctggtttagtcttgggagagtgtatgtgtcgaggaatgtatccatctctcctagattttctagtttatttgcatagagctgtttgtagtattctctgatggtagtttgtatttctgtgggatcggtggtgatatcccctttatcattttttattgcgtctatttgattcttctctctttttttattagtcttgctagtggtctatcaattttgttgatcctttcaaaaaaccagctcctggattcattgattttttgaagggttttttgtctctctatttccttcagttctgctctgattttagttatttcttgccttctgctagcttttgaatgtgtttgctcttgcttttctagttcttttaattgtgatgttagggtgtcaattttggatctttcctgctttctcttgtgggcatttagtgctataaatttccctctacacactgctttgaatgcgtcccagagattctggtatgttgtgtctttgttctcgttggtttcaaagaatatctttatttctgccttcatttcgttaggtacccagtagtcattcaggagcaggttgttcagtttccatgtagttgagcagctttgagtgagattcttaatcctgagttctagtttgattgcactgtggtctgagagatagtttgttacaatttctgttcttttacatttgctgaggagagctttacttccaagtatgtggtcaattttggaataggtgtggtgtggtgctgaaaaaaatgtatattcttttgatttggggtggagagttctgtagatgtctattaggtctgcttggttcagagctgagttcaattccctgggtatccttgttgactttctgtctcgttgatctgtctaatgttgacagtggggtgttaaagtctcccattattaatgtgtgggagtctaagtctctttgtaggtcactcaggacttgctttatgaatctgggtgctcctgtattgggtgcatatatatttaggatagttagctcttcttgttgaattgatccctttaccattatgtaatggccttctttgtctcttttgatctttattggtttaaaggctgttttatcagagactaggattgcaacccctgccttttttaattttccatttgcttggtagatcttcctccatccttttattttgagcctatgtgtgtctctgcacgtgagatgggtttcctgaatacagcacactgatgggtcttgactctttatccaatttgccagtctgtgtcttttaattggagaatttagtccatttacatttaaagttaatattgttatgtgtgaatttgatcctgtcattatgatgttagcaggtgattttgctcgttagttcatgcagtttcttcctagtctcgatggtctttacattttggcatgattttgcagcggctggtaccggttgttcctttccatgtttagtgcttccttcaggagctcttttagggcaggcctgctggtgacaaaatctctcagcatttgcttgtgtgtaaaggattttatttctccttcacttatgaagcttagtttggctggatatgaaattctgggttgaaaattcttttctttaagaatgttgaatattggcccccactcttctggcttgtagggtttctgccgagagatcagctgttagtctgatgggcttccctttgagggtaacccgacctttctctctggctgcccttaacatttcttccttcatttcaactttggtgaatctgacaattatgtgtcttggagttgctcttcttgaggagtatctttttggcgttctctgtatttcctgaatctgaatgttggcctgccttgctagattggggaagttctcctggataatatcctgcagagtgttttccaacttggttccattctccccatcactttcaggtacaccaatcagatgtagatttggtcttttcacatagtcccatatttcttggaggctttgctcatttctttttattcttttttctctaaacttcccttctcgcttcatttcattcatttcatcttccatcgctgataccctttcttccagttgatcgcattggctcctgaggcttctgcattcttcacgtagttctcgagccttggttttcagctccatcagctcctttaagcacttctctgtattggttattctagttatacattcttctaaatttttttcaaagttttcaacttctttgcctttggtttgaatgtcctcccgtagctcagagtaatttgatcgtctgaagccttcttctctcagctcgtcaaagtcattctccatccagctttgttccgttgctggtgaggaactgcgttcctttggaggaggagaggcactctgcgttttagagtttccactttttctgttctgttttttccccatctttgtggttttatctacttttggtctttgatgatggtgatgtacagatgggttttcggtgtggatgtcctttctgtttgttagttttccttcttacagacaggaccctcagctgcaggtctgttggaataccctgccgtgtgaggtgtcagtgtgcccctgctggggggtgcctcccagttaggctgctaaggggtcaggggtcagggacccacttgaggaggcagtctgcccattctcagatctccagctgcgtactgggagaaccactgctctcttcaaagctgtcagacagggacatttaagtctgcagaggttactgctgtctttttgtttgtctgtgccctgtccccagaggtggagcctacagaggcaggcaggcctccttgagctgtggtgggctccacccagttggagcttcctggctgctttgtttacctaatcaagcctgggcaatggcgggcgcccctcccccagcctcgctgccgccttgcagtttgatctcagactgctgtgctagcaaccagcgagactccgtgggcgtaggaccctctgagccaggtgtgggatatagtctcatggtgcgccattttttaagccagtctgaaaagcgcaatattcgggtgggagtgacccgattttccaggtgcgtctgtcacccctttctttgactcggaaagggaactccctgaccccttgcgcttcccaggtgaggcaatgcctcgccctgcttcggcttgcgcacagtgcgcgcacccactggcctgcgcctactgtctggcactccctagtgagatgaacctggtacctcagatggaaatgcagaaatcacccgtcttctgcgtcgctcacgctgggagctgtagactggagctgttcctattcggccatcttggctcctctctgcctatattttcttctaatacttttatggtttcagttttttttctaagttaaagtctttgatttcgtgtgggtttcattttggtgaaagtcttggggtggggatctgatttttttccaaatgatttttattaaataatgcattttccccccactaatttgcaagactcctatttgtttagggtctattttgtattatattcaagtccattgattgcccatccctgtaatagtacaaatctatttccatttctgtagcttcaagataaagtttactctctggtatatctagtttatgttctcctaccaccaccattactattatttttctgaattttcctgagtattttaatgtgtttgttttctcagataataataccaacagtatgtatcaagaatatatgtgcagtattaccaagtgttttgcatatatacctattttcatcattgtgataaccatgtcaggggtatactattaatatttcaatcttggcaatgaggaaactgagacattagaagaatatataacatgctcaaggtgacaaggctagtaagcagtgaagctgtgatttgagccaggcagttaggttccagagaccatgctcctacttctctatataaactgtagacgtgttgatctaagtcatttagatttagaatccaagataccatgtgtagcatttggatcaaaattgcattgaatttatagaaaaatttaggtagaattgacatatttatgacacaaaatcattctattcaaaaccaagatatagcttttcatttattcaaatatttgatgacttttacatagaatgctagttttcttcatgtaggtcctccatgttttattttaagctttttccttcatgtgtttcatttgtgttgctagtaatagaattttttcctctttcgtgtttttagctggttattgttgattattggaaagctgttgatttttttctgttggaaagatattgatttttttcttttaaatttgtaattaaccatttaccaaatgtccttactgctaatagtttttttattgatttttcctgaattttctataaatgttattctgcaaataattttgcttctcctttctaatatttatactttctcttttattctttttaaaaattggtttattcttgtaaatcattgttaactaatgatgaaactaagcatctttatcttacaaatgcctgtcattcataatcatttattatgatactaacttcagttttcttttcatgcaaaagtatcagcaagggaatggtgaatttttttcaaatgcctttctgtatctatagatgtcgtttgtcctttatgttaatatagtaaaagcacatatattttctaatattaagtaatgtttgcttcattcttttaatttaatattttatttaggaccattgcatattttatttaggactgagcgtgtgtgtgtgtgtgtgcgtgcgtgcgcatgtgtgcctgtgtgtgtgtgtgtgcacatgcatgtatatccttcctcagattttaattattatgttgacttcctagaattcagacttttcattttcctctctctttaaaaagttacaaaattatcagtcctttacagatctgaagaaatttacctgtgaaaacacctggcagttttgggtggttaactactatcttcctaaatttattctatgatgtgtctgtctatgtctcttaaataattttccaagttctataatacagtgataattatttacattttcctagaaagggttttcatctaggttttcaaatttatttgcttaggtttggacaaaatatttaaaaagtaagtttcctaaatttctttatagttgtagttaactccatttgcattttaatattgaacattcgtgctgcttaatttttttctctaggattaagtaggctggtaatttatcttttttcttgattctttaaagtttgggcttttggactgatatatcaattacatggcttctctattttttgactaagtactttccgcatttgtatttttgattttgtcttcacacttagatttcgtcatactacctatcttccataagtaacagtttctatgaattaaaaagcatccttttataaatgcagactttacttatgaaggaaatattagttataggtaatttagtgtgaattattttactccaaatactttcctcaacacaaaaaggaatcatcttttttgggactgaatttaatttaatctcttgaggactttgctttttcactgtttcatctatctgtgagttgtacgaacactggctgaaattagctcattgagtggatgggagtttagataaaaggggaaaaggggaaggtaatttgggaggatggctcttgttgggggcagatagatacaggatctgtggaggaagagagaaaggccagaacaagaactgagagagtaacaaagaaatcctacgaatccttagtaactttcatgtaatgagagacaggagaaaataagaactagcattctgtgagcaatgacaaccctttccctgcgtttgcctatcagttttcattctattaatagcatgtatctgaagatattaaaaaccaccaccccttttgcaggggtaaaatttagaatgattgacttttattggagttatgttttaaaatatattttgaaaatataaaaagagtttatgaagattttacctagagaaggatttaaaaatttcacccaaaatttactgaatcattagaattactaaaatctaacatgttcatggtacttggggtactctaaaaccattatgatacctatttttagattatttaaattaaaattagataatatacacattgttcattattatataacattacatttgtatattacattatatccttcattatacagtaaaatatatatagacagtaagctaacattatcagttcggtcaaaagtcagattaacaaaaatttacagtaaatgcttagtatttatagacaagctcctctttcctggagtaatattatatgcagaagttttctctgatcctatgaattaccacatgacctctccattccattttgtgtacctgtttgcctggtctggttatgactgcagttttgttttcattttcctgaattgttgctaacacttaagtatattgacttgtttcttcactgagaaaagaaaaaagtgtggtcccatattcagttcagcaaataattctatacctactatgtagaaggcagtatgccagtgactgtatttaggataaaatgtgtgtgtgtgtgtgtgtgtgtgtgtgtgtgtgtgtgtgtgagagagagagagagagagagagagagagagagatgttattgtagtcccaattgatgttaaagaataatggatggaaacacttggtcagtgtttccaccgatctttgcatcactcagcattcatgcctaaatttgtggtgttctcagaattgtgctaatgtgtaaaatattcttatacttaatatgagtacagtctgttggctctgtagaacacaactcaaagtgtatgtatttttctagttatttcttaaattatgacaatatgcttatctgatatatgtggaaccagtttgttaaaagtagtctgttagtttttaaggattagtcttctaagaaagattttctctttcttttctaacatgcaaatgagtgcatgcttaggggcttgatggcaatgagtgggatatagttaagcacatattaaaggcataacataataagggtgtcctctggaaagaaaagcctttacacaacccaaaataggtaaaaatgtggccttcgcctgtggctttaatcaatacatgccacagttatcgtcggacaagaattgaagccctcaaagttaatcttttccatctttcttccccacttccctaagtttcttcctctacatggccctatcctgctattccaagtcacaataaatgatgatagtgagattctttatgaagcatttaggtgatcttgctttcataccaatgaataaaaaattgagaatgtattggttttggaaccatactcatataagttatctaatgcttttttatgattgtacattacttaagaaacagatatttacatgagactttaattactatagttgatacagtgctgcatgcaatcatgtgctaaaaataatatgtgaaagttcttgtaaagatttattgacctcgcaaataaactagaaaatctggaagaaatggataaattcctggacacatacaccctcccaagtctaaacccagaagaagtcgaatccctgaatagaccaataacaagttctgaaattgaggcagtaattaatagcctcccaataaaaaaaaatgtccaggaccagacggattcacagccgaattctaccagaggtacaaagaggagctggtaccattccttctgaaactattccaaataatagaaaaagagggaatcctcccgaactcattttatgaggccagcatcatcctgataccaaaacctggcagagacacaacaaaaaaggaaaatttcaggccagtatccctgatgaacatcgatgtgaaaatcctcaataaaatactggcaaactaaatctagcaggacatcaaaaagcttatccaccacgatcaaatcagcttcatacctgggatgcaaggctggctgaacatacacaaatcaacaaacgtaatccattgtataaatggaacaaatcacaaaaaccacattattatctcaatagatgcagaaaaagcctttgataaaattcaacaccccttcatgctagaaactctccacgagctctaggtattgatggaatgtatctcaaaataataaaagctatttatgacaaacccacagccaatatcttactgaatgggtgaaaactgcaagcattccctttgaaaactagcacaagacaaagatgccctctctcaccactcctattcaacatagtgttggaatttctggccagggcagagacttggcatgcaagagaaagaaataaagggtattcaaataggaagagaggaagtcagattgtctctgtttgcagatgacatgattgtatatttagaaaacccctttgtctcagccccaaatctccttaagctgataaacaacttcagcaaagtctcaggatacaaaatcaatgtgcaaaaatcacaagcattcctatacaccaataacagagaaccaaatcatgagtgaactcccattcacaattactattaaaagaataaagtacctaggaatacagcttacaagggatgtgaaggacctcttcaaggagaactacaaaccacttctcaaggaaataagagaggacacaacaaatggaaaaacattccatgctcatggataagaagaatcacaatatagtgaaaatggccatactgccgaaagtaatttatagattcaatactgtccccatcaagctaccactgactttcttcacagaattggaaaaatctactttaaacatcatgtggaaccaaaaaagagcccacatagccaagacaatcctgggcaagaagaacaaagctggaggcatcacactacctgacttcaaactatactacctggctacagtaaccaaaacagcatggtactggtatcaaaatagatatatagaccaatggaacagaacagaggcctcagaaataacaccacacatctacaaccatctgatctttgacaaacctgacacaaacaagaaatggggaaaagattccctgtttaataaatggtgttgggaaaactggctagccatatgcagaaaactgaaactggaccccttccttacactttatacaaaaatcaactcaagacggatcaaagactgaaacgtaagacctaaaaccatgaaaaccctagaagaaaacctgagtaatccattcaggtcataggcatgggcaaagacttcatatctaaaacaccaaaagcaatggcaacagaagccaaaattgacaaatgggatctaattaaactaaagagcttctgcacagcaaaagaaactatcatcagagtgaataggcaacctacagaatgggagaaaatttttgcaatctatccatctgacaaagggctaatatccagaatctacaaagaacttcaacaaatttacaagaaaaaaacaaccccatcaaaaagtgggcaaggatatgaacagacacttctcaaaagaagacatttatgcagccagcagacatatgaaaaaatgctcatcatcactggtcattagagaaatgcaaatcaaaaccacaatgagataccatctcacaccagttagaatggtggtcattaaaaagtcaggaaacaacaggtgctggagaggatgtggagaaataggaacacttttacactgttgtgggtgtgtaaattagttcaaccattgtggaagacaatgtggcgattcctcaaggatctagaactacaaataccatttgacccagccatcccattactcggtatatacccaaaggattataaatcatgctgctataaagacacatgcacacgtatgtttattgcagcactatttacaatagcaaagacttggaaccaacccaaatgtccatcaataatagactggataaagaaaatgtggcacatatgcaccatgaaatactatgcagccctaaaacaggatgagttcctctcctttgcagggacatggatgaagccagaaaccatcattctcagcaaactatcacaagaacagaaaaccaaacaccgcatgttctcactcatgggtgggagttgaacaataagaacacatggacataggaagggcagcatcacacaccagggcctgttggcggggtgggggtctaggggagaatagcattagaagaaatacctaatgtaggtgatgggttgatggagcagcacatcaccaaggcatgtgtatacctatgtaacctgcacgttctgcgatgtaccccagaacttaaagtataataataaaaagatttgactataaggatgatattatgctataatacactgttcaaatattatgagattctaatggttaaaattgtttagtcattagaaaatatctgcagtggtaaattgttaagtatggaatttcagtaccccaaaataagtatacacacaaaagtttaagaatatttttcatcagtgtaacgattttcagtcaggagcctttgcacataatgaagtatgtaggctgtggaatctagccaacctggctttcactcttcaacttagtagctacataacctcagacaggctacttaggtactctgtttttctttgtctgtcagagggatatataataatacctacttcttaggagctgctgtaaagatttaccaagctaatagtagtagcagaaaacacttctctagtccttactgtgtaccagacactgatctaagcacaatacatttaaaaatcattatatcttcacaaccactgtatgcagtggttactgctgtgtctggcattaaatattagcaaataataccaacaactaccaccatcaagaagtcaacatgtctttacattctgatgacaataagtatgcattgaaaatgttaccatcttctattgaagtttaaattcatattatctaaagtcatgtttaaagatttttaaaactgtttaccatattttttacccttgctttcttcatattttaattaaaatcagaatcaagatgtgatgatcacctatgattgttattttcagataaactatactatattttcagccacaggttaaacagttcaggggtatagagatcattggacagaacatttagataactgaagccctcattggctactagaatttatcaagggcctgcattactctgtatgcttttggtggtgggccattttttaaataagctgtgtagatccacaaacaaaatgatagattcagaaatacaagtaagcttgactattaatttaagtttcagtcattaatatcagcagttttcactgttttttttctctcagctaagtgacagaagcaaaagacagtaaaaatcttggaaaatagttatcggtctttttttccatctcagcagataaaatacattgattttttggatttttcccattttatgacacatatcaaacatgctctgggaaaattcacaagatagttataaaatatatacaatctctgtgttttggatttatgacataatctatcttacaatggcagcttatacaggggacaggaaggagttctgctagagtcccagaaagtgataggcagtctttaagagtgctttgagctatggttgacttgggcagaatagaacacccagtatctctggttaaaaagaactcagtaaaaaaatatgaaccatgcaagcaagcatttgaaccagaatgcatatatgtcttaaagcctaatttgggggaagttttcaagcccaaaatactctagatataaatgtgttaaatgtgcaatccaaggtcaaccagagaacctacagctaacaaaattgataatataatgctaggctgcaatattgcatcattaaaaggtaagaatggcatcagcataaaaccatggccaactcaagataccaaagatgtccagaagcctcccttcgcaaaacagcaggaatgtcagctatctaggcatgcagtttcactggtcaagcatatttgagagccttgcagtgagccagaccttacatgatagccagatcttagtggagtatagaattgattaatcctcagcaaatacttaccatgttctaattttagcttgtcatatataaatgccaacttaaaatgactttatcaagtaggttgctaataagtactgaaagtaaaaatgaaagttaatagcattgtgcatcatttgccagtaagcatctccattccgtgtgtgtgtgtgtgtgtgtgtgttgtgtgtgtgtgtgtgtgtgtgtgtgtgtatttgcctcttactatgagttaaaggcccatcaggaaactcttacagtcaggaaacttaagcttatagtcagctgtgaaacagccttttaaaaatcattccccttacccacacacggacttcactctgcttgtagtgtggctgctcatagtgtggctgtttttccatcttgacacgtattttctcattactatattaaagtgacttttttctttattgtattgatatactgaatagacctcctcagataatatttatggaaacataaaaccattctggaaggcagtttaacagtatctacttcataagtcttcccttttactctaaagtttcacccctactaatctgataagtatatataaggaatggccaaaattatacatatttacaagaaaaattatggcattgttgctagtgcttaacacaggcaaaaaaattatcaatagatcataggttgaagtatatctgtatgatagaatgctgtgtagctatccagagggaaataagaaagctttatgtatatagatgccccttgacttatgaattatgatggtgttatgtcctgataaattcatcgtaagttgaaaatactgtgaaatcgaaaatgcatttaatatacttaacctatcaaacatcatagctgagcttagcctgccttaaatatgcctgcaacacttatagcttacagttgggcaaatcataacatgaagcctatgttttaatatgatgttgaatatctcttgtcatttattgaatactgtaccaagggtgaaaaacagaatggtgttgcaccatcataaagtcaaaacattgtaaatcaagccataattagtcagggactgtctgtactgacatagaaaggcttccaagacatgttataaagtggcataatataagtggcaaagcagtatgatgtgatcatgtgtattttgaattatatatacacacatttgtatataggtgatgctggatttatattaaatataagataaggtgaggtttgtgttacaactaagtaagaaaagtatataaaatgagttacatcatgcctacttagtgcattgaaataattaataaaatttgccattatttttatctttatggagtggattgaggaaggaaaaatagggctgcctttactaactttacatgttttgcattgactgattttacatgcattacttttataataaaataagagagaaaaccatttactcttgggaaaagatctggaaaagcatattcatactaaaatattaatggcataacaaaacttgacgtttttcttctgacacaagatattgaagaactcctaatatgtgagcacagtggtgacctctggtactcttttggacaagagtcttcctaaagtctataaaagctgttttggagttttggttatttgttttcacctttaaatatctacccatattttcaattgtatttcttccttcgtgttctcaggagtgtgtgtgtgtgtgtgtgtgtgtgtgtgtgtgtgtgtgtgtgtgtgtgtgtagagggatatgtatacatattatttaagcatttaggtgattatttttcaagaattgttggaaaatttaaggaagcagtggaaagaataactgatagtaattactgcctagttatctaaataaagtgaagcttctttttctcccttcttccgaatcttttcttagcaaataagaatcaccctgaaagtagtttaaaagagatattctagtgaccatacccaatgaagtactaaatattcatcctgttagagtgattattgcaaggactctaaaggaaaacattgattatactagattatttattttatagaattttattctcagcttatactcctggttctatgaactatagaaatcactcagaataataaaatgctgatgttatattttattgaaattcattaaaaattatagaaaaaggtgctcatttgaaaacttccaaatgtcagttattcagaatgacaaacttaattatatagaaattgactaatttggttgattctttctaaagtcagtgttggattaataatgtaatgcatggatcattaacagcttaaaaatacttgtggtaaacttgatgatgtaatgctattttgttaggaaagatggcctcttttcttaagttgcaatcctttaaggattcaaagccctaattgtacataagcaatatcgtatgctgtaggctcgttatcattggaggggaggtttaatatagagtttaagagcacaaaatatggaatcagactgttgctgttaaaatcctggctctgccacttcctagctgtgatcttagacaagttactctctctctgccttgattttcttacatataaaacaaggatataagtagtaagtggtagaactcttatttcataaggctgttataagattgttgtaagaatttaatgggttagtatttataaagcaggtctatatatagtaagtattcaataagggtagctactatttgtcattttggtcatgtaatatctagtgttacatatgtgtgttgtcaaataaattagttgttaacattatttaaaagaaaacattgaattacaatctgttttaagcatcttttttatttttctgagatgtaaaaactgattgttttactagttggttttgattatttgtttcttgtttgtattacagttacaaattataatactgtggtagaaacaaattcagattcagatgatgaagacaaactgcatattgtggaagaagaaagtgttacagatgcagctgactgtgaaggtgtaccagaggatgacctgccaacagaccagacagtgttaccagggaggagcagtgaaagagaagggaatgctaagaactgctgggaggatgacagtaagtctgatttttttttgtaatattgtattctcatgattcgttttttaaaatatatattaactgaaaagataaattggatgaaaagtttgaaatcaatagtaaatttggctatcaataaatattaggtgtcctacttactaaaaagtggattatgaagcagaataagcaagttattttgaccatatttacaatgcatataatgtattgaaatttagtagaatttattaaccaggatcaagctttccaaatattgttgatataattgaacctacctttaattttttattgtaaccccgaatgaatactctacttagaaaccaataaatatcatatagatatagtgaaattataattcaatatgcaaaaatcccaaacacatataaatcatggaggtatttttagtgcttgtaaacctctctatacatacatcagaatcctttaagtaaggtggttttttcactttaaatttttacttttactcaaagtatggctgagtggaaggagcggtgaaagtaaggagaccctctacttgctgcactttcagtgagtaaacactgaaagtttaatcttcttcctcatctgtcaaatggagaaattggacctagtcttttattctagctctaaaatttcttctttctacttttcctaataaactaattaaattatttagcctgtcttgccaggttaagcaccaatgatataaaaatgggatatggaagtggcatagtattaattagagaggttggggatcaggaacaagggcatcagaaaaggtaaacaagtacacgcaataaatcgaatccaagaccagtcaaaggagaagcttcccagcaagaattcaagttcaaagaggtcgtctagacaagatatcaaaactaaaatctggaaaagtgggtcaggcatgcaggtcaggatattatctggataatgaaatatggaagtgtagataaaagctcagataataggcacagattggcagaagttaagatttctacaatatgacaaatctaatggttaacaagggacttttgaaataatgtaatcagccctctcattttatagtgttgttcatttgtccattcagcaacctctgtagaaattggttgcaactgtggataagactctctgcatgaatgatgtttatatggcttaatggagaagagagataaataagtcacaaatacattatagttttatttaggtatacattatatggcagcatcaaggaggagcatccgaattagagaaggaaggagaagtcgtagaagagttctgagtgaaacagagtggtctttagttcttaaggaccgatggaggttaattagacaaagtacagtgaatataaggttttcaggcaaaagaggcaacatacatgaagccacagaggcttgagcaaagtgttcacagaaaatgagatcagagaagtaaacaagggaaaaaatatgaagtgatttgtgtactatgtcaaggaatttgaaccttatcatggaagctatgagaagaacatcattaaaataatttataaataagtctggtgtaatatggaaaaagaattttagagggagggaggctgaggtagtgtcttcaacgagacggctgtaataatcaggcagtgttaagggtttttgagttaaagtagttgcccatgggatgggaatagaagggagataattgaaagacagaaaggagatagaatatataagaattggaaagggctgtttttagatacagtcccaggtttctagaaagtgagactcagagaagttgacttgctcacttatggcagctggttaattgtagagctatgaacctgttaatgttaatactaagctcaaacatttttggagcaagggtttcttatgtatttcttatctgtggcctgaattacgtagttgatccagagtcttaataggtaatcaagaaggaaatgatctgtctggggaaaaaagggggcaataagaataaggtagatgaagggagaaaggaaggtgaaaaaatcagtgaacaggttctgcttctgagaatatgttgggttcgattatttgaactaaccctttttactgaaaacaactaatggtgctagattaaaaacaaaaacaaaaaacttcttagcacttctaaagagctaagtaagacactaccttgtcaaaatctaagtgaaaaaaggaacccatagaagtaaacagagcagatcatagaagacactttggtcctgaatacatttgcctagccagtgaaatgtaaggtgattttcaggcttctgagaggaaacaaagcccaagaccaccaaagatagtttaatagcagtatggattatgtctcgactgtgaggatgaactaaaagcaaaccattttccatctctaccatccttgagagtgaacaagcaaagtttccctggttaggtattcagggaatggaggattgtctttgagaagtagtaaccacaagctgtctcgcactgatttgaagtccaagtttacattgctgtgtagcctgaaaaatctcaagccatatttgagtttaaagtggaactgctacaaatatctattggcaccaggcagaagtaaacacaagtcttttggagaaatataccttcatcctagtactatagaagtctcccaaataatttagcaagaaggtagaaacatgagtgagaattaccagaaacaaaaggaagcagaaactgacccataaaggctaattactagagttacgtcatacagatttataaaatgactactgtcttgtttaaagaaaaatcagatggttatctgctatgatatgataaaataaaaccagtgtgttttaagaataatctaatagaactaaaaataaaaaattgaatagtaggaatttgaaattcagaggatacatttaacaacaaattaaacagggttaaagaaaaattaataatttggaagatagagaaaaattacactaaatggaactcagagagacacatagaaaaaatatgaaaaacaggtgcctgtagtcccagctactcgggaggctgaggcaggagaatggcgtgaacccgggaggcagagcttgcagtgagccgagatgatgccactgcactccagcctgggcgacagagtaagactctatctcagaaaaaaaagaaaaaagaaaagatatgaaaaacaggttaagatacatgaagattcaatacatcttatgccaggagaaaagatactagggcagcagccatacttgaagaaataatggctgaggtttttatttataatcagtgaaaaacaccatactacagattcaaaaagcccaaatggacattcagatctgtaaagatcaaagaagtccaatagattgaacataaaaagatcttcactaaggcacattacaatcaaattatgaaaagtcaacgacagttttgaaagcagcaaaagaaaagttgcagactccataagactgtaggcagatttctgtgcagaaacctgtcaagcaaggagaaagtgggatgatatattcaaagtgccaaaagaaaaacactgctgaccaagcatactatacccagcaaagttatacttcagaaatgaagaagaaatactttcccaaaaacaaaagctgagggattttgtcactgttaaacctgcttcgtaagaaaaactgaaggcagtttttcaagttgaaacaaaagaacactaattagcaacatgaaaacatgaaagaataaaactcactagtaaagaagttccaaactataaatactattctatatagtgagaaagaatgaataagacctactatttgatagcacaatagggtgactgcagtcaataataacttaattttacattttaaaataaaagagtataattggattgtttgtaactcaaaggataaatacctgaggggacagttaaaaaagaaataaattcagaatgctgtgatactataatgatgttgtgtaaatgtcttgtaactctaatataaaaataaaaaacaaggtattaaaatatagctacaataatttttaatagatatacaatatacaagtatgtaaattgtggtataaattaacacagaatgtgggaggggagaggtaaaagtgtagtttttatatgtgatggaaattaagttcttatcagtttaaaatagattgttatgactataaaatggtttttgtaagccttttggataattaaaagaaaaaaactgtgttagatacacaaaagataaaccatgcgattgcaaaaaatatatatatatatataaaatatcaatggaagcagcaaagaaacaaaggcacttaaaacttttcagaaaacaataaaatggcagtagtttttacttatcaataattactttaaatgcaaatggattaaactcagtaatcaaaatacattgttactatgcatgtttttaatacagagatagggccttgctgtgtcaccagggtagagtgcagtgatgcagtcacagcccactgtaacttcaacctcctggactcaagcagtcttcttgctttagtctcctaagtagctaggactacaggcatatgccaccacatgtggctaatttaaaaaaaaaaaaaactttcatggaaagatggggtcttgctatgttgctcaggctttaaatgcattttttaaaactgacccaactacaagctgcctacaggagacttattttacctttaaagatacagataagatgaaagaggaaggttggaaaaatatgttccatgtaagtggaaccaaaagagagcagtggtggccatttttacaccaggcaaaataaattttaagtaaaaaattgtcacaagaggcaatgaaggtcattgtataatgataaagaggtcaatttatcaagatgatacaattctaaatatatttgccaccaattttggagcacataaatatgtaaagaaaaaatataactgaagggagaaatagatagcagtacagtaatcataggggtcttcagtgctttcaataatggagaaatcatctagacagaaaatcaataaagaaacagtggatttgaacaacactagacaaaatggacctgatatacagaacattccattcaacagtagcagaatatgcacatttttctcactcaaacatgtaacattctccaggacagattatttgttaggccacaagataagttttaacaaatttaaaattaaaattatatcaagtatgttttctgtcaacagtggcatgaaaccataaatccgtaacaggaggaaaattggaaaattcacaaatatgtggaaattaagcaacacactcctgaacaaccaaaggtcaaagaagaaatgaaaggggaagtaaaaaatatcttgaaacaaacaaaaatggaaacataacataccaaaacatggaatgcagcaaaagcagttctaaaagagaattttatagcaataaatgcctacattaagaataaggaatgatcttaaataaacaacttaatattggacctcatggaactagaaaaataagaacaaagtaaaaccaaagttagaagaaggaatgaaataataaagattagagcacaaataaatgaaataaagagtagaaaaacaatacaaaagatcaacaaaactgagttagttttttgagaagataaaatcaacaaacatttagctagaatttaaaaaaggagggaatatccaaatagaataataaatgaaaaatgaggagagggattaaagatggccaactagctggatctgggatgcacctcttctacagagaggaaccaaaatattgagtaaaccctcacactttcaacagatcttttgagagaaaacactgaaatttaatatataggccatgacagacatgattgaagaagtaggaagcaacactgctggctcagtattgccagacaccttaggaccagaatggacccaaggaaggtgtgagtgaagaaacccgggaacaccactttcccactgtcaacctctgaaattctagaggagttcccacaacccctgaatacgtttggattggtaggaggagctgcctggagaccatacagaggcactacttgaagccacaaggagcccaaaagccttcagtgtgctaggcagctgcagcaaaacgtgactctgggcacccacccccgagtgccctgcatccgagcggctacatctgctgtctgccacaccaggatagagtggggcccatgcatgttcacatgaccaattcaggatccaccaccattcctgcaggactgaggtgaatctaaaccacacacgaccatgcctgccagtccctcctaagattgcctgcctggccattgctgtggagtgggacccacagcatagcctccattgccccacctgagtggtttattggctacctgggaacactttactcctcctatcactgccagtggttgatcctaaggagccagaggacaaatccactggcctggtctcagtttgccaggactcaagcataccacccaggaatatggggatgagatctgtggcctgatctcaagcaggggaggaacccccactgtcagaacacagggaagagtgtggtgtgggtttttcaggtggtacagaagctgggcacccctcccttcatgagaatagactaggaagggtatagcctcatagccttgctttctgctgcagggagtcttgcattctggaatgcctgggatggcatggcagtctgggcacaggtggtttgggatttgcataactaattgggccggctgccagggtggacactggagggagacccaccagtcaggggtgtagaagctgagtgggcctcatggccatctgctggaatgaaatcccagggctagccctcttaccctgaaccagctcttgtggcacagaagaggtgcctgcacccctccctagagtgttgttccagctgcctgagaactgcccctacagccctaccaaggtcacgtctgcctcagagagcctgatcacgggctcaccagacccagtcccacccagctttgccccctctagccagccttgggagcagagcatgggatgggaccactgagagctccacaccccccacccatcaccaagaacactcttgtattccttatcaacaaaggccaagtaaaaatcccactgtcatcactgcagctgcctctcacctgccagcatcacctactggccaggaggtcaaaactgcatgtcctgtcgcagcaactgttgatatcattgcacagcactcagacagctcttacctgcaggcatcacctgctggcctgtagggtgaactgcacaacccaatataattcctgctgacaagtacacagctctaaggaatgaggtaagtttcccccaaaagacctccaactttgcatctctataggagacagtgagccttaccacatatacagcataccactactacaaactacaaacaattaacatttgagaaaacaactacactaaggctatctgtaaccaaggaatttatacagagccttggccccctaaaagcacgtagaagcaaagccaaaggacacaacccaacatatgcaagagtcacaccctcaaggggcaacgaaaaataatcccacccaaatgaagataaatccaaaaataataagtgccagcttctacacatgagaaggaaccagcacaagagctccaacaccaggaagaaatagaatgttgtgacacccctaaaggaccacattagctctctagcaatgaatcttaatgaaaatgaaaactttgaaatgacagataaagaatttaagatatggactgttaagaagcctagtgagatacaagagaaagttgaaaaccaaagcaactagagaaacaatctaagagatgaaagacaacatagatatattttttaaaaaacaaatggaatatctgaaaatgataaatttgctgaaggaacttcaaaacactgttgaaagccttaacaatagactagacaaaccagaagaaagatttcagagcttgacgactagtctttcaaattaacccaatcagaaaatggccgaataggaacagctccggtctacagctcccagcgtgagcgacgcagaagacgggtgatttctgcatttccatctgaggtaccgggttcatctcactagggagtgccagacagtgggcacaggtcagtgggtgcgcgcaccatgcgtgagccgaagcagggtgaggcattgcctcactcgggaagcgcaaggggtcagggagttccctttcctagtcaaagaaaggggtgacagacggcacctggaaaatcgggtcactcccacccgaatattgcgcttttctgacgggcttaaaaaacggcacaccacgagattatatcccgcacctggctcagagggtcctacgcccacggagtctcgctgattgctagcacagcagtctgagatcaaactgcaaggcagcagcgaggctgggggaggggcgcccgccattgcccaggcttccttaggtaaacaaagcagcccagaagctggaactgggtgaagcccaccacagctcaaggaggcctgcctgcctctgtaggctccacctctgggggcagggcacagacaaacaaaaagacagcagtaacctctgcagacttaaatgtccctgtctgacagctttgaagagagcagtggttctcccagtacgcagctggagatctgagaacgggtagactgcctcctcaagtgggtccctgacccctaacccccgagcagcctaactgggaggcaccccccagcaggggcacactgacacctcacacggcagggtactccaacagacctacagctgagggtcctgtctgttagaaggaaaactaacaaacagaaaggacatccacaccaaaaacccatctgtacatcaccatcatcaaagaccaaaagtagataaaaccacaaagatggggaaaaaacagaacagaaaaagtggaaactctaaaaagcagagcgcctctcctcctccaaaggaacgcaattcctcaccagcaatggaacaaagctggacggagaacgactttgacgagctgagagaagaaggcttcagacgatcaaattactctgagctacgggaggacattcaaaccaaaggcaaagaagttgaaaactttgaaaaaaatttagaagaatgtataactagaataaccaatacagagaagtgcttaaaggagctgatggagctgaaaaccaaggctcgagaactacgtgaagaatgcagaagcctcaggagccaatgcgatcaactggaagaaagggtatcagcgatggaagatgaaatgaatgaaatgaagcgagaaggaaagtttagagaaaaaagaataaaaagaaatgagcaaagcctccaagaaatatgggactatgtgaaaagaccaaatctacatctgattggtgtacctgaaagtgatggggagaatggaaccaagttggaaaacactctgcaggatattatccaggagaacttccccaatctagcaaggcaggccaacattcagattcaggaaatacagagaatgccacaaagatactcctcgagaagagcaactccaagacacataattgtcagattcaccaaagttgaaatgaaggaaaaaatgttaagggcagccagagagaaacgtcaggttaccctcaaagggaagcccatcagactaacagcggatctctcggcagaaaccctacaagccagaagagagtgggggccaatattcaacattcttaaagaaaagaattttcaacccagaatttcatatccagccaaactaagcttcataagtgaaggagaaataaaatcctttacacacaagcaaatgctgagagattttgtcaccagcaggcctgccctaaaagagctcctgaaggaagcactaaacatggaaaggaacaaccggtaccagccgctgcaaaatcatgccaaaatgtaaagaccatcgagactaggaagaaactgcatgaactaacgagcaaaatcacctgctaacatcataatgacaggatcaaattcacacataacaatattaactttaaatgtaaatggactaaattctccaattaaaagacacagactggcaaattggataaagagtcaagacccatcagtgtgctgtattcaggaaacccatctcacgtgcagagacacacataggctcaaaataaaaggatggaggaagatctaccaagcaaatggaaaattaaaaaaggcaggggttgcaatcctagtctctgataaaacagaccttaaaccaataaagatcaaaagagacgaaggccattacataatggtaaagggatcaattcaacaagaagagctaactatcctaaatatatatgcacccaatacaggagcacccagattcataaagcaagtcctgagtgacctacaaagagacttagactcccacacattaataatgggagactttaacaccccactgtcaacattagacagatcaacgagacagaaggtcaacaaggatacccaggaattgaactcagctctgcaccaagcagacctaatagacatctacagaactctccaccccaaatcaacagaatatacatttttttcagcaccacaccacacctattccaaaattgaccacatacttggaagtaaagctctcctcagcaaatgtaaaagaacagaaattgtaacaaactatctctcagaccacagtgcaatcaaactagaactcaggattaagaatctcactcaaaaccactcaactacatggaaactgaacaacctgctcctgaatgactactgggtacctaacgaaatgaaggcagaaataaagatgttctttgaaaccaacgagaacaaagacacaacataccagaatctctgggacacattcaaagcagtgtgtagagggaaatttatagcactaaatgcccacaagagaaagcaggaaagacccaaaattgacaccctaacatcacaattaaaagaactagaaaagcaagagcaaacacattcaaaagctagcagaaggcaagaaataactaaaatcagagcagaactgaaggaaatagagacacaaaaaacccttcaaaaaattaattaatcccagagctggttttttgaaagggtcaagaaaatagatagaccactagcaagactaataaaaaaagagagaagaatcaaatagatgcaataaaaaatgataaaggggatatcaccaccgatcccacagaaatacaaactaccatcagagaatactacaaatacctctatgcaaataaagtagaaaatctagaagaaatggatacattcctcgacacatacactctcccaagactaaaccaggaagaagttgaatctctgaatagaccaataacaggatctgaaattgtggcaataatcaatagtttaccaaccaaaaagagtccaggaccagatggattcacagccgaattctaacagaggtacaaggaggaactggtaccattccttctgaaactattccaatcaatagaaaaagagggaatcctccctaactcattttatgaggccagcatcattctgataccaaagcctggcagagacacaaccaaaaaagagaattttagaccaatatccttgatgaacattgatgcaaaaatcctcagtaaaatactggcaaaccgaatccagcagcacatcaaaaagcttatccaccatgatcaagtgggcttcatccctgggatgcaaggctggttcaatatacccaaatcaataaatgtaatccagcatataaacagagccaaagacaaaaaccacatgattatctcaatagatgcagaaaaggcctttgacaaaattcaacaacccttcatgctaaaaactctcaataaattaggtattgatgggacgtatttcaaaataataagagctatctatgacagacccacagccaatatcatactgaatgggcaaaaactggaagcattccctttgaaaactggcacaagacagggatgccctctctcaccactcctattcaacatagtgttggaatttctggccagggcaattaggcaggagaaggaaataaagggtattcaattaggaaaagaggaagtcaaattgtccctgtttgcagacgacatgattgtatatctagaaaaccccattgtctcagcccaaaatctccttaagctgataagcaacttcagcaaagtctcaggatacaaaatcaatgtacaaaaatcacaagcattcttatacaccagtaacagacaaacagagagccaaatcatgagtgaactcccattcacaattgcttcaaacagaataaaatacctaggaatccaacttacaagggacgtgaaggacctcttcaaggagaactacaaaccactggtcaaggaaataaaagaggatacaaacaaatggaagaacattccatgctcatggctaggaagaatcaatatcgtgaaaatggccatactgcccaaggtaatttacagattcaatgccatccccatcaagctaccaatgactttcttcacagaattggaaaaaactactttaaagttcatatggaaccaaaaaagagcctgcatcgccaagtcaatcctaagccaaaagaacaaagctggaggcatcacactacctgacttcaaactatactacaaggctacagtaaccaaaacagcatggtactggtaccaaaacagagatatagatcaatggaactgaacagagccctcagaaataacgccgcatatctacaactatctgatctttgacaaacctgagaaaaacaagcaatggggaaaggattccctatttaataaatggttctgggaaaaccggctagccatatgtacaaagctgaaactggatcccttccttacaccttatacaaaaatcaattcaagatggattaaagatttaaatgttaaacctaaaaccgtaaaaaccctagaagaaaacctaggcaataacattcaggacataggcacgggcaaggacttcatgtctaaaacaccaaaagcaatggcaacaaaagccaaaattgacaaatgggatctaattaaactaaagagcttctgtacagcaaaggaaactaccatcagagtgaacaggcaacctacaaaatgggagaaaatttttgcaacctactcatctgacaaagggctaatatccagaatctacaatgaactccaacaaatttacaagaaaaaaacaaacagccccatcaaaaagtgggcaaaggacatgaacagacacttctcgaaagaagacatttatgcagccaaaaaacacatgaaaaaatgctcatcatcactggccatcagagaaaggcaaatcaaaaccacaatgagataccatctcacaccagttagaatggcaatcattaaaaagtcaggaaacaacaggtactggagaggatgtggagaaataggaacacttttacactgttggtgggactgtaaactagttcaaccattgtggaagtcagtgcggcgattcctcagggatctagaactagaaataccatttgacccagctatcccattactgggtatatacccaaaggactataaatcatgctgctataaagacacatgcacacgtatgtttattgaggcactattcacaatagcaaagacttggaaccaacccaaatgtccaacaatgatagactggattaagaaaaggtggcacatatacaccatggaatactatgcagccataaaaaaggatgagttcatgtcctttgtagggacatggatgaaattggaaatcatcattctcagtaaactatcgcaagaacaaaaaatcaaacaccgcatattctcactcataggtgggaattgaacaatgagatcacatggacacaggaaggggaacatcacactctggggactgttgtggggtggggcgggggggagggatagcattgggagatatacctaatgctagatgacgagttagtgggtgcagtgcaccagcgtggcacatgtatacatatgtaactaacctgcacaatgtgcacatgtaccctaaaacttaaagtataataataaaagaaaaaaaaaaacaaattaacccaatcagacaaaaaataagttttgtaaatgaacaaagtcttcaagaaatacaggattatgtaaagctaccaaaactgtgacttacaggcattcttgatggagaagaggaaaaagtagaaagcttggaaaaatatttgaggggataatttaggaaaatcacccaatcttctagagatgtagacatcaagatacaagaaattcagagagcacctgaaaaatactgtacaacattaacatgaccaaggcatatagtcattaggctattcaaagtcaatatgaaagaaaaatcttaaaggcagctagagacaagtgtcaaatcacctatgaaggaagctcatcaacctaatggtagacatctcagcagcaaccttgtaaaacataagagattagaggcctatttttaaccaccttgaaaaaatgtcagacatgaattttatatcctgccaaactaagcttcataattgaaggagaaatagtctttcccagataagcacacatagagagaattcatcaccactacaccatcttacaagaaatgctcaaaggagttctgaacatggcaatgaaaggataatactcaccatcatataaagcacaggtaagtagaaacctcaaagatccaataaagcagttacacaactgagactccaaggcacctagctaacaaaactatgatgggaaaaaaacacacatattaatattaaccttgaacataaaaggcctaaatattccatttaaaaaataaacactagcaaattggataaaagaagcaggacttaaccatctgctgcctaccagagacccacctaatggcaaaagacaactacagactcaaagtaaagggactagcagaagaagagaaataacaaagagcagaaccaaatgagattgagaccaaaaaaaaatgatgaaaaggatcaacataatgaagagtttgttctttgaatggataaacaaaattggtagaccactaactagtttaatgaagaaaaaagagagaaaattcaagtaagcacaatcagaaatgataaaggtgacagtattgctgatacaacagaaatacaaaagctcatcaggggttactatgagcatctctatgtgcacaaactagataacctagaagaaatatgtgaattcctggaacacacaacttcctgagattgaatcaggaagaaatagaaatcctgaacagacaaattatgagtaaggaaattgaatcaatagtaaaaaaaaaccttccaacaacaaaaaagcccaggaccagagagatttacaggacagttttgccttatctacaaaggagagcaggtaccagtcttacagaaactattccaaaataccaaggcaggaaggatacctccctaactctttctgtgatacttgttatctccctgatgaatataaatgtaacaatcctcaacaaaattctagcaaaccagatttatcgcacatcaaaaacaaaatgtatcacaatcaagtgtgttttatttcagggatgcaaagatggttcaacatttgcaagtcagtaaatgtgattcaccatatatgcagaattaaaaagaaaaacgatatgatcatgtcaatcaatagatgcagaagaggctgttggtaaaattcaatgtcacttcatgttaaaaaccctcaaaaactaggcattgaaggaacgtacctaaaaatagtaagaatcatatatgacaaagtcacagccaacatcatattgaatggggaaacgttgaaagcattcaccctaagaactggaacaagacaaggatgcctactcacaccacttctattcaacatagtactggaagtcctagacagaacagttgggcaagagaaagaaacaaaaggcatccagattggaaaagaggaaatcaaattatctctggtcactgatgacatgcccccatacctagaaaatcctaaagactcctagacttgataaacaacttcagtaaagttttaggatatagaatgaatgtacataaaccagtagcatttctgtatactgttactgaatctgagaaccaaatcacgaactctatcccatttacagtagtcacacacaaaaataaaataactaggaatacattgaaccaaagaggtgaaagttctctacaggaagattacacaaatggaaaaatatctcgtgctcatggattggaagactcaatattgttaaaaatgaccacaatgcccaaaggaatctgcagattcaaagcaatccctaattaccaatgtcattcttcacagaattagaaaaaacaatcctgaagttcatatggaccaaaaaaagagcctgaatagccaaagcaatcttaagcaaaaagaacaaagccagagacatcagattacctaacttcagattatactacaaggctgaacagcatgttactgatatcgtgataccatgataaagatggacacatagatcagaggaatagaacaaagaactcataaataaagtgacatacctacaaccaactgactttcagcagattcaacaaaaataaacaatggggaaaggacatcctattcagtaagtggtgctgggaaattggccaaccacatgcagaaaaatgaaactggacctctgtgtctcatcatattaaaaaattaactcaagatggattaaagacccataaatgtaagatgtgaaacttaaaatcctgaaagaaaacctaggaaaaactattctggacattggcttaggcaaagaatttatgactaagaccccaaaagaaaataaaacaagaacaaaagtacacaggtgggacttaattaaaccaaaaagcctgttcacagcaaaagaaataacagagtaagcagacaacctacagaatgagagaaaacatttgcaagtcatacctccgacaaagaactaatatccagaatctacaatgaacccaaataactcagcaagagaaaaacaaccccattaaatattggtcaaaggacatggacagacatttcttaaaagaagacataaagttgccaacaaacattttaaaaatgcttaatatcactaatcatcagagaagtgcaaattgaagccacaatgagatattatcttataccagtcagaatggctatgattaaaagtcagaaaacaacagatgttggcatggatgcagagagaagggtattcttatacactgttggtgggaatgcaaattagtacaaccgctatggaaaacagtttggagattcctgaaaaaactaaaaatggaattaccattcaattcagcaatgccactactgggcttctacccaaaggaaaagaaatcattatataagaaagacacctttatgtatgtttatcgcagaactactcacaatagcagagtcatggaatcaacctaagtgtatatcagtggataattggataaagaaaatgtggtccatatataccatgaaatactatgcagtcataaaaacaaatgaaattatgtcctttttagaagtttctacatggatggagctggaggccattatactaagtgaaataactcagtaacagaaaagcgaatactgcacattctcacttgtaagtgggagctaaacagtggttacatatagatgcaaagatgtaaatatcagacgttggagactccaaaaagggggaaggtaaaaggggaattcggatttttataattcgaatttacaattttacaattgggtacagcttgttcactgtttggattatgggtacattagaagcccaaacctcactattatgtaatatatctatgtgataaacctgcacatgtgccccccaaatctaaaatcttaaaaaaagaaatttataaggaaaagggtacactacaactgatactaaacaaagacagaggatgataggagactgttatgaacagttatacactaacagattggataatcctgaagaaatggataaatgaatagaaacgtacaacctaccaagatataccatgaagaaacagaagatataacagaccaaggaaggagattgaagctgtaatcaaaaatctcccaacaaagacaagtcaagatgagatggcttcattggttaattgtactaatcatttaaggaagaattaatgacaagtggtcaacttgtagaatcagttcttctcaaattcttctagaaatttgaagataaaggaatactgccaaagtcattctgtaagaccagcattgttatgatatcaaattcaaataagaacacaagaaaattataggccagcatctctggtgaaggtaaatgcaaaaatcctcaacaagataatagcaaattgaattcagtaggaaatttaaaatatcatacaccatgatcaactgggacttactcctgggatgcaagaatggtttaacctatgcagataaaaaatgtgacataagacattaatattctgatattcacagatctgtaacataatgtcaaagatctaaattatattgggaaatataatatgctattgaaattgttaagtatgtagtaagtacctttaaaaagctattatctgtgaatgaaactccaaattaggattaagttcttaaaagaatcatatggaaaaaggagtattttattgtaaatattaaactaggacatgtttgttattaaaaataaaatttatacagtaagtgctattgacttaaaatactatcaactttattctctgtagagaagaaagtataagttggcaatgttccaacatgtctgtattaatcttacaagatcttgtggttcagccaaaaactctcatgcttgtgtcagttaaactttttaagtataacttttgaaacacctgtcttaaaggcatccttatgctttcagtttttaaaacatatataaaactgatctgataatgtgaaatattgttcaacatgttagctatttcttaatgttttgcaattggtgagttttaaaactgtcccaagttaacagcgatttaaaaacatttttctcacatgtagtttttaaagctctctagaaattgacatgtttaaaaactgccaagacaattaaactttttatgttaaaaatgtttaaaactctgatcatatagcacatagtaataacgctttcttgggcataaattataataaaatactataagtaatacatgtaaagaatgtatcagtcactatctaagccttgaagcaaattgtattcatccttcaagattcagttgaacctactctttggaatcattttcaaccagaggtggtgtatgatttagaaaagattgagcacatggcttctagtcttcgctgtaccatctcttgagttccacttgtacatatgtaaaatgaaagcaatgggccagatgacccctgagtgttgttttattttttagctctacttataagggaacacttccatttgcactaaatatactgtatgaatgtttaagtatttctgggtatcttgagtattcagaggtggcactaatgaaggagtgtaggctttccctgcaatgttgaaccttggtgtacattttgtcctctttaaaaaaccaatcaaacaaatttgctacctagaatacagtgtgtataggtcttttggtcattagccttataataggtagtcatttaaaatattttccaaagttacttaggtaatttcttgttttccatacctcattcataatagttttattactgttggtattgtatttttcattctccctatctgctggatgatttaaattatttattttttgagggaataggaaacattgccatagttatataaataagctctacaaaagggtgtactcagggaagtatcaatcctccccctatgcctactaccctgtttccattctccttccagttattaaatttgtcatagagatttgggttgttctgaaactacttaagtgtatactgggatataacaagtaagtaaatatgtttcagataataagacccagatttctcaccgtaagataaaaggctagtgtgttcagggctatggtgttcagttggaattggaagtatcagtatgaacttatggttctgaatatatataaaaacagataaatatgaaaatatagatggggtatgttagtgtacatacatatatttccaagccctgcctactaacaagacatgaaagcagtgacacccagtagtagtgaacatagataatacccagatctaggatttaaataccattctccagtagaaggtactatgccgccttggagaaatggctgattctatatctagggcagggaaaatggaagatgagcctagaatagtaagtacacataaataagtaaaaataaatttcaggtgcagcggcatgcacctgcaatccctgctactcaggaggctttgtaatcccaactactcgggaggctgaggcaggaggatcgcttgagaccaagagtttgagaccaacctgggcaacttagcaagactccatctcaaaaaatgaatgactaaatgaatgaatgatgagagcatgtcaaaaaaacacaggagccaacttgaaggagttcccaatagccaattctggagcaattttagcagcaaaataaataatgatagcattattataatccagaaaataaaagaaatatccatccatctgtattgatataaatacttaaacacctgggagggaaaggacaggtcttccttacagtagaaatccaattataaattaataagtaaatatggaaatggagactcaccattaggcaaatatcatggtaataattgtttaaaagaactatcaatggatattaaaataagtgggtgaaagtgtcatgagaaaaaagattttttgcataattttgaagtattttcccagaagataattaataattgctaagagaaacatcacaactggtgtggaaaaataaacctggcaggcaccaccttaaccagatgatcaattacagatgataatatcaccagtaataagacatagtgacataccatgtgccactagtgtggtatattgacaagggcacctattgctttagttctgtttttgctcaaaatacatcacctcaatctaataattagaaaacatcagagaaatccaagttgaggggcatatgacaaaatcagtgcccagtacgcttcaaaagtgtcaatgtcaaggtcataaaatacaaataaagacagaagcaacttgtcaaagacaaacagattggattatcaaattttggtagaggttacaggaggttatggacacatgatacagtgtagcatactaaattggctcctgggccagaaaaaaaaaaaaaggattattagtggggaaactggaaaagggcaaataaggtccctagataagttaatagcattgtataatgttaattttatatctttcataacactgctgtgattatgtcatgttctctttaggggatactggttaaagggtatacaagaatgttgattttttacagcttttctgtaagtctgaaatttttcaaattgagatactttgaaaatttctgatcaaaatgaagcaaaatcctttccttgggctttgttagtatgtattacctgaaaaaagttggaattttcaaaaatattttaataagcagtaataaaacaaaaggaaaaatattggaatataataataattcagtttacaaagtgcatagtaggtcagaggatcattcctagatctctgactcttgtcccattctgttagcctaaaagaatgtcagatatcttgccccaaaggaaagttttttgtacttttcctgatctgcctccatgttgcagagtgccagcttacttccgcacatttcagacctggtcgcgataccttgaacttcaggggcaaggataaatcaggctaattctgctttcattaggcttttctgttcaggcctggttggggtttgagagaatatgcctcttctctaaaacactggaggactgggaaggctggacacaataaattaacaatcagtggcaatcccacatttcatatattgggtaagaaaaataatactgagtgtacctgtacagacctaatgctaattgctttcccaaatattatttattttcatacttagaatagctctgtgagatagatgttggctcctttctaaaaataaggaaaatgaggctcagacaggttaaatatcttgccaagatggtacattaagtaatggaaagccaagattcaaacccaggtctatttgattccaaagcatgctattctttttttcttataggtccaacagaaaaatacatatacattaaatatgatatccatacatataatagagcagtgcagaggtaattctgtcagtatcaatgcccatccatatagaaacatcttaagagaagttaccatatcatatattctttttaatttcccatggcctccaataaggtagaatccggtaattactacattactggtgattttcagattcatagtatctgatgaaagtaaaacagcaaaaagaaaaaaatattgacctctgcagggcaatcttatctgtagctagctggcagattgctgttatcttcattcttctctctgttctataaatatttaaccacctgtattggttttctgttgctgccataacaaatgacaacacacttacgatttaaacaacacaaatttactttcttttggctctgtgggttgtgagtccatcccaggtctcactgggctaaaatctaagtgttgtattcctttctgtaagttcatggggaagattcattttcttcctcagatggtggcatagtcagatccttttgatcatacaaggaccccatttccttgctggctgaaggccattcccagcttctagagggtacctgcattccttggcttgtgacttcttttctctaaagccaggaaaacaggtcaagtttgtttcatatcgtatctccactcctgcctcactctctttcacttttaagagctcgtgattaactggcccacccaaataatccaggataatctccccaccttgaggtccataattttaatcacatctgcaaagtccatttcaccatttaaagtaatatagtcacagggtcagagtactaggatgtggacatcttcatggatgccttattctgcagaccacaatgtaaaaaaaatcacacaagttcataaaccactggctaatattaataatcataactatactgagcagtttgtgtcaagtaatgttctaaattgtgttttatatattaatctaatccttgcaatactgtaatgaagcaggttacttagccctattttatggatgagaaaaaataagtacaaaagacattaggtaatttaccagagtcactgatagtaattattatctgtaatttcaaccaggcggtctgagtctgtaaactatgccattaacttccgtactatcataagtcactcagatgattcaggacttcggatattttacttaactgattagggtcaaaatgtttagcaagcctatactgtatgtgggctggttattcttagtttttacggtaaatgaatatttttttcttgctggctgacagaaaaggaatgataatgagggtacacagatgactgaaattgaatgttatttccttagattattttactcattatcactattgtataagaatatgtcactgtttgttatataagttccttcagaacaacttagagaaaaaatatggtaattaggttatcatgtaatccaatgacatacatctctgttgcagcacttttgcaatgatgttgtaattctctgtctctctctcccccaacctttgttctttgatgttagtggtctttccaattttgtatttcaacatctatagagtttctggctgatggatcctcaaatagtgaattggatgaatggattagttaattaattaaatcattcctataattgtcaatccatttataccctgctcttaaaatttaatgaattaatttgaggtgaaaatgtttcagacaagatgatcttcaaattctacatgtaataaagataattttaagagtctcaaaacaatttgtatatttatagaatccctaataatggccatttgcagtgtgctaagcattgggctaaacgagagctcagtattcacaacaatcctgtgatgtaatgctctagtcgtatacatgtggaaactaaggactaactgagttgtatcactccccaaagtctactcacggacccagtagagccaatgtcttcacctaggaataattgactctaaagcgtttgcccttatccactgcctcatttctttttattcctaaagtaaaactactcataagatttctggatctgatttctgtactacttgtggattgattaaatacaaaaacattattgtgtattattatcagttggtctttcaaataactgagaccaaaacattaaaatagttttaaaaatctgtaaacactcctattcttctggatttctacttacagaattagcacctagaactagaaaagtaagtttcttttttttttctgagtgttaagacctcaggaaatatttttttaattaacatactataaaattgacttgatattcatttatttgagctttaatacacacacacacaaacagacacacacataagtgtattcatgtagcaaccatgacgatcagggcacagaacagttccatcatcagagcactatcgtgctacccgtttttagtcacattttcattctaccacaaatcctggcaaccgtgatcttttgctatcattttctcttcttgagaatgttataaaaatgaaatcatacaacatgaaacataatctgtgtcactcagcatacaatatgaaacatttctatttcactcagatgtattcaagttgttgcgtgtatcaatagtttgatcctttttattaatgagtagtatttcattgtatgggtgtgccacagtttatccattcattagtggaaggacatttgggttgtttccaatttacggagattatgagtaaagttgctgtaaacattagtatacaggttttggggggtgaagttaagttttcatttctctagggtaaatatttagaagtgtgattgctgcataatatgttgtatatatttaatgtttcaagaaactgccaaacttttccagagtggttgtaccatcccaccagtaataaataagagatgatccactttctctacatggccacaggcattttgttttatcagatattttttactttaaccattctaataggtgtgttttcataacaggtttggttttcatttgcattcccctaatggctaatgaagttaaacattttatcatgtgtttattatgtcctcttcagtgaagtgtctgcttaacaccttttgtgtattttcttttcttttttttctgtagtgttttttttttctttttttaattatactttaagttctagggtacatgttcacaatgtgcaggtttgttacatatgtatacatgtattttctagttgagttacttattttattaaattttgagagttctttagagttgtagtaaagactactgtagcttgtcttttcattctcttatcctagtctttcacagaacaaaagttttaattgagatttagtttatcactttttctttttatggatcatgattttcatcatgcttggtgtcatgtgcaggaactctgcttaactccagatcatcaggtttttctctttgttttcttcacctttttattagggcttgttgtattttgacctaatttttttataagatgttagattgaggtgaagtttcatttcttcaatatggatgtccaattgtgccaatactgcttgttgaaaagactattctttctctattgaatatatttgcatttttgtcagaaattaattgtctatatttatgtgggtcagtttctggactttgttccattctgttgatctgtacatccatccttttgccaataccacgtaatcctgattactgtagcttgatagtaagtcttaaaattggaggatgttatttctctaattttatttttcaaaatcattttggctattatagttcctttgccttttcatataaattttagataatctatttatattaaaaataatcatgctgaaattttgatttgatttgtgttaaatatgcagatcaatttggagagaactgacttcttccttaaagtgttgaggagtcttccaattaatgaacatggtgtgtgtttacatttatttaggttttctttttcttacatcagtgtttcataatttcagaatacagatcatgtacatagtttgttaaatttacacctatatatttcttctttggagataagaactgtgaatggcttgaagtttttttcttttaatttggtttccagttcattgcctatgtagacagtcttgttttctgcaaatagggacatttttatttcttcctttctaatgtgtatgcctgtaattcttttattgacttattgcaagacatcaagagaggtgataacggacattcttggctttttcttaatcttgagaagaaagcatagtctttctcctttaagtgtaatgttaactgtaggtttcttgtagatacgctttatcaaattgagtaacttcccttctattcctggttcgctgcaagttttcatcatgaataaatgttgctttttttcaaatgctttttctgcatcaattgaaatgatcatatggttttactttaatctgtgaatatggaggaatgcactaatcaatttcaaatattgaatcaggctttattctctgaaaagcctcactttatcattttctttttgtatattgctaatattttgttgaagatttttgtgtcgatgttcataaggtatgttagtctataattttttttctttttctttttcttttattttcttcgtactattgtcctatggttttggtattagaataatcctggccttaaaaaaaatatttaaattggtgttatttcttctttaaatatctgataaaatttgcaagtgaaagttggtcctggagttttgttttgcttaggaggaagattttctaattcaatttaaaaatatttacaggaatattcaggttttgtattcatcttggatgtgtttagtgtctgattttcaaggaatttacttatttcacttctttaggtttatgtttacacaattgttcagagcattcctttatatccttctaatatctgctggttctacagtggtattctcttttcattcctgatagtagcaatttgtggcttctttttttgcttaccgatcctactacagttttgtccattgcattgatctttacaaagaaccagctttttgtctcactgtttttttttttaattttattgctttttgatttttattacttctttctgcttgctttgggtttattttgctccttgtttactgttgttttaatacacaattcagaattttgatctgagaccttcttttctagcacaagcatttaatgctataaattcccctctatacagtgttttagggacactccacagattttgatgttttttatttccctttttgatccatagattctctctaaatcagtttattaatttccagtgttttggagattttcttatctttttcctattgacatctggtcattatgatcatagaacatactttatagaatttaaatcctttaaaatttgttttgttttatgatcttggaagtggtgtgtctacatgaatattttgtgtacatttgaaaagaatgtgaatttcgtcattggggtgtgttctataaatctataaatgttatttggatctagttgttaatgttgcctggttcttctatatccttgctaattttttgtctacttgttctgtcagttaatgcaagaggagtattagaagcctgcaagaatattgtagatttgtctctactttttgttctgttcatttttgctttgcttattttaaagctctgttgttaaaggcatacacatttaagatctctctgttttcttggcaaattgaccctcttatcattatgcaatgtttttcttgatctctgataattttcttatcactgaagtctactttgtctgatattactataatcacgctagctttcttctggttaatgatataatttttcatgatagaattttttatccttttacttttaaactatgtaattataattgaagaaatttttgtagataggatattaatggggattttttttattatttttggtctattctgatcatctctgcccttaattggtttgtttaggccatttatatttcataaaatgttttatgtttggatttgggtttatcattttattatttgttttttgtttttctctctgtattttcactcttctggtcctctttttctgccttgttttggatcatttgaatattttttagtattccattttaatttagttttgactatgtatctttgtatagatttcttttagtggttgctctatggattagaatgtacatcctaacttttcacagtctatttagaatcaatcttttaccctgccaagtggattgtataaatctttcatgtaagtcttgttattctccctcctttattttatagtttttatatgtactacatcatttctcttcttcttttattcccgacattccaagtgtccctcatttcaccttctttatgacagtcttcctttagtaattcttttagaacagatctgccagcaatgaactatactttttatctgagaatgtctttattttaccttcgttttttaaaggatattcttattgaatttagaattttgagctgacagatattttttgttttaaacatgttccactttcttatggaatctatgatttctgattataactctgtagtccattgatcccctataattatatattatttcctctggctctttttagtatttttttaaactagtttgattgatggatttgagcctagtgtttgattgatgggttcgagcctagatttggggggttaggaggttactatttgaggttcagttcttaaatctgttggtttatgtctttcactaaatttgggaaatttttaaacattattcagttttttttctgcactacagctcttttccttctgggactccagtgacatgaaagttagatattttattattgtcctgcattatcctgagactctttattttttaataaatatttttactctgtcttattcaaagtggatagtttccattgatgtactgtcaagttcaccagtctttgctctcttatctccattttactattaagcccatccagtgatttttaaactttggttactgtatgtttagttctaaaattttcttttagtttttatttaaatatcttccatttgctgagacattctatctttccattcttttcaacagtgtttacccttacttcttggagcatttttataatagttgtcttaatgtcttagtttaataattctaacatctttttttcccaatgttgccattttttgatcatcttttcctatgtgacttgagactttttctgattcttcacatgccaagtaatttgagattatattctggatatttcaagtattatgttgtgagattaataagttaaataagactaatacttcgtcttatttaaatcctatcgagaattttgatattttttgcttaacaggcaatttatccagttgtattcgggatgcagtctccagccagtatataggttttgattccacaactggttcacttttcaaagcctttgaaatgctgttcagatctgtccttcatgtaccacccagggtccaatctagaacatgggtaattgtctgtctatacttagtttctcacagtctgtgatcagattcacacatgagaagtttgagcataaacccaagagttcataaacagccttatgaggtcactttcctgagcctctctctttcatgatctcagtactttgagttcctggagactctgcttttcagtcctctagccaaaactctgggactttatttaccctactttgccacatgcttcctgcatctatgcctgtagaagagctgaaagaagacagggagagaaagagctcagtggagtttatattgtactcttagggccacagctcctcctactggagaggaagttttccctccctcaaagttttaaattcttgcagttatcattatctctgctactaccttgaaggctaggatgcaagagaatgaaggagaaaagggcaatttttctcttctttgagacttttcctgctccttgagcctaaactataaggattctcctagagccttcactgccatgccccagggcccactttcaggttttaagctcccttgaatccaggccaggggtaccttttaaaaaaagaagaagaaagaaaaaggtaaggggaatcaccctgtgctactctgaattcttgtcatgtcatcttctccagtccacctgctgtgacttaccctttagagtctttaaataaccgtttccttcattctcaagttttattatctagattcagtagcagacataaacagtttgtggattctccatattaactggatctgacctcaggtatatatttttaatcattatctaagttaatgggtgttcatggaggttgtgagttgcatttgttttaactttgctatacagttacaccccaaatattcacatacatattataaattggaagatacaggagcaggaaaatgaaactatctggaaaagtatacagtgaaacatttcatctctaaagtttgaacacattcaggtctgaatttaggaatctgttggcattcgcttttttgatagttttcccttagcagggaatagggtaggaatagcagaaagctggctcagcgatgacttacagaatgagagagatgtgaattggccttttaaaaatctgtggaagttactcatttggactgggtaacggctttctaggcagagggagcaacttcaggaaaggtatagagaaggtccccaacttacaacattgacttaagacttttcaactttacagtggtgtgaaagaaatatgtattcaatagaaaccacactccaaggacccatgtaatcgtttctcattttcaatatagtgttcaataaattatatgagattttaatactttattataaaatgggcttcatgttagatgattttgcccaattgtaggatactgtaattgtcctgagcattaaggtagactaggctgaactgtgttgttcagtaggaccggcgtattaaatgcattttgacatgatattttccatttataacggggtttatcaatatttaacctcatcataagtcaaggagtatctatacaggtataaatgtgcatggcatgtgtgaatgtgtgtcaaagaggagtagacaaaccaggaaagggaaatatgattcagttaggcatttactgtgccttcttagaggttgcagtaagatattcccatgaacatatttgaaatggttagaaacacatgggtgtgaatttcaaaaaatacaagtttttgaatttaacacatatgctaaataatcagtccttcagcttaaactatgttatcctgcaaatgatagtaagtcttctggatttttattagaatgaatcacattttccatccttgtttttatttactaggaatttcatcttatgactaaaaagaacaagccataagctcttttggtctaaatttgagatatttgcctttgacttatttttaaattaaactttttattttgacataataatagattcacaaataatacagagaaatcctgtgtaccctttacccagtttcctccaatggtaacataatataatgtcacaacaagcatattgacattgatacagtcaagatacagagcagttctgtcactaacaggctctcgtttcccattacatgttcacccctgtccctctaccttgccgcattccttacccctggcaaccactaatctccatctttacaattgtgttatttgaagaaagttacataaatgaaatcatacagtatgtaaccttttagactgactttttcattctctataaattcttggaaattcatctgagctgttgcttgtatcaatagtttgttcttttttattgctgagtaatatttcatgacttattttttagcccacctttttccattatgtttcattttgaaaaaacaaagtcttactactcaggcatttttctcacttacatatttgctttagaatttatactataaacaaaaaccttaggagcattctagtgttctttttaaaattgcatttaggttaaccagttaatctgttgacattattacgtcttacaggaaaaaaatatgtacaagtagattttattactttactccccttttaattcctaaatccagaagtaagatcagaacacatgagagatactgctgcttgaaaaatacttagcacagcctgtttgcagacacactcatgctagtccacggctgatgcagaaaggagcctatcccaaggcagcatttttttgcagtgctaaaggccaacattaggatgttgtctgttttcattaggcaccatggtcttagttgctcaaccaaaactccagcctcaataatgagggaaaaaaatatacttctagtttttaaattgtgggaaataggtctgggagtagattctgaagtatgttaaatactcatctaaagagcctagaatttatcccaaggggggatgaagaaatgaagaaacaaataaattaatcaaattgcagttcctaaaatagttataagtagaaaaattagcagtgtccaaaaatgtcattttacctttaatatcaatgtcatattccatcttacgaggtagtaactctggctgttttgattttcattttagaagaataaggaacataggtttacaataatcagtaactatattaccatcatataattacccagttggcatactgtttattattttagtttaaggagacacattgaagcgagaaaaagggggtgctagaggtttgcagacacttagcaaacactagtgtttatcctacagctttgtaaacactttaccaagaatttttaaactgtcattttgctgatggaaagtgtaaaatgagacttcagcagaagttaatctcatcatctacttaaaacagtgttttttacattgatctaaagaggtttgtgcatattttaactgtttttcctatatgatcatcttcatgtactagtatgaaagttaatgagtaaagaaaatctgctgaataaatccacgtgataatccaaggcacttaaaagaaatacatgctataatgggatgcaaagattttacttgattagtgctctatttctcaatttaacaatcaaacctaagagaaatctcaatcaagacttttgactaacatagtgcaatttgattagggtgcagataagtacactatttcggtgtgactgtataagtattctgatcataattatgacatatactctgctactagttagaaaaagaacagtttttaacttcttcatgcctttcatttatgcacatgttcttaatacactattataataaataaaatgtacctgaaaatataaaacatactttttgcttgtccaaaaagtatgcatttatttataatacaaaatatttattctgaacctatgctgtatgatagcccactataaatgtagaggtagcaagggaagatgacagatatctaaaaatatttgttagtagcactatattgttgattactacatatcagtaattagaataacgaataaagtgaaagaaaaagcataatgccttaggtgtttactttgggcacagtaacatttggtccagtcatctttctagttttctggtacccaagttaaatgagcaagagtgtgatggaaagtgggctttggagccaatcagacctgcatttatatttcatttctaccacctaataacggcatgtctttgggcaagttatttaacttctccaagcctcaagttttttaacttataaaatatgttgttacaaagcttaaaagaagtaagttactagcacagtgcctggaacatagaaatttgtgctttagagaagaaataaaaatatataattctaccgtctataggtagagctcttttcccaaaatagtactaaaattccagtttgcttataatcctaaaatatttataattccagaatatctaaatctgtactgcttttacttctctaagatatcttcgtgagtttggtaagactgtccacttaatttctttaaacagctttacttttcaaggacacattaccatattcataaaaggaaaaaatccaaattaaatataatctgtactgaaagtttccttttcagatttcgggaagttaaaatgtttgtgacaactggatttgtttttttaatcttttattgatatataatagctgtatatatttggggagtacatgtgatattttgatacatgtatacaatgtgtaatgatcagatcagagtaattgggatatccaaaactttaaacatttgtctttcgtttgtattaggaacactatagatctattttaatttcttctttgatttcagcaggaaaggaagggcaagaaatcctggggcctgaagctcaggcagatgaagcaggatgtacaggtactctgctgcgactttctttcataccatagcctttaaaagaaggtctttgtgtcactgatttcgcatttgtgagtcctgaatttagtccgtttccttctcttttatcttaccttccttaaatgtttaagtacttaggcatatggtgcactacataaaaagaagtaaatattccttaaatacagagtaacttacagattcatattatgtagcagatttctccattctataagaatgacaagtataacctacagataatccaaaaaataagtgtttgaatgatgatttgaacttctatcaagtttttgaccaaagttagagaaatgcagatctaacttttgagtttcgttattagttacctgggtctgctttgaattgcccacaagacaaaaagcagaagaaaatagaaaaagcatggatttatctataaatccgatgagaatcatgaatattaatgagttgagtgaacatgtcacagcaaacgagaatcaaaaatttttcttaaattttctgtgattgaaaaagagtaaaatgaagttgaattataataaacaaggaaatttgcttttaggtgactaaaaagtacatattccctgaaacttaaggctattcctctgtaatggattcagatcagatttaagaagcaaaagagtaggtggaaaaattaaatcagatcttatgtatagtaataccagtcactttttattgtgttccctaagagagccagaactgttagaatgtaaacttcaaaaatgcattccagatttttaaaacatttcctcaaaatattatacttaaacgtagtgtaattgtactttgtatattcaaccataaattagatatttctgtcatatagttttaattacattttctttttccttctcttctatgagttatcatttatagatttgtttttttactttgctgtgcattttaggaatattccataaaggcttacaaattatctttcattaggtaagatgaggtatggttcatggctaataagtgtcaagattagatttttatctgtaatataaacaatagcactcctatactcgtcagtcatttctgtaaaacagagtaaatctttgtgctgttattaaaagtgaattccaaaataattaaataataatggagtatgtgataatttgtggtgcgtatagcctgcgattttatgttttgcccctaacttcgttctgtgtaacttgcatgaataatgtattcagatatgcttgttatcaaatatttgccatgctaagctatagaatatgtaaaatatttaagctggacatttgttagtagtaatacagtagtgttaataaacataagagtacactatttacttttacctagaatcgttaaactttgatgacttatattaccagaattacagaagacaacttgcccttctaggtaaaatgctatccaaaaagatgctcacaggtttacagtattttatctgtcatgctgttcttcactataaaaataaatgaattctttcagtttgaagtactgaatagtatgtaaatttcctcaaaaaagttgcatctggaaggcagggtaaccttctcaaatttgtgtttaacaaaagttgctgctgaaatgtaaaatctcccccacgtacacaatgatgatccctgctgcattattcgcctggaacatggggagttaggagtaagcaaacttccattaaagctccagtgagtgtagctttaaaaggaaatttagcttttgagacttttgagcagttaaactgtaaaatgatgtcctgcctttgcttttgttacttccttgacttctagggaataatatgctgacaaaatgagcaaaagcattgtacagcagtcgccatcattagttcagaatgttgtcagatcttttttatagcagacttccttctgcagctcgtgaagttaaggaactatagtctgaactcagtaatcagagtaaaaaattcattgaaaacatcctttgttccttctgagcgtccctttttttgtttatatagttgataattttagaaagtttcaaacatggaggataaagataagaggaagcctgaggatactttattcaggatggaaaaatagatagatagatagatagatagatagatagatagatagatagatagatttaaaaatattcagtgtttatattaaatatttgctctctcaaatacatgtatatagtcatttaattctatactttgtcaattttgagttttatcatatttaaagaaaacccaattaccttttatgctgtgtatatttgctcatctccctaatatttaaatatataagtttatcatctaaagaccaggacatttgctttataattgaccttttcaagatgtgcatttcccaacactttaaattttaaaaaactgcagaaattctggtctcagtttgaaattgggcctggtaaatgtgggttcatggatatagagtgtagtttaatggaaagagctcagattttatacctgacacctaataccaatttgtctgctctaatagtaatacattttctctctgtgatctcagaagagcttttctgaccctaatttttctattgaggaaaaattttaattgtaaaattatgatgttcaccttgcaggacttctttaaggtgtaaatagctaacaattacatagtacttactacataccaggtaccctactaataagtacattactatattaattaatctaattcttacaacaaccctaagaggtactgttatataaattttataggatgtaaacattatatactgtctcacaaatttcttaatggacatataaaatttttcattttaaatgtcagtagttacaatttaatttctggcagagtaaaacattgacattttaacatcactattacatatgaaatccatagtatattaatacctattatcttttttaaaaatatgaaaatgctctttaagaaatgttgtgtcataatatttactttttgagctcatatttccattctatatgcactatagaattttatgcaaacgtatattaattacttcataaacagtaattaattgtaatagcttaatattacttctagaaggaaaagtgttcatcattcagtttcttttttttagcattgaggtacctttattctcaaataaaaagatgaaataaaattttatgttataactgagttgctcagtttttatgcatcttcagctataatgtcaaaagttatttgtcaatgaaaatattttaatgtcctgtcagtatttcttcaattttgttgaaaacaaaatttaaagccatctaatttgcaaaaagatttgtttcccagtcattacaatcatctattccctcattttctgggacgtataccagaaagactttaccaatagttatttatcaaaggactaatgatacctgttttgggctttaaaatgttttttctcacagtcactttgtttaatgtattcagaaatgattaaggaaactgaaatatgttaatttcagtatcttttatcagtatatttttcatgaaaaacacttttattacatgaactgtattttgagcaataccttattggttcacccaatttctggaaaatttccaataacctacccagcaaagccagttatcaacatcacaccagccagccaagtcagacttactttctgtcaggaaaaaaagcattttttcgttttttgaactcagtgtgtcaatacatattttgaggaattctataaaatctcatcaataaggaagtgtatgaaggatatatttaaaatacaaaagttaaccaggcatggtgatgcacgcttgtaatcccagctactcgggaggctgaggcgggagaatcgcttggacccaggaggtggaggttgcagtgagccaagatcgcgccattgcactccaacctgggcgacaagagcgaaactcattctcaaaaaaaaaatagaaattatcaataatgaagaaaacataaagtataagtaaatacatcttataataatactaagtagtaaagtcaagattaagattatgtagatcgaatctaatttgtatgttaaaaaaatctttatctctaaatgtgtatatttagacctaatcaatgtataggaaagctagaatttattgaagtagcaaaattcatatataaaatacagatcatgcagttctgaaaagtgtatactatttaaaaactcattattccaacagctagcacacttataatttttattaggatgtagaaaatataagatggagattgcttaattgaaataaatattttataatataatttgataaaaataattttaactatcttagcaactctacatggaatctgtaagaaatcacataaaatattaatttcattttttacttttatctagtttaaattgaaaaattgaagttgctttgaaaagaatgccactgatttgttctgctttagctcttcagaaatgctttttgttctacctaatgacaaatcctaggaatgatgtttgagaatgttatttgctttgctcttatcagtctcctgaaaagcaatgaatttttaaataatagggaggtcattaagggaaaattaccctcacttcctctggccatattatatagttaattgcagcttcccaaccaggaccagcatacccccatttcagttgtgctttatgcctaatagaaattcatgtaaacaggaaagaccagaaaacctatagtgattctctgttgccttgatttgtcagtaaagaaggctttccctaatcggtattttgaactttactcctttggcaccctggaggactttacactccaagcagtgtaccataatcatgtcatggatggatagaggaatacgccttttctctttttttcttttaagaaagtgagaacaaggtatactgtataaaggagagcagggagaagaattttcaaggatgctaggaaagagtttacatggaagctgaggatccgggagttgattcctttaaacccaacagtccagcttacattttaaaagtcttcgcttacctctggatccaataatcccaatttggtaactactgacatgaactaaataatgcagttcttggtatatagcaaatgctaaataattgatagctattgaaaagtggggaaaaaaattaggatcaccatttgttactgtcattggttctcaggttttaaacagcagtcaccctgatgagtttggttaccgctacagtgcaggagatgtagcaagattgttttaataaccatcgaacaaacagatgcccatacatccccattttaatttggccaaacttcagcctgctggggagtgctgttttacaaatttagacctgacagttcagtcagagtctataaagaagtcatccctgaggcatttgggagccatactaaggcattgcagttgccagcatggagtagagaccctcttctggagccagtggaggaaatggaggaaaaccatagtgcagcaataatgctttagaaacttggcagcacgctgggctaccttctcaaagcataagcctttctaattcaagaaaagttgccactgccttaatcccacagttaaacatttactgaggcagaaatagagaaagaataggcttgttttatatgaatactagcgtagctaagaaagagttttcatagatttgataccctttgatgcttattagaaatccttcttactatagataattattaaaaactattttctaagaaatcatataactgaactgaacgtcagagtggtttatatgagaattattcagatttaaagtagagctcccccccccattatctgtgggagataaattccaagagtcccccattgagtgtcttaaataaatacttatatatactatactgtttcctatacatacatacatatgataaagtttaatttataaattttatacagagttgcaacaagaactataataaaatacggttataacaatatgctttaataaatttatgtgaatgtggtctccctcgctcgctctcaaattattcttcttgtactgtattcacctgatttcatattgcagttgaccacaggtaactgaaaccatggaaaatgaagccacagataaggggctgtctattgtccaactttaaataagtattatgatatgataggttgctaagaaggtgacctttgagaactaaagtttttttcttgctttatcattaattgagaaagaattcagtcaactatattgccttctctgtgttttattagtaaaatgcaatagaagtatgactttaacatttgaaagggatactgtgagaatttcacacattcatagcattttaaacttataaagcaaagatatatcttaatacattacaacaaaatgagtggaattcatttttaattttcaagaaatattttctgcagattcaagaacaatcatatgttctctcaagataaataatttcttatttagaaaacctttgtaataacttagtggtgagattgctgtcttaaaagtatgcattttttttagtaaaagatgatgaatgcgagtcagatgcagaaaatgagcaaaaccatgatcctaatgttgaagagtttctacaacaacaagacactgctgtcatttttcctgaggcacctgaagaggaccagaggcagggcacaccagaagccagtggtcatgatgaaaatggtaaatggatcttaacagttgtgtttctttccctctttaaaggattcttgtttctaccattctactatgggaacctgctctactatagggaacattcttgaagaccaaactttattacaggtgcctatagagagtaatctgttttattaatggaacactatgatgaccatgcagtaataaattattagctgctcatgtattgtggtagtaatgccactgcacgtgaaatgcttagaacagtgtctggacatcaaattccatttacttacatggtagcaggcagtagaagtgagaactatacctttactgccctttggattctttcccaccattcttttaacaaataaaaatatggttgtctgctttataccagaacatactaatttggaaacagtggttttcctgaatctgccttagtccactctgatatgaatagtcagcgtacagagtgtggaaaatgcaataaaaatgtgttcagactctcctgagaagaaataggctgtgatacagtttgggaggaaaagactatgttattgtttcaccagaagaaactaggttatcaaagaaatgaaagggaaatacaaaatttaaaaatatatgtatatttacgtaaaatttttatgtgacaaaaggctttcaaaaagcctcactgaaaggaaacaatgaaacctaaagaaatgatccattatgtagttctaataaaggttaaaccttttaaagtttgtcaggtccatacagtacgatctaaaaattgaggaactaccattctgaattagtttgaattatagaataagttgttgattttgttattcattactttcagatatttaatgtaatttaattaaatgctaataaagcattttgaagtattctgtcatatcagcgacatttgtttacatatttatccctttttataaccaaatagtattcattcgtgtgtatatgccacatttgcttcatccattgatgtacactgaggttgattccatatctttgctattgtgaatagtactgtaataagcatgaagatccaggcatctctttgatataccaacttcctttggataaatacccagtagtggaattgctggatcatataatagttctatttttagttttttttgagaaatctccgtagtattttcacagtggctgtcctaattttcattcccaccaagaatgtatgagagttcccttttctccacatcttcaccagcattcattagtttttgtctttaatagcaatactaactgggatgaaatgatatattattgtggttttgatttgcatttctctaatgattagtgatggtgagcatttttttgtatatctgtggctatttgtatgtcttcttttaagaaatgtttattcatatcctttgcccacttttcaataggattatttgggttttttaaatctgttgaatagtttgtgtattcttcatattagtcccttgtcagatgagtaatttgcagatattcactctgttgtttcctttgctgagtcttagcaataaagtctttgcctacccaaatgtcctgagtgttttctgtatgttttcttctagttttatggtgttgtgtcttatgtttaagtctttcattgatcttgagttgatttttgtatgtggtgagaaataggagtccagtttcattcttcacatgttaatattcagttttcccagcaccatttattggagagtgtgtccttttcctggtgtatgtttttggtgccttgtcgaaatcaaatggctgttaataatgtggattttattctgggttctctgttctcttccactggtctgtgtgtctgttttttactaatgccatgctgttttccttactgtaccttgtattatattttgaagtcaggtagtgcgatgtctccagctttgttctttttgctcaggattgctttggctatattggtcttttgtggttccgtaaaagttttaggattgttttttctgcttctgtgaaaaatgacatagatattttgatagggattggattgaatctgtagatcgctctgggcaatatgatcattttaatgatgttaattcttctgatccatgagcatgggatgtctttccatttacttgtgtcttcttcaatttctttcatcaatattttgtagttttccttggagaggtctttcaccttcttgggtaaatttatccctaggtattttacttttttgtagctactataaatgagatggtcttcttgatttatttctcgtctagttcattattggtgtacagaaacactgctgatttttatgttgagttttgtatcctgcaactttcagtttatttagcagattgcagttttttggttgtgtctttaggtttttctagatattagatcatatagtctgcaaagagagactatttgacttcttttccaaattggatggcttttatttctttctcttgcccaattgctctggctaggactttccaatactgtgttgaataggagtggtgaaggagtggaaatccttttctgattacacttcttagagggacgtctgtcagcttgttccatgcagtatgctgtggttctgtcatatatgtcctttattatatggaggtgaaccatctttgcatccctgggataaatcccacttgatcatattgcattatctttttgacgtgctgttagatttagtttgtgaatatttttttgaggattttgtatctgttgtcatcagggatattgacctggatagttttcctttttttgtttcatctttctctggttttggtatcaagatagtgatggacttatagaatgaagtagggagaattccctcctcttcagttttttggaatagtttgaggagaactagtgttagctcttctttgacagtttggtagaattcagcagtgaaccctttcagtcccggacttgaaatattcattatggattcaatctcattactcattattggtctgttcaggttttctatttctttctaatttaatcttggtaggctgtgtccaggaatttatccatatcctctaggtttttcagttttttcatgtatagttgttcataattgtctcttttgtatttctgtggtatcatttgttagtcttctttttcattttttatttgcatcttctctgttcttttcttagtctagctagtggtttatcagttttgttaccttttcaaaaaaaccaactttttgttttgttatttgtgttgttttttagtcttcatttcattgattttgttctgattgttattatttctttccttcttaaatcctaatttagggtttgctttgttcttgcttttctaagttcttgaggcacattgttagattatttgaaatgtttctattttttgttttaggtatttattgctatatacttcctcttagtgcttttgctatatttcataggttttgatatgttctgttttgattttcatttaaagaaattttaattttaatttcatttaaagaaattttaaattttcctccttatttcttccttgaccccgtggttattcaaaagcatgttgtttaattttcatgtgtgtgtagagtttccaaagttcctcttattattaaaatctatagttgtattactttgtggtctaaaagctacttgatatgattttgatttttaaaaatttgtttgagacttgtcatgggtcccaacatacagtctatcctagagtatgttctgtgtgttgatgacaagaatatgtatcctttagtagttggttaaaatgttctgtaagtgtctcacatccattcggtataaaatgcagtttaaattcagtgtttctttgttaagtgtctttctacatgatctgtctaatgctgataggggtgttgaagtccctaactattattgtattagaatctgtctctccctttagatctaataatatttcctttatatagccaggtactccagtcttgggtacatatatgttaagaattgttatatcctcttactgaattgattcctttgtcattctttaatgaccttctttgtccccttatactgttttgtttactggatttaagagtttatctcattatagctactcctgctcactatggtttccatttgcatggacatctttttctgtccctttactttcagtctatatggatctttacaggtgagatgaatttcttctaggcagcacatagctgggtcacagtttttatccattcagccaatctgtaccttttaagtggaaagtttaatccgtttatgttattattattgatatgttagagcctatttctgtcattttgatttctggttgttttgtgtatcatttgttcctttctttcttactgattattattgtggtttgatagttttctatagtggtaacatttgagttctttctctttcttatttgtacttgttctaccagtggattttatattttcatgtgttttcattatggtagatatcttcctgtcacttccatggataagactcccttaaacatttcttgtagggccagtctagtggtcatgaattctctcagcttttacttgtttaggaaagactttatttctctttcatttatgaaggataattttgctgggtatgatattcttggctggcagggtttttttctttcaatactttgaataaatatatcatttctttctctccttgcctataaagtttctgctgataaactgctattagtcgtatggaggttcccttacaagtgattggacacttttctcgtgttgtttttagaatatctctttgtcttttacttttgacagtgaatataatgtgccatggagaagatctttttgaattgtatctatttgggggtgcgctgagctttctgtatctggatgtctaaatcctttgctagacttgggaaatttttggatattatttcattaaataggttttctatcccttttgtttcctctttgccttataacacatcaaaaattcgaatatttggttactttatagtttcttatatgtcacacaggctttgttcattgttcttttattcttttttctcttactaggttattttaaaagacctgtcttcaagttctaaaattcttcttctgcttgacctaatctattgctgaagctttcagttgtcttttgtctttcattcggtgaattcttcaattccagaatttgtttagttcttttttatgatacttacctctttggtaaatttctcattcatatcctgatttgtttttctggttcctttgtgttgcttttctgttttcttctatctcacttagcttttataagatcattatttttaatcattttccaggatttcataaatttattttgattggaatctgttgctggataattattgtattttttggaggtgtcatatttccttcctttttcatgtttcttgtattcttaccttgataccacacatctggtataatagtcaattattctggttttttggatttgctttcattggttgagtagggcactttggctttgattctgggtacatgtggtagtgtaatttctgtatgatatctttcgttataaatagtgtgagtagggtccgtgatttcctcgttggcttaggtgcaattgttagtggaggctgaggtgaagtttggctgggacagggatgccaggtggaccattccttgggccctagcagtggtagtaacgggcttacagtacctgtccttagaccacagggtggcacattgacaccttgtgttagcaggtccagttgggctgatccttggaactccaggtggcttgcttgggtgctggtagtggcagtggtaagctgggcaggtgggcaggttctcaggctcctgggcagtggatgtcacttgggcaatggcagtagcagtggcaggacaccctctggttccctagtgattcacgctggtgttggcagtgactgcaatgggctgggtgagtcagtccccaggcctaccggtggtgcatgcaggagggtgccagctgtagtgatagtagcaggttgggtggacccaacctcaggcctccaggaggagtgttcaggtgacaacagtgttggactgggctgggtcatccccacgtccctgaatagcatgctcggaaactggggaggaggtaagctgggccagatggacctgtcctcaggccccttggtggtgtgtgtaggcattggctatcatggcaggggcaggatgatcccaggccaccagcagagtgctcaggtaaggacatcagtggttgcactgtggccttcttactggggagggcaaggttgctcttggtggcagcagccatagggagggagctgggaaatgtgcgctttagccccagacagcggctgtggatggggtagcctgtcctcaggtcccttataaatgcttagcagctcagctgctgaggaaattagggtcgctgccagtggctagcactttgtccccagcggtggaagcccacagtggcagcagtctgttggggagtctgtccttggggcatgtaaaaatgtgtgcagctcctctgctgggaggaggtatggtcactgccaatggcttgcacttcagccttagcagccgcaaccagcattagtgatgactgggaagggaggtatgtcagtggggctcaacaggatgtagtctgttgggggttgggctctcaaaatagtgctgtgctgtagctacttagaactcagggggtgtacagattcagcataagctccctctccggagcagcattgtcatgtggtctccacatacctccctgtgttagtctcagagcccacgatggtccaggggttctcccatggctaggattgcaggagtccatggtgggaatgtggacccctgggggtctctcacttactctttccctgcattggagagcctttgcaggttgctttacttccttcttccttacttgaggtgtttcctgtcacttttctgttgaattccagtgttctctcttagatgatctatgtgaagtgtgattattacctcattattttggtttttccttgtagaggaggtgagtaccagatgcctctattcagccatcttgaagcccctctctcaacatatttgaccaactatttaacattcaggtgctcagtctattatttgcagtctggtccttgagcaagacatttgatttatatggacttgaataaaggaatatatgttcagaaagcacttggagattttatgaaattatctgtggtggtttgtttttctatagtgaattcaaaatgaaaatagagatgatgtttacaaaaagatatcacttaatttatttcattgaagaaatgtcaaatatggaaaactactcttagttaaataatattaattggcaaaatattacattttaggattgtcaggcttagacagctccaagtgtaaaaataaagttcattcagtaaactaatttattcagaatgcctttgttttctaaaagctatatatattcatacatatacagttatatagcagatttgccagtgtatttcaataggggaaattacaagcagggtcatgcatgggatgtgtttatgtagcaggcctagatctggcccccatcagtctttccttccccaccttacacactatttttttggtctgaactcagtcctatggccacacctacctgcaagggactcttggaaacatagtgtgtgtgtactgtttactctttgatgatgatgacttggtagtttcattttcaaaatcagaggaataaacattaaataaataatgatacataccattgttaccaatagactctgttgtagagcacaaaattcccctttaatctgtatacacttacaaagacaacctacattctaattttacttttgttttcttttctagctaatcacatgacaaaagggaagaattatggtttagggaaaaagaatgggacttgaaggtcagacagcccgtatttgaaccctgacttcatcattttctggctctgtgacttttcttttaagttatttaaccttcctggaaaccactgttctctctcttataaaatagagatgagtatcattgcattgttttgaggatcaaatataaagtgggtagcacaatatctggaacatagcatagggactcagtggaaactttggtaatattttctgaatgttttaaatttaaaatatatgatctttcttttacaggaacaccagatgcattttcacaattactcacctgtccatattgtgatagaggctataaacgctttacctctctgaaagaacacattaaatatcgtcatgaaaagaatgaagataactttagttgctccctgtgcagttacacctttgcatacagaacccaacttgaacgtcacatgacatcacataaatcaggaagagatcaagtaagtgcaatgactgagagttcactaactttccagattttgacaactcagccctcaatggaaggcaaggattttaatatatttgaaagttaaaagaatgtactaaacagtgctatatctgcagccttataaaagtgaaaatgattatttatttgagttatctggtcattcctgagattaaaaaccacatatgaacgttactttagaggtaactcagtattttgttcaggtaagaccctttccatcttgacttaattattttgcttatgccataacagttaattcttcaagtttagaagatgttaaattgcattctattaaaatgttcagtgtaggaaaaataagtactgactatataaaccacattatactaaccaaattgacaagaaagtcaaattaaaaagtttaagtttctttgaaccagttactatttattctcagtataagctacgtggtttttttcccccgtagtaaagggagttgcctcctctaaaaatctaaagtttagatttttttattctgaagactcaatttttatatggtttattctacttctgtgtcactgtgccccagttttcagaagtataaaccaagactgttttgtaactataagttacatttaaattgctggttctatatttaggattaaagtcaaaaaagcttttatcagttgttcctcttttacaaggtcctcatagttatcagccatcaacaatgaaattaatattgccttaattctaactttaaaaattaaataaattttcagccacacagggtttgtgagggtacatgttggggttaggccacatttccagtttcttacatcaaagaatgatgtatatctacatacctgaactctgccctatggatgtacctaatatgtgtcacatatcccatagagaacaagttagaccatttgctaaggtgatggctaggccaaacaaacaacaaaaaagaattgtaacagaaaaagaatgactgagcagagtcaacctatttccttagtactttggcaacagtactcatgaaataacaagataataagaagagggtggcaatcagggagaatagaaccaagattttataggtttatggtccataagcccatgaaggagcacttgaaacaggtgagagctccaagagaaggacgaaattaatacagagaagggacgactgaaggcaaactccgtctccttcctagtgcccctattaatgagtcttatcagagagaccagcagaagagtatgttttataccttagcgctgtgatgtggccacagtgtagacaaggcttgggaaagagcctactcacgtgacattcaggaagcagacccatcctgcagctgctgccaccatattccctctactccaagggccatcgtgaaaggagaggacagattgaactggtggcgaaagcagaagatgccattataaaaacaaactccaaaatctttgatgagcatgaaaaccaattctatgatgatttttccagtgggtgcaaatgtagtaggatttacatataaaccgtgggtcagactaaggtcaggaaggagctgtgataaatatggggaccagtaatgtgaggaaatataactgggaggtcttggaaacaatttagtttgcaaggcagcaaactaaaaggtagaatgtatattttgctggcccttgagaatcatactgtgactaacaagcattttcaagtcttattaacttgtttattcaacaaacatttgtgtttcttttatatgtgaggccctcttctgggtgttaaaggcacagtagtcaaaaaggaagtccctgatattagggaccatacattagtagattatataaaacagaaataaaataatacatactgtgaagaaaaatacagcaggataagaggatagaaagtgatgaaagctgctaggtttcacagagaagggagacttctctgagaatgggatatctgaatacagtgaaggagccagtcatggaatattggagaagggcattccagtcagaggaaacagtgaaacataagaaagccttgaggccagaacctgctgggcacacactgagaacagcagaggccagtgtgaaagggagaaaggtaaggccagagaggtgttgggggctacatattataggccaagataaagacgttggattgtattctaaagtgcagtggggatgcctgtcaaggatccaggaatttttaatttttatttttaggggaacactgactgttggatgatagataagagagacaagaacggaagcagggagatcatttagaggcttttgctgtaatctaggccagaggttttggtggcagacagataaataagattgttggcttcagaatatgttcatatgcttgctgatggattgggtgagggtacatgagtaagagggtaatcaagaataactccaaagtttaaggcctaagctataaccaaataaatgatagtgctattcacagagataggaaatactaaagacggagctggcttgcaggagggaaattaagagtttggtgttaatcatgttaagtttcagatctctatcaccttccaactggcaatatcaaataagcagttggttgtaaaagtctggagttaaggggagaggtttagagatacaaatgtgggagtcgccaccatatatttggtattttaagtcatgggttttagtgaagtaggacctgattcagagtaagtactaattctctttccttcctgtataaaaggcaaaggaagggagattccagctggaagagcatgaagcagtagttgagttaagccgttaaaggctgggtagaatcttagtagtcaaaattatgggaaaacacagtgaaggagtaagaaattatgtaaaccaaagccaaaagataaagaggagcaatatgtgtgcagaaaaccatggctcgctaaatgactgaggcatagacttgtcataaaaaactggtgaagaatcatcttggaaactcagggactataatcttggaatctgtagacttggaatctttattgaggggttaatggggatccttcagaagtttatgaggaggagttgatagaatgcaattcaagcagtgcttttgtaagattaatctaagtatgaagaatacatttgaaatatgtgaaaatgggaatttgataaaccagacagaaagctattataataatccacatttggctgaaaaaactggaagtatttttttaatcatcagattaaagtacattttggaaatatcaaatagaagagacaggataaagtacaggaaaaatcctgtcttctattcaggaccttgttctgttgagtgagctttagacaggttattcagtatttgtggatgcggtttctatatctataaattggaaagcaaacaagttaacctctagttcctagcaaagtatatattactttatttttactaattttgaatattgtttaataaaggatgaactctgatactttagaaagttggtatttttctgtatcaaattctgtccccactatcactatcctttttggtaataatttcaggagttacatttttgtgactgctacaactgctaataatttcaagagttagatttttgtgactgctgcaatttgaggtctttaagaaacaaaacaaaacaaccatcaggctcacaaaaatgtcactcttagtagattggatgttctttagtctaaagatcttttgcttttcaaataaaataccagttcttttcttacagagacatgtgacgcagtctgggtgtaatcgtaaattcaaatgcactgagtgtggaaaagctttcaaatacaaacatcacctaaaagagcacttaagaattcacagtggtaaatattttttttctttctataccctgaatatcatagcatatgtggtaataaataaatatcataacatgtaatctacgtacatgatcagaaactccttgcatttcttttggcatacactaattgggagaaattttatgtttattttatgttttattagagtcttaacctttgactaaagtatatcaaattaatatagtatgacatactccagatttcctaatcagaagataatatagcatgttttagtaagtacaacctgaaaacatattagctttctgatgaatgtaaatgtcattgcctcctttgcacaattagcaggggaatggaaaagagtatagagatacgatttgcacaagagaatagggaagtgaagacatcctttatttgagaaaagttgaaatggaactcaagattagaaaatattggagagctgatatagaggcaatgagagggagtgaaaggattacagcattaatgagaatctgaaagaaaaatgtgctcacccaccatcttcacctgtctattccatgtcattctgtaaattattacttacaaggttaatactattatgcgatgaaagtgttgtgtctattttaggaactcagagtaaacagagagctatatttgcatttctttggagacactacttgaacaaaagcgcaaaaggaaaacttgctggtatcccacaatgccctatgaaatctgttcatctcctgataaattttgatatgttattttagatttaaatcattttaatgaaaaaattattaaccatgaatgggaaattatgggttttcacacattgcttattttgtgaaaattatgtattgacatttacattttacaaacatcttcctacaaaaaaagtatagttggatagctttgtgaagcatagttgatgatatttatgttttattttggaactgcatttctaaaagttttactgtattgctcattaaggctaaccctcaatgttaaacgtgctgaagttaccacttgaaaatgctcaaaccaagatccttaccaaaacatttattttcacacattgattattgtttctaaaaagtagaggttgtcttttgcagcctgccacaatattctgtttcttagcttctatgctattgaacaatttttatcaataataatatattttaacaacctaccttcttaccagagatgatttaaagttgttaataaagatatagctaattcaagagggatttttaaatgttgaaatcagggcagaggaaggaaaataaagctaacagtaagattcatgtatataatgagtcatattcattttgtcatattgcagtcatggaagatttatcagatctataaataatacaaagttggaaagtataaatcagaacaaggattgaaatactggtctagaaataagaagttgaaagttaagcattggtatttaaaaatcagtctcaatcaagtagtaaatttgaatggcccagagcttaatatgagctgactgtatgctgatactgctcaaaagctaatgcaaatttaggccagatcatggaacacaaagctcccactgtactctgcactgtccactcattatgtatgtacttatttctgtcttgtttttaaaacatctaatgtgaggcttgtatacctttaacatagcaagtaattttaatttaaaaatatgtaggaaaaattaagaaacactaacatggagtaaattgttggggggacaaaatgaatgctgtgaaatgccatacatatgctggaagtggaccacaaattaagctctaaggtttaggaagaaaatgacaatcagtaaccaagacccagggtgtctgtaagtaaaaaaaaaaaaaaaaaaaaaaaaaaaaaaaaaaaaaaatcagttgctagaaaaaggactattcttccttcctgataccaagtccatagaaaacgttattccttggaacaacataaagagaaaagaacaaaacagaagttatataatcctcagaaatatccttaaaataacacagcagagaatttgatagggtttcttttttaaatcagattattcaatagaagccagtcatagttcaccaaagtgctatttaggaaaagcattgctccagggtggccacgtagatacagtttaagtacacagctctctgatggtctggttgattccaagagaagatttttgagcaaaggctacccaaagtgacatctcaggactggtaccagtctgcaaaccctgtgttactcattcttgagataagtacagaaattgagagtaagcatttagcatttattataccaagactttgtgacattttactatattttataaaatattggtccacagtagattggaaacttaaaaaagaaccaaacaaagccaactggtcattcaccacaaatagtttgaaaagctctgcctagggtatctaataatggaagagctgaatatcttttaggaaacctccataactttcttttcacatgacttttgaaaagatgttgagaatcaggatccaaaattatactctctaaaattacctatattgttgctaaatactggtacccaaaaaattttgatcatgaccctatgcagaaccgtgtgtgttaataattagttgattctacctgtaggaattgagctatcatgaggaaaaggctaccagacctccactcagattagagacaaaagaacacctgcatatggctgtggtccacccccaaaaataattttccatggtcttagtaatttttgcctggaaaatttttgtatcagatgcagccaaacacccaccttagccattaaaaaaaaaaaaaagtcagtatacatagtataccgaactttgagtagtgaaacttcctgatgtaaccttcaggctaaaatacttgtaaaccctaacctccatagataaattagtgatatgcctaactaataaactgtaaagctatgaagctagaaacaaggagttttaaattaacaaatatagtgactttggctttagaataattgttgtgtaaactttctttctggcaatgataaaatatcaagataatttttaacaataataatgataactagcacttattggatccttagctatgtatagccacatgttagttatttgtatgcattaattcatatagtcctcaggataaccctatggagtaggttttattattttctactttttactgatgagaaaattgaggctcagagggcttaattaacttgtccaaggtcactcaggtagtacatggcaaagctagggctgtgatgtagtcatcctgacccaaagtcattcccttacgtaccatttctgtccccctgttttaaaaaatagtctgtatttatagatgtttatctttctagcgtctctagaaggaaaataagcatgtagttcatgtaaaaatgttatcaagtaattaaaagtgttaaaatagagatgtactagagtatattccttgttttacccccactggaaacttttgtctgttgtattttgagaattgaatcctattccaggcatcgcattggaaaaatattgataaattggagaatccccagaggtgggttaacaagcaggtaagggttctaaaacccacatcctgtgcagaatgtttgaaggacctaggtatatttaacctatataagagaagtttaagaatacatatagcagctcttgatccatttgaaggtttgacttgagaagaaaagttacacttgttctgtgtggcatcaggacaaactaggatagggaaataggcatcatagctatttttttggctcaaactcagcctgtctcttagtagaattgcctttttaaaaagtgactagcatttgttgagagcatactaagagttttgctatataatctcatatgacccctataacagtccaatgagaatgtatctgcatttgcacattgaaaaactaaggcttggacaggttaagaaaatactatgtgatggagccaggatttgaacccaaatccatggacctcaacagaaccagacaggaccatcttgtgcagggctgtccagcaggtcctaactccccttttattaaagaagctcaagcagagattagctggtgtcaagaatgatatgaaatgaactcttcattgaaaaggaggctgtactacaagggtttcttaaatctcttccaattcttatatatgattcttcaaataatcatatttattagaaaatataactcacatgtttaaactatagcattgaagttactattaagcaatttttagtagggcttaaattgattcctcactgctttcattttaattcttaaaaagagcaggagatggagagttttattttgatactaagtagacaaatcagtgtcatcacatctcatcattcaacaattagccattcactcatccaaaaaaggtttaatgagcatctttgcaacctgtactttgatgggtgcaagggataaatggcaaacaagcctcagaggctcctgccttactgaagcttatagtctgtaacctttaaattataaattagtgaactataacttaaaactcaaaggaaacattaggtttgtaggaaaatattccatttagctcggtgctttcaaaattttctaccaaagtatccctaacagccaaggagaataaatgccttttaccccacagagtctagggaagcagcttgagggaagcctctgcaagccaaaggctactttgacagtgcgtggcttttcctagcaagtcacacaaatgtgtttttctctgttttaatataaaaataatgttttatcatatccactgtcactaaaattgaaactccaaggtgctttgatacccactacagtgtttatcctgggagtatatacatttcagtttaataagccaatgcttatagaatatcttatataagttttcctcccattagggaaaaactattttcaagaaagccctatgggtacaggaattattattaatcaaagatagatattcatacttgttaagtcatatgggacattttacttatttttcttttctttaatatttctcctacagatggttgagtagagtaaaatatagaaaattatataggtcggtgaaatgggataagaaaaaacatacttgaaagagtagaatgtaattacttttgatacttgagaattatttgaagttataaagattggtggaaatattatacacatatgctgagaagattccatgattggttagcagaacatgtacctcagacttagttactagcgttcatcacatctatgtaggttttgaagctaaaaagtttattctaaatacagttctgtcacaagcatgcatggcagtcttctttttaaaattgataccgcttgttttagggaaatgaggatacataaaaatttatatgtaataattcagtgaatataatttgtttgtttgtttgtttaggagagaagccatatgaatgcccaaactgcaagaaacgcttttcccattctggctcctatagctcacacataagcagtaagaaatgtatcagcttgatacctgtgaatgggcgaccaagaacaggactcaagacatctcagtgttcttcaccgtctctttcagcatcaccaggcagtcccacacgaccacagatacggcaaaagatagagaataaaccccttcaagaacaactttctgttaaccaaattaaaactgaacctgtggattatgaattcaaacccatagtggttgcttcaggaatcaactgttcaacccctttacaaaatggggttttcactggtggtggcccattacaggcaaccagttctcctcagggcatggtgcaagctgttgttctgccaacagttggtttggtgtctcccataagtatcaatttaagtgatattcagaatgtacttaaagtggcggtagatggtaatgtaataaggcaagtgttggagaataatcaagccaatcttgcatccaaagaacaagaaacaatcaatgcttcacccatacaacaaggtggccattctgttatttcagccatcagtcttcctttggttgatcaagatggaacaaccaaaattatcatcaactacagtcttgagcagcctagccaacttcaagttgttcctcaaaatttaaaaaaagaaaatccagtcgctacaaacagttgtaaaagtgaaaagttaccagaagatcttactgttaagtctgagaaggacaaaagctttgaagggggggtgaatgatagcacttgtcttctgtgtgatgattgtccaggagatattaatgcacttccagaattaaagcactatgacctaaagcagcctactcagcctcctccactccctgcagcagaagctgagaagcctgagtcctctgtttcatcagctactggagatggcaatttgtctcctagtcagccacctttaaagaacctcttgtctctcctaaaagcatattatgctttgaatgcacaaccaagtgcagaagagctctcaaaaattgctgattcagtaaacctaccactggatgtagtaaaaaagtggtttgaaaagatgcaagctggacagatttcagtgcagtcttctgaaccatcttctcctgaaccaggcaaagtaaatatccctgccaagaacaatgatcagcctcaatctgcaaatgcaaatgaaccccaggacagcacagtaaatctacaaagtcctttgaagatgactaactccccagttttaccagtgggatcaaccaccaatggttccagaagtagtacaccatccccatcacctctaaacctttcctcatccagaaatacacagggttacttgtacacagctgagggtgcacaagaagagccacaagtagaacctcttgatctttcactaccaaagcaacagggagaattattagaaaggtcaactatcactagtgtttaccagaacagtgtttattctgtccaggaagaacccttgaacttgtcttgcgcaaaaaaggagccacaaaaggacagttgtgttacagactcagaaccagttgtaaatgtaatcccaccaagtgccaaccccataaatatcgctatacctacagtcactgcccagttacccacaatcgtggccattgctgaccagaacagtgttccatgcttaagagcgctagctgccaataagcaaacgattctgattccccaggtggcatacacctactcaactacggtcagccctgcagtccaagaaccacccttgaaagtgatccagccaaatggaaatcaggtaaaaaataacctccatcctgaacctggctagtaatatgctatttgactaatttcaattaactttgtctaataaatatcagtcccgtagagccaactagattattacaaactgtcatttttaaaaggatcaatgtttgctttaacttttctggcatgatgtcttcagttggttgtttgctaatccagggtattgttaccagcttaaagtttgaaatgctattctactgaaagatgatttttaagtcccagctaaaaacctgtttgaagttagaaatcaaaaaacaaaattgaaatactcgctaattgggtttctgtttttatagctaaattcctaaaattagtaatagtttctgccttgattatggtcattaattaatgaaaatatgttcccattcacaggttcataccaggcaaacttatctatcacttttatatactaatacatctgtttataaaaggttttaattaaataaacaggaatgaagtatacaaagaacgcatcttgtgaatttactgatcattttatgaactgtgcataaacagtgttcagtcataatgtatatgaggaagtgtggctgtgaacctaaaaatacatatgcattttcctccttaactatcacagtgtttaccacaacagtgtttattctgtccaggaagaacccttgaactggtcttaccccaaaatccacaatagttttggatagagctattgtatgcctcattgtccagactttttccatgtcactgatgttgatgttttcccattttttccatcaatttctgatggaatcaaatgaatactagagacaaatttgatattttatgcaaatattttctataagtataataatttcaatatcctgctcaaacttgtatttgctgcttttgttttcccttaaatattgctattgattgggtttcctgtaattgtgataactcttgaaaaaaagttcttacgtgatcattgaattcctctaaatttttagtgtacagaacactttgcatgcctttgaatagaaaaagagccatccttagcatttcatagactcacgtgtcacgtgactagatcaagtagcagtgaaagtagaatcaagttacttcagcaccagggccactcacaaatgacagggacaaatggctgcacctctcttgcctcatagagccataagaaatgttgtgaaaaaccttcaacttttagaaaatgtgtgggtttgaggcaatggcgtggaacactctagataaggtaggaagatcttaggggacccagttccacaacaggctccctgcagggttatttggcttacataagaacgtgctgcccaaaattatctccatgagactgcctggagtttctaaaggttcattttgattagcaattatttctgttaaaaagatagaccctcctgcattgtttttccatcttgctccttagacaagtggtagagcacacctctctcttttcaaggagaccgtggaggttaaagaaccctgaagttctggaggatacaattgaaagaccaggttttaaaaatagaatgttagcttttgcttagtgaaacccagaatgagaaaaatgaaggcaaaagatgcagttagtaatgagcgattaattagcaaactaataagttaaaaccttctgcaaatttctcgtaaagtaatgattcacatgaaactaggtaaactctgttactatatattttacatgctttcttttcggtgtccttgctttctttccagtaccagttgagtatatgtctttgctatggttttgactgtgttatccccaacctcactcttgtctttgtcatctccacctgtgatctggccccacccttggggcacatgtgcagtgaagatcagtgtgcttgctttggtcaagtccttgaaagtataaaagtataagttaaagtagttctttatctcatgcttttatgtatatctcttgtttatcttttaatgttaaattacattttctcacacctttctccctctaggatgaaagacaagatactagctcagaaggagtatcaaatgtagaggatcagaatgactctgattctacaccgcccaaaaagaaaatgcggaagacagaaaatggaatgtatgcttgtgatttgtgtgacaagatattccaaaagagtagttcattattgagacataaatatgaacacacaggtatgtcagtgaacacaaacataaagtgtccatgatatgatatactggaagatgcaaaattaaaaactaaagttttagaattttctttctttttttttttttttattttgttttgagacaaggtctggctctagtcacccaggctggagtgcagtggcacgcaatctcaatctcggctcactgcaacctccgcctcccgggctcaagccatcctttcatctcagcctcctgagtagctgggactataggcacataccaccacacctggccaattttgatatagacgggttttgccatgttgcccaggctggtcttgaactaatgagctcgagccatctacccacctcggcctcccaaagtgctggtattacaggcatgagccaccacgcttgacccagaattaattttcttattttttacttatctgatctggccattttcacctgtttgcccacttctacctagtacttaaggtctgtgcctttcttttggttttttgcttcatctgtttttttgtttttttcatgacttatttcctttaagctgacacagcatttattctgtccgcattcatttaatgcaagcttatgctatattaataaaaacatagtacatagtacccattaataaaaaatatgagaccagtgggctaaagtcatagggagacaggatctggcttcataaaagaaaaagctgcttcataagcatgcggcaagctgtcctggcaagtcaagatcttttgttttaagtaagaagttctgcctaagaggttggactagaagattctaagatcctgtaattctgagatcctgtaattctgccacaaaatatgcctccttaggttgactcagggatggcaaactatagctcacaggccaaatgtgagcatacgcatgtttttctatgaggtaagaatggtagtttttgattttgtttttacatttttaaatgattggaaaagatgaaaagaatatttatgactgatgaaaattatgtgaaagtcaaatatcagcatccgtaaataaaattagttggaagacagcatcgcctattcatttacattttgtctatgtcagctttcatgctgttctacaatggcaggattgagaagctactacagagaccatttggcctgcaaagcctttaatactcactaccctttacagaaaatagttgccaactcctggcctatttcattccttccatcagtgaagtactgataaattttaacacctggttctctgaagggtggggaagccctgatttgtagtgtttgcagctttttgtggcataaatactcccatcatggtggatttcgagcttgaatgtgatgtcagcttgcagaattcctgaaaatttagcagtagactctctccagccagtacaaactggctccagcacactcctgtgtctctctctaacatgggttgctgtagaaggggctgggtttatcctgagctctttaatcccctacctgctcttccctgcccccactaccagccattatgactacagtatccatatttatctttcatattcttaactgtttcagtgtattttttactcttgtgagaaaagatagaattgtttttccttcttcaatctgtggattcatacagtgacacttggaaggttcttggagctaaaaactggttacataagagaaagtcacacctctcaaaatcagccccttgtaactcagtcctctggttttcagagatctaagaagagttagaaaatccccttcctcttcaggcaaagttaaatattagcaaatatcaaagtgaaaaatatatatgaaaaactacactatttctaaaattaaaaatcatttctgcatttgttagtgttaactgcttgatagctctgaaattggacattatcgatcctgactatgatcagttgttgccagtccttttcatgtctgggcagcaacactcctgtagcccatgcgttctcaggaggggcaatattgccctcacgggccaaaacttgtttcttagggggcaaaaaagtctgagatactacaatggctgtggttttctaaagaagctcagtatatatactgtatatttatgagttttatcgtatataaaaagtgtatagtaaacattaaaatttcactgggagcagagcttgtgactaggaaaacaaaatgactaaaaagggaccttgtagtgataatgaacacaaggtgagcagcaagtctgtccctgtctgccctcactgtgctcgttcactaccagacatctcctcccagctgcacttggcccattttccacctcgctgtcatgatgcttgtatttttggcatttcaatgtcatgtagctcccattgacctaatcatctgcacagcagagtgtagagcactacgttttttaatgtaaagaacaaaccaaattgcaatattatattacaaagagtttgggacctggaaatgttttaaaaatgaaactaataaccctcccctttctacaacatgaagtaccccaaaaaccgtataaggattttatttgctgaataccaccattttatttaacagaattcttattttgcaggtaaaagacctcatgagtgtggaatctgtaaaaaggcatttaaacacaaacatcatttgattgaacacatgcgattacattctggagaaaagccctatcaatgtgacaaatgtggaaagcgcttctcacactctgggtcttattctcaacacatgaatcatcgctactcctactgtaagagagaagcggaagaacgtgacagcacagagcaggaagaggcagggcctgaaatcctctcgaatgagcacgtgggtgccagggcgtctccctcacagggcgactcggacgagagagagagtttgacaagggaagaggatgaagacagtgaaaaagaggaagaggaggaggataaagagatggaagaattgcaggaagaaaaagaatgtgaaaaaccacaaggggatgaggaagaggaggaggaggaggaagaagtggaagaagaagaggtagaagaggcagagaatgagggagaagaagcaaaaactgaaggtctgatgaaggatgacagggctgaaagtcaagcaagcagcttaggacaaaaagtaggcgagagtagtgagcaagtgtctgaagaaaagacaaatgaagcctaatcgtttttctagaaggaaaataaattctaattgataatgaatttcgttcaatattatccttgcttttcatggaaacacagtaacctgtatgctgtgattcctgttcactactgtgtaaagtaaaaactaaaaaaatacaaaatacaaaacacacacacacacacacacacacacacacacacacacacaaaataaatccgggtgtgcctgaacctcagacctagtaatttttcatgcagttttcaaagttaggaacaagtttgtaacatgcagcagattagaaaaccttaatgactcagagagcaacaatacaagaggttaaaggaagctgattaattagatatgcatctggcattgttttatcttatcagtattatcactcttatgttggtttattcttaagctgtacaattgggagaaattttataattttttattggtaaacatatgctaaatccgcttcagtattttattatgttttttaaaatgtgagaacttctgcactacaaaattcccttcacagagaagtataatgtagttccaacccgtgctaactaccttttataaattcagtctagaaggtagtaatttctaatatttagatgtcttagtagagcgtattatcatttaaagtgtattgttagccttaagaaagcagctgatagaagaactgaagtttcttactcacgtggtttaaaatggagttcaaaagattgccattgagttctgattgcagggactaacaatgttaatctgataaggacagcaaaatcatcagaatcagtgtttgtgattgtgtttgaatatgtggtaacatatgaaggatatgacatgaagctttgtatctcctttggccttaagcaagacctgtgtgctgtaagtgccatttctcagtattttcaaggctctaacccgccttcatccaatgtgtggcctacaataactagcatttgttgatttgtctcttgtatcaaaattcccaaataaaacttaaaaccactgactctgtcagagaaactgaaacactgggacatttcatccttcaattcctcggtattgattttatgttgattgattttcagaatttctctacagaaacgaaagggaaattttctaatctgctttatccatgtacttgcatttcagacatggacatgctattgttatttggctcataactgtttccaaatgttagttattatggacccaatttattaacaacattagctgatttttacctatcagtattattttatttcttttagtttatagatctgtgcaacatttttgtactgtatgtcttcaaacctggcagtattaatacccttcttactgacatatgtacttttagttttagaaaacttttatatttatgtgtcttatttttatatttctttatttattacacagtgtagtgtataatactgtagtttgtattaatacaataatatattttagtatgaaaatttggaaagttgataagatttaaagtagagatgcaattggttctcctgcattgagatttgatttaacagtgttatgttaacatttatacttgccttggactgtagaacagaacttaaatgggaatgtattagttttacaactacaatcaagtcattttacctttacccagtttttaatataaaacttaaattttgaaattcactgtgtgactaatagcatgatgctctgcagttttattaagaaatcagcctaaccatacaactctcatttccttagtaagccaaattaggattaacttctataaacagtgttgggaacaatgtttaacattttgtgccaatttgttcctgtattcatgtatgtaagttacagatctgactcttcatttttaagttccttgttacatcatggtcattttctagttttttaccagactcccatctcacaataaaatgcatcaacaagcctgaactgctgtcattcttttcatcattatcagtattttctttggaaaactgtgaaatggggtacattgtcatcctgcatttgattcatcttgagctgaatttgggtaacactaaatgttttagacattctccactaaattatggattttcttgtggctaaatgtttctggagaggtcagagttgacaaaacctcttcacaggttgctccttcttcctgaaatccttaatcctccgcatttcatgcttcaggtcatttcagggaagcctgggtttagatgcctttctgactctcagctcctgcacttctgtcatcatacctctgatactattatttatattccttccccactaggaacaggaaccacatttgtcatagtcactctcacattcctcactgcctaacagggtgcctggcataagttgggacaacagatatttgttgaataaaaatataatttgcatgtttatggagctcagctatgttctcactttttttgcttctaattccagaatatatgttaaatgatctaataatttgattattttcttataagtcttattaaacactagtcataatagacacaataaattatgccttctttttctattgcctta

SEQ ID NO: 73 - DNA, 132902 bp, Homo sapiens
cgggcttcccctccccggtccgcgggtgcccggcgcgggcccaggaggcggaggcggctcctggggagagggatccgggagtccctgaggcggccccggctccgcactaggaggcggggtccgcagtatcgccagcggccggcgcggcttcccggagccccggagcccgaggcgcgaggtttaggctgagccctccccggcgcctgcccccgcccggcgcccgcctccgcccccgcccgcggcctggagcgcgcctccctcgcctcccagggtctggcgagccggcgccggccgagctgcgggagccgcggagagcaccagctgacgccgcgggagctgctccggccgcaccatgcgggagctggccattgagatcggggtgcgagccctgctcttcggagtcttcgtgtaagtagtggcgcaccgcgggcagggcgcactgacgcgggggaacaaccgaccaagcctctctgtgccctaacttagtttgcgcagccgcttcccactggggcctgggttcgaggtcccttccccgccaagtgcccgcaacgtgtcctacgggaccaagagagacccttcctctctccttcctgggaccctaggcgcggagcgaccaccgcgcgccgaggctgagacctgctcccgggtctcaccgggcccgcgcctgtcgccagccccgcaccacctgcccgggggatccagggctgcacctctaaacagggacgcgcaccctggcccgtgccctcgggaagtttctccttctgtgtgatctttgaggcccacgttggaagtctttacccctggccccgtctccgattcctccccgctgtgcccagggccagactccttccgtgtccctggctttagcgcccgcggtcctggcgagcgttttcccagcgggcgtttgcggcgcttctcctactgagaaactgttgctgtggaggcttgagaagtcaaggggctgcaggccggggtgggatacacacaccctggagctctgtgcccggtcgatgtccgctttgggggcggaggccctccaggggtagccgtgaaatgcccagggtggctttgagcggctggcactgagaacagcgatcccgaaaagaagaaggggtggtggcgcaggttctttcagagatgcctgagcctcctccgtgcgcccagggacccaccgctcattgacttccagggcccaagctgcagggagctgtcacatctctctttcagacctgagcccagaacaccagctcagagccaccccgcagcctcccgtgagctgctgtcacctaggcacccacacctgcactggtccctccatcagtgagccaaattctctccccctctctgcccatggatgttttctgccacattctaagtattaaagttacatgaactttttggatttgccatgcatttatttatttgtttgtttttgttttcgtttctggaaaagccctcccgagccaaacaggaggccctctttgaatttctgcctcaatctggagtcatccatggcaggtgtgctgtgtcaaagatgacttctgttctgggcagcccaggggatacacatggaaagaaatgccctttcttgcatgtttttctttagcagggattaaattcatccagagtatttattcacaccatcagaaaaggccatgagctcccccagatgcaagcaagcccccctctcccgccttctgcccgaacactggtgttattcactgggaagaaggaacgagaacttcagttggattttgatgcatttggaaaaacaaaacactcttcccttctcctactctattttctacctttggaatgtacgttaaaactaatgattgctgtgtgatcagatggggacagtttctaattggcagatgggctaaaacctcattaaattattatgtgatagaaatgataaactagttttcagtgcacagtagaatttaacatttgttgggtgaatgtaggaagaatgctgagataaagtgagataggctcttacactatctcactatctggtttgactgctgctgggggtgctcagataaaaaagggtccaacaatatgtaaaaatatttatagttttcaggtgtcccttccaatatcccccccaaatatttatgagatgtttacagatatacaatggtctatgcagtaaatttgaaaacttggtaattattgcttatgcgcgtcttgctttttctaagggtgtcatgtaaaagctggacaggcagtttatgttctgttctctgaagttccctcttgtgttacttaataggggatctgttgtcacacatggacattgatagcatttttggatgactcccaggtttcttatcaagttgttaacagtgtgtccaacttgtggctcttttacctgcaaaaaccagctttggtattgatgcgagcctccctagggggcagatcttggatgttcagatgctgttagtatcaggcatgtaccgacttctgggaggacggctgggagcatgcagaaacagatgaccctttgttttctcagataagcgtctggcaccttgacagaggctgacttttgggggaagtttaattcttccttttgccagtactggaaatgatggcaatattgggttgtacctacctctgctcacgaagatggtggtcttagcagcacaggggtttagaaagtgcccctgggcaggctgaatccgatttccctgcttcagccagtgtagctcagcagctagttttgcttggtatttctaccctattgctcaggatgaaagaattatctgcggggagagggggtatcttgcttctttgcaaacttatgcccccggagaaacatcacctgtagatgtgcctgttctctgactacatttgctctgcatgagagcagggatcctgttacccgtagcccatatgctcctcaaagattccaagtgagagctaagaaaatgcattttgggcccacgggtagtagggatgcaagcttttccttactgactcttaaagatccctttttctgtttctagactaggcacagtgctgaggttttgtgcattcagaattctgagaggttgctctccaggcacccccgctcccgcaaccaacccgtagatgctcagtcctgcctaaggacttcaaatcgctgggaaggaaattagtagagtaatgcaaatcaaggctggcatataaagtttaacataacagaagataaattggttacaggaacccagtgtttaggaaaaataaaagtaaaatgtgaagctttgaggctgtgtttagtaccatgaagtgtgtaggccttgaggtcctattgctcttactcatggattgtgggcagagcaggaaggagaagcacttttgggcttcttctgtcctgctgctacccaagactccaggagagattcttttgagtatttctgcaaatgccaaggctagcaacagaccttactcagcaagcacatagtgtagaaatgagatggctggttaacacccagcagaccaatggtgcactactagaagcatgctactcactttgaccactatcaccagtacaatagcaatcatttactgagatcttactgtgtgtcaggcaccaatgaagactatcccgtatgccatttagcctgatgaagggggtatattgatatttctttgtcatagatgaagaaactgaagcacagtaaaattaaggaacttcccaagtaacagggctaacaagggcagctctgagatctaaatctagatgctccatctgcaaggtctggactctcaatcactttgcttcataaaaaatagcagccagttttggtcagtccagggctaacttcatgcaaaaggtattccatgtgatttctcttttaagcctcatctcactggattctgttcattattcccactttacaaacaaagaaaccaaggtttagaaaggttgagtaagttgcctgaagtcactcagctagcaggaggtataaccctgattcaaacaggcagctgaccccatgtccctgagtggtcagcctctgagacagaagacatccagccccaggcttccagactggtgctaaactgaccacatcctgtgagcaattccttccatgactccttatctccagaagagcaagtacacattgcctggagtgatgtgtgggaagctgtcactgtagctctaaaatctcatgctaggatgacacctcaaaggtggagggatggcagcagtggttcacacttcctaaaagatgggatttgatcatggcatagattttaagagtacgatgtggtgagtaaattgccggtgagaacatcaattgtagtagtaagaaactaggaatacactgctttcttccaccgtttttggctgtcatctcccaggacatctgttagttcaagcactctgtatttacaagattgcagaaaggaccctagaaagatgatgacgatctcatgtgctggacggggggaaagatggtctgtctgtttcacttgtaggcttgagttccttggcgtcttatcttcctctttccttccttccatctgcccttctccctatccctccctgtcatttctggtggctctctgtctgcagggtccccctaggagctgcttaggatgccagggtgcacaggtaatggtgtttacctccccttagataatccagcatccttctttgagctcttaggatgcaagaggcctttgccaggcacaggggatgagaggagagaaggccaggtggcccccagtaccttacagtccagtagggaaagtacacagtgggccaccatttgttattgtctccaatgcaattactggctttgaaaattttgcctccaaacatttctctttcattgttcatccacttgatggatatttggcaccttctaggtgcaagcatttgtgatagtcatttccttttcccttcattggtacgctttgattggtgtaattccagcaagacagagggaaacttggtgctttacctggtccaggtgacttgcttgagggcactggatgtcaggtagatttttgaaatatcgacaaaaacagactcatctttactacctctaagagcccagtgtaagactccatgctggggacagttggagcaaggtgctaggtttcactgagaaggaggatgcatgtgccagggaaggctgcccagggctgagcaccgaatgccaggtgtacaggtcctaggcccaaggacattcctgcagggcaaaggcctggaggtgtggaggcatattttgggtggagatgaggtcaccaagtgtggcctcagtgtgggctttggggtgggtgggtgtgggagtggcaggaagggagcctggaaggagaacgcaagtggcctcagggccctgcagggcaggggtcattcccacagaggcaaaactgggggggcctggaggtttgaaacaaaactgtaccatgctcagatgtttgcccaggggtggaaaggaaccatttggccagacacacaggccctgcagactgtgatgtgtgactgcacactgcttcgtggccgcagccctgcttcacagctccccaggacaagtactgtctgcactgcgttgtggtcagccatctgcatctttaacttctttgctttcccctgctcccagcctagccttggcacaagcatggtcggtgcctcctgactcagtttcccaggatcatttttacagacctaagcattctgcatcagtccaaagcaaagctactgaaggggcggacggcctgctgaacacctgcgtcaggattacacggggcccaggtcaggctaactgaattaaaatagagatcgaggcccgcagaatctgcattttgaacaggggctccttccatccgctgcctttgggaaatacttatgtgcagtctagcgaatggatggcagcaccgcagggtggaggcagcaggcggtggccctgtagaaccctgtcactagagtggcctttgtaagagggagggggactttttgtgttaagtgaagttttggggttgattggctactctaccatcagtcctttctatgtaatgaatacattcagaatcattctgcttgctctctagaaacaagtttctttcttttttttttttttttttttttgagacggagtctcactctgtcacccagcctggaatgagtgcaatggtgcgatctcggctcactgcaagctccgcctcctgggttcatgccattctcctgcctcagcctcccagtagctgggactacaggtgcccgccaccacgcctggctaattttttgtatttttagtagagacgtagtttcaccatgttagccaggatggtctcgatctcctgacctcgtgatctgcccaccttggcctcccaaagtgctgggattacaggcgtgagccaccgtgcccggcctagaaacaagtttcaaatgagttgtttgaagcaaagagctataacaaaagacctcgggctttggagccagacaggtctgtgtttgggtttcagctctgccactaactaacaattgccttcaatctctgaacctcagtttcttcatgtaggaaatggagctaatacttacttcactggattttattagataagattagataaggtactttaagtgcctgtggtacatataacaaaaattggtaacttctcgccacccttgttaatccctattgcatacatgtagtgtctaagaatggcagcacagcacagtggttacaactgtggcctttggcgtcaggttaccagggcttaaatcctattttgttttgttttattttgaagacagagtctctctctgttgcccaggctggagtgcagtggcacaaccatagctattctcctcagctccagccatctccttgggccctgctcttacaggccccagaggattctttttttttgtatatatagatagagtcttgctctgtcgcccaggctggagtgcagtggcatgatcaccacttactgcagcctcaacctcccaggctcaagcaatcctcccacctcagcctctcgagtagctgggacaataggtgtgccatcgcagccagctattttattttttgaagagatggggtctacattgcctatgctggtcttgaactgctgggctcacaagatcctcccactttggcctcccagagtgctgggattataggtgtgaaccattgtgcctaaccaaatcctggtttgcaacttacctgctgtgtgagttttgggagaaagtatttatccatcttcagtcattgttcctccttctgttcaatgggaatgtccgtcatattcatgaatgtaagaatatgttaaaaacatattgtattgaagtataagtttgaaccatattaagcatattttgttgaagtattgtgagtattaaatgggacagtatccagctcattgtaggtgctcagcaaatggtgatgttattattattatccttttgttgaaatgaatccataatatacactaaagagaaacaccataggtgtctaatgatgttcttattacaaatgatttaccacaggatttctagacaagaataaactcctggaagtgtatttctaatgattccttttaggcctcaaaagtgagggatgtaccttgccatgagtttgtccgatgagtcggaaccccagatcttgctgtctgatggggtgggctggtctcagccttgcagtttctcagcagtggcttaaattgctggccctttgcaacagtggttccaggacatcgaattgaagcgctctcagcatagctgcattagataacatactagaaaatgctatgttgtgttcttagataacataacataaggaaaatgctatgtccccgttgtgaactttgcacacagggctcaattagaagccacatccagggagtgcttttcatcaggcaccctctcagcccatctgtgcatgctgtgcaatggggcccgagtgtttcttctcccctccctgggaaggcgtctgccttgtttgataaatggggcatccttctgtttgaaatactacttgccactgtaaaatgagttggctgtacccagaattctgagaatggatgttttcccacagggagataaatgctcccggcactgcaaaagaagcatatggtttcataacttgtggataaaggtatctcaattagttgtaaagaatatgccttttgtgacacatgcaaggctcataaaagctcactacctctatttttcaatgatagcatttgtaaatagaaacattatcttggtaatagtgcttctttaaaaaatattatcttgctgttctatgtggatgaattagaaacactgtttttacagtgaggaagctccttcagacaagactgctgcctgccagtgggcccttgtcgtcattcaaccagaagcttcagaggtgttaagagcaaggtttgggatgcctggggcgagtgagaggaggctgagaggacctggggctgcagaacccaggggcagcttcatcacagtctctcaatatgtgaatgtgaaacattatcccacagaaaggaggaactagttgttattctatctccactaaagacaaagcagcagaaaaacagggccagaggaggcaggagcatttaggttggtttctagaaaggtagcagtctgccagtcaaagctagatgtttctttcttctttaccagagggtttttaaaaacatattttattgaagtattagtttgaaccatatgaaattgctgatatttgagtgttttgacctataaaactgggaatttcattcagttcaacctaaaataacatacacaaagaaatgtgcactattcataattgtacagctgtccagaaaactacccgatctaccaagcccccttccaccaccctgacttctaacatcatttgaattctatagaaatggaaccataaagtttgtgttcttttgtgtgacttttttgttgaatgtgtttttgagatttatctcttttgttgtgggtagcggcagtttgttcgttctcgtgtgctccaattcatttattcattttacccacggatatatgggatatttatcatttttggctattaagtgcaatgctgctattggtttttggtgaacatcttataatttcttgtaggtatatacatacgggtggaactgctgggttcttcatcagaagttcttaaggaaggatttggcctctctgtccagctatacctctaaaagcaatatttagcctgtatgatgctgtaatctccatctgctgagcagctaccttgtagaaagcatgtaatgggcctggcaagtgacagggcctggcaaatgggtcccattctgcaggcagatgggcagcatggcccacttctgatgaaaaacccagcagttgcacccctacgtatatatgtacaagaaattacaaataggttcaccaaaaaccaatagcagcattgcacttaatagccaaaagtgataaatatcccatatatccatgggtaaaatgaataaataaattggagcacacgagaatgaaccaactgctgctacccacaacaacagagataaatctcaaaaacgtattcaacaaaaaaagtcacgtgaaagagcacacgctttacggctccatttctctagagttcagtgatgttagaagtcagggtggtggaagggggcttggcagactggggagttttctgggcagctgtataattatgaacagtgcacatttctttgtgtatgctatttttaggttgaactgaatgacattcccagttttataggtcaaaacactcaaatcatgctgaagaagtgacaccctgactttgctgattttagagacgcacctgagcctcctcgtctgttaaacgggtacactctctcacctcctagggagcttgtaaagatgaggtgatgtaagctgtgccaggtaccttgcacaaagatggcatgtgttaggtgctaaagccagtctcttttccttcctccacctccctccttcctagaactgaggtggagatacaggtcaatgaaaagatgcctgacatcacagtgtaataataatgacaatgaaatagtgtagttctcaaaagtgcagcaaagagctgagccttcaactaggatttagaaatttcctaggagacatctgaatcataatccaagaaaaagaaattgccagtatataagtatgtgtaggtttgttttttttttgagacggagtcttgctctgtcgcccaggctggactgcagtggcacaatctcggctcactgcaagctccgcctcccaggttcacgccattctcctgcctcagcctcccgagtacctgggactacaggcacccgccaccatgcctggctaatttttttgtaattttatttttttttaagtagagatggggtttcaccatgttagccagcatggtctcaatcctcttacctcgtgatctgcccgcctcagcctcccaaagtgctgggattacaggcgtgagccaccgcgcccggcctgtgtaggtatattttaattgacatctatcatcaccttggttataggaaggcagggaggtggagaaggagacacctactagctactaaggaagaacacttcaatgcctaccatgtgccacctttgtactaggcacttgtcacagtcataggctttaattatgacacctctcaggaggtagcgttgtcctcatttacagagttaagggttaatgctccctcattcagagagctcttaccaattaaaaagaaaagagaagagctcatcaacagaaaaataggcaacagatacgagcagaaaactaacaaaagttcataaactgacacactttaaatccgtgatatttttatgttaacttttattttaagttcaggggtacatatgcaggtttgttacagaggtaaactcatattatgggagtttgttgtactgattattttgtcacccaggtatcaagactagtacctgttagtcacttttcctgatccttttcctcctcccacccactcacccgcttctagtaggcctcagtgtctgttgttctcctctatgtgttcatgtgttcttatctttccacttataagtgagaacatgtggtacttggttttctgttcctgcattatcttgctaaggataatgacctccagccccatccatgttcctgcaaaggacatgatctcattctttgttgtggccgcatagtagttcatggtgtgtatgtaccacattttctttatccggtctaccactgacgggcatttaggttgattccatgtctttgctattgtgaatagtgctgcaatgaacatagtgtgtacgtgtctttattatagaatgtaaatatgtgattccatagcaatgcaagatatggatctgaaaacgacaaaataacaatgagtatacattagtagaagctttttatgtgctacaatgaaagaatgtgcagctattgaagttagttctatagtaggtagttatttgtttacttgagaagacatttataacaattgttaagtgataaaagcagattagaaaagtgtgcgtgatgctattttaatgtggtaatgtaataaaatcaattgtgcctatatctctataaagatacataatacagttttaacggtggttattttgtgctgatgggattatgtaatatttgctttttaaatgtttatgtctaaattattttatagtaagcatttattattttcatgcacaatcaaaaaaatcaatatagatgttttctgttacagaacaaaggagaggccaatgaaatattccaggatagggcactgaatgatttttttgtgtttgctttagaaatatttaaagtgacaatgtgtcaaaatatcaacctttctacattttttatcaactaaaatacttaagaaaaatcagagagtaaagattactatccagaatgtataagtttgtgttttcaaatgtgatcggctgctcaggtggaatagtaaatgggtacaactgttttgaagagcaatattgcagtacataaacagccataaaattattcctgccctttgacttagaattcttggtaaaaaatacatggaggcactaatggaagagacaccaaaatcctcacatacaaagatttttttgctgtgttccatacaaaacaaagtaaatatatttgtcaaataaaaattattaaaactcaaatggtcaacatttgaagatgatttggtagattgtgaacacacagaatattatctagttattgaaagaatcattttgaaaatcatgaagaaacgtggtgaaattttatgatgtaatagttaaggaaaagcactatacaaaaatatacctcggaactgcaacttttttttttttttttttgagacagagtcttgctctgtcacccaggctggagtgcagtggcaccatctcagctcactgcaagctccacctcccaggttcacaccattctcctgcctcagcctcccaggtagctgggactacaggcgcccgccaccatgcccggctaattttttgtatttttagtagagacagggtttcaccgtgttagccaggatggtcttgatctcctgacctcgtgatccgcccacctggggctcctaaagtgctgggattacaggcatgacacaccgtgcccggccgcaactatttgaagtatgtctgatttgggccaatactaggaagaattacaccacaatgaatgtgatggaaatgaatgtatttctcctcacttacatttatttcaggattataaaatacttgtgaaaattaaagcaatacaaaaagtataaggctcctggaaccacttcaactttctctgcctattccattctcttcactttttatacacatttgtatataattaacaaaactactggaaacacattttatttatagcttaatttttaaactcattatctctttaagatattatatatataaacacatgcttcattgttttttactgggtgtgtggtgttccattgtattaacctattcatggaatcttagggtattttcattttttgctatgaaaaacaatattgcagttgttgtgtacattgtagtgcacctgttcaagtattgctgcatgataaactcttacaaatgaattttctgggtcaagaccacgtacattttaaattcagatgaatactgccaaattgtccacccaaagagctacacatatttacatttcaccacagttgtgtgaaggtgtccatcattatgcatccttgccgatgttggatgttttgtatttctgccatggcctggaatgtaacatttgcttcactttgcatttctctatgtttagtgttgagcatcgtttcacaagcgtattggcaatttgtatttcttcagtgaaatagctgtcttttcctttatctgtgtttctattggatctctgaattattcttactgatgtataggtgtgctttatgccttataaatactaatcttctctttcatgtattgcaaatattcttccatgtctatggttgatttttaagtttctttgtaatttctattattgtatacaagttttaattttatgtagttaaatctgtgagtctttccttgtggtttcagtttcagtcctatttagaaagtcgtttcccacccaaaacataaatattcttctgtattatcgagtattttacacttttgttctttaattttaatttgctaatgttttggttctttatctgttacttgtccccctcaaatggtttgtcggttatggaatagtccattattttcttgcatcttatgggattgcaactaaattctattctgaatatctatttgcctggtattgtctcaattaatattttaattattgtaatttcatagtatttttagatatctgtagggaaaatttgcccccccgtactcaccccactccacccactgggaaggagtagagtacagtggttaaggcttcaggctctagtgccaggatacctaaacacaaatctgctacttactggttataatttgggtaggttgcttcatgtctctgtgctttaatttcctaacctttaagccagataatgatagtgctaaaatagttttattgtattgagaccagagattgtggcttgtatgatttctgtgttttataactggttatgattttctgtgtggccacatacatagtaatttttttggctgtaaatttacatagcttgaacataatgaatagtttctgtttggtgagtgcaaagttctaaatatattaaaagaagttagccatgctattaaaattttctgtagtcttattcttttaattttgtctttttaatttgaaggtatgctatctctgtcaaacaagaataattaaagccttcacattgttttttggaagtaactaatattttgtgttattaaaaccaacttattatgtgttttctttttgtggtgctttatttttatgttttatcccctttgtttctttctttagctgactagctcaagtgttctttgctacccttcttttttactttagtaatttggatgtcataatttctatctctatatttctaattagtattcttaaattgtatctccttctgatgcttgagcttttattattataaaatttctatttgtctttgtattaatattattatcttaaggtctactttatctaacattaatatgttactacattatatttattgagattgaagtctgcacaggttatctttttccatccttttactttcaacttatctgtatctttatttttaacatatggctctcgtaaatagcatttagttatatcttttaactttatctgtctagccaatctctgccatttaattggagtggttaagccatttacagttaatacaattattaatatggttgaatttaaatctatcaccttttactatttgttgcatgtgttctttgtctctctttttctgtcttcttttagattagttagatacttgtttgtattccattttacctcctatattgaattgttagctatatctctttaaaaattttagtagtttatttcacaattataatatgcactttttacttattaccatcatcttccctgtgtcatttattataccatttcatgtacaatgtaaaaatcatatgacagcatactttcatttcttctctcatgcctttggtatattgttatagattttacttctatatataaatctcataaaacatttaaattatttttactttaagcaatcaatatactttcacagaaattaagattttaaaaaatttaccaacatatttatcattctcaatgttctttatcagttcggttagatttggtttttccctttgggattatatccttttagcctgaataacttcctttagcatttcttataatgcagattgctggaaataaattctcctggcttttgttttcttgaaattattaatatctttattttgcctttatttttgaaagatttttttggttggatgtagaattttcggttgacagtcgtcattcaacactttaaatatgtctttgcattatcttgtggattccattgtttctgatgataagtcagcttctactgttattgttgcttttatgaatgtaatgtgtttttgctcttgattgtttttaaaactttctgtttatgttttactttcagcaatttgattgtgatgtgtctaggttggtctcattagtatttttcccatttcttttcattgagattattggagatatggtttgttgtctttcatcaattaaatagtcctaagactttattttatccaatatttcttctacccaattctgttgctcctgtatttttggttcttcaggtacatatacatatatattagacagtttgataatgtcctacagatcttggatgctctattctatttttaaagtattttccctctctgtggctcagtttaagataatttctattgacttgtcttcaaattcactaattctttatgctactgattctattgtgtctattctgctggtatgttcatgcaataaatgttttatttcagatattcatgagttcagatctggaattttcatttggtttttagagatttagtttctctgttgaagttttccgtctattatccattgtgttcatctttccctatcatcttttaacatattcataatggaaaatccctttccaccaattcccacatcaagatgatctatacctttgactttctctgttgattgtgggtcacattatctctcttcctttgcatgtctagtaactattatatattggacactgtgaaacatacattgtagagattctggattgttatttttccctaagagtattgaattttgttttggcatgcagttaatttacttttgggtcattttagtcttcagaactttaattctaggctattgttgggcaaatctatcttgttttttttttccaagattgtattccttaatctgggacatggtttttactcctatggttttgcccttctgaggtttcagtagaaagcctaagttggataaatttcaaccccagactgtatctcctagcactggctgggtgctgaaatctctgcttggctctttagactgtgactgttactttccactggggttcttgtagtctttttctgcacattgcaatttctgagttagccaaataatttgaaggaaatttatacacagaacttgggttccccttctgaggctgatatggtttggctctgcatccccacccaaatctcatgttgaattgtaatccccacatactgaaggaggggcatggttggaggtaactgaatcatggggtgagacttccccctcgttattcttgtgatacagttctcatgagatctggttgtttgaaagtgagtggcacttcccccttcactctctctctcccctgctgccaggtgacgatgtgctcgcttcccctttgcccttctgctatgactgtaagtttccaggagcctccccagccatgctccctgtacagtggaaccatgagctagttaaacctcttttctttataaattacccagtcttaggtagttttttatagcaatgtgagaacgaactgatatagaggctaacctcctttacatggaggtttcttctttgttgtattatgtatttttttatttctatctggtttatcttttgcataattatttttttctcttctgctttgctgattggtactctttgaagctcttcaacctgtatatggatttatgtttatgtttttattcttttcagtagtgtttcaggagggtagagagacaaaatatatgagttcaatcagccatcttgacctagatgtctctttaaagagatctaaaagtttttctttgacacaggtttacattttttagatacaaatttatattttaaaaaaatttatcatttatccatttttacttttaccatgactatttttatggttctctgagttatccttcaaatgacctcactttgtctatctaaaatctacctgttttacaaaattcagctcagaatttacttttctgtgatgtgttgtttgaaatatcagccctgaattaatgtacataatactgatgacagttatatggaagtcccacatttatttttatttattttttgattatagaaatacttggttcctggatatattatgttttcattcattcttgtggaccaataaaaaatcttcagtcatataatgagaacatattaaattagacttttaaatattaatgctttatttatgaaaacccatgtgaaacattgatgctttgcttttgtttctcctgacacaaaaaaaatcatattgttcattaaaagcaaactggggttgtttggctttagagatgatgatatgataatgatgagaacaatgatagtaataactaatatttattgagtattttctatatgccaggcagaggcatagttaaggcaatttactccttgactattcaaacaactctataaggtaggaattttataatgctttcatttttttggatgagaaattcaaagcttagagaggttaaagatttcacccagcgtcacattgttaataaataagatgacagtgttttgagtgaaaattttaaattgagtattttatgtgttgaaacaatttacaccagatttggatggggagggggaagaaaggggctggtagtgaggctttcttataattaaatgaccctaatgacttcagtgaaatcatggatacaaaggggattgacaattcccgagcaagtggggctttgacattcaccagatggcccccagcatgaatgatgttatacccagcagctccctgggagaatccttagggattattatatccattcccttcttttttttttttttaagaagatttttctttttttccctcttaaccaagggccttactcagagcctccttgttgctcagtggcagagctgggcccagcacctcaatgtcttgacttttggcccacaggcctgcgttagcatggaacttcctcccttcgtaataatgggtgggttctgcacatttggccttgtccttttcccattcattgggggttatatgaatgcagctatgtttctagacaggctttgtggggcagctacttgggagagctgctcttcattacaacaaactcttgctctaaaggaagtcctggcagttcccttctgtgtatttatcatacttctgtgggatgcatgagacagacatgttcacaggtccagagaacaacacgagatgatgagtgagcccggcctttgggcggtgtattctcctgcaatggtctccctggcctgaggtttcctgtagattttattctaagtatcgggaaaagggatggaacctgaagttcaggggtgggtgttcctggaggtgttttttctatgaagaccagcttgaaaacccagagggcaccacatgtcacaatgggaatagctgcactttgggaaaaatatctgcagatggtaacactcaccttctttgttccaggttgttatcctggcatgatgtgggcggggggcaccagtgtccactaatctcacttaagataatgtctgaaatcacttccattcctccactcctgcaggctcggacatgcattgattgggtcctactgtgccaggcactgtgccaggcccagggaacatggagacgaataatggcatgtgcctgcatcaccactgtccacatggacagcaggggccttggagatctgggctgcagtggagctgggacttgggtgggaagaatggtggctctcagagctaagagcaaaaagggagtggaggacatcagggacacgttttgcctggggccagctgtgccccctgtgcaggccttgcctccagctctccagccccagggccagctctttggactcttttccataagttataacaactgcttcttctcttttttttgttgttgttgttgagtgcttactctgtgccaggtaacgtttttatgctgtatgtgcaattatctcatctaaaccttacaacaccaccatgatgtagatgctgtcatttttctcactttataaatggcgaaactgatgctcggggaaggaagtcatttgcccatagtcatttgccaacaggtggcacagatggaattagagtccaggctgactttcaacttccttgttcccattgctctgttgctgcagttgggtggggtgatactttgtccccagcttcccacatactggcccgcccactgcgggtcataacaaacccacactcagatgcaatccagtctagtggtgatgatccgagcatcaggagccagaatgtgtgggactaaatgctgcctctacctctacttgtattactctaatctctcctccctcagtttactaatctgaagaggatagtagaaatagtgcctactggatggggttctcagggcacaaatgctagcagagtagtacctggcacgcagggagaacaccacaaatgtaagcccttacattgccttcataggtgcttggctaaagctttccttacccttcttcttgcccctgtctttagagcactgtgtttttctgttccctctcccaatggtcttcttgtcaccctgaccttgtcttgcctgtgagagccacttgtttataagaattatcttagttcgccataatcttggcttctttcttaaatccagtctctccctggatgtcagcagacttgttggaaaacagtgtctgccttagaataaccaatgtaaaaaacatcaagaggctcggacgaagcttgattaattatctgtgtactttatgccgaaagagtgaatcatggtcttcattttcctctcaagaatgtgagctgcctgctttgaattaatccagaacggttcaaaaagaaaagaaaaaaaaccttctctactgctatgtcagcatttggaattactgcctgaggcttttctttttccttctcagagaatctaaaggtatgtcgaataattgtaattatttcaagttaaaaaaaaaaaaaaacagaagaaaagaactttgtgaaagttgtgctccagaaagaagtgttcccatcgtcagtttttttgtttgtttgtttctgagcaagatgctttgaaaatcacctcccatttttctgctcgctgagctggaaatcacaaactcttgcctctgatgggaaatcagaaagcagctcttggtctggactgagctgggtctgatgccatattgaacagagtcaggttctatataagaatcagtgtcagagagaaagaagtctgggtgtcatttcctggcgtggccttgagctaggaaagcatttgcccctctctacagtgagccccttgggaggaggggccttggctattgtgttcaccttgtctctgtcacccctgatatatgcctggcacatagtagatactcaggaaataccaagtgaatgaattgactgcagtgaggggatttcagatcacacttctgcctactggaggaacgggctgtccccatgggaatctcctgggcctgagtacagcagacaggggccatggcttgtctggccgacatgcagagaatcttagaggacaagttgaggagggcatgagtcactcaaggacaagtttcttctccaggaagacacacaacaaggaaggggtcaggagtttcactgagatgtcctttgggtctgccaccccaccagatccctggaatgggtggcccctggccctcccgcattgccctttgccacttagaggctgtgcagggttggaccaaggagggagatggcaaaggtgacagtgggcttgtgtgggtttgtgctcatttggctaaatgtcaggacacataccaaggttttccacgttttcatttctcatagtgacccatgcctagggctgactgtcccaccttcttgtgaggggtccttggtggagtctggcctgtttccccaggtgcagcttccaggcccagatacttggcacatcttccaggaagggaggtgttcagggtgcctgctttaccctcatagctgaagctcacctcttccaaaaccacagcttttaaacaacttatctttgctggaattttttctttttcttttaagtcaactatttggtaaaattatgaaacaagcataggcttgatgtaggaaacttatatgatacacagagaaaatggatagaaaataagattatttatgatcctactacccagagaaaaccacagttaacattcttgtgggtggtcttttagtcttaagcctgctcccatgataatgcatactttctttacacaagaggtatgtctcatctggaataacattttgtagcctgcctttttcccttggttttatgccttcagcattttcctatgccaaatattctttcttgacttgttttttaaaaagctgcaacacactccattaaatgaaagcaaataatttaatacagccagtctgctggtgttggacacccagtttttagttgatgtagttaacaccatgatgaacaacctggaacattcattgctgtgcatacctctgtatgttcttaggcttaattcctggataaggaaattctgagtcaaaaaactggctgggcgcagtggctcacgcctgtaatcccagcactttgggaggccaaggtgggcagatcatgaggtcaggagatcgagaccatcctggctaacatggtgaaaccccatctctactaaaaatacaaaaaattagccgggcatggtggtgggcgcctgtagtcccagctacttgggaggctgaggcaggagaatggcgtgaacccgggaggtagagcttgcagtgagccgagactgtgccagtgcactccagcctgggccacagagcgagactccatctcaaaacaaaacaaaacaaaaacaaaccaaaaaaaaaccttcccatcccccctactgccaccagttttgccaaatcgtcctccagaaataattttctgatttacattcctcccagcagtgcctgatctggccggtgtcctcatgggacctgctcaaatgttccttgctagaaaaactatcactgagcatctgtcccatgttccacacccttctctgtcacattatcacattcctctgttttgtttttcttatggcatttattgcgatctgaaatgatgctgtccgttatttattggtgtccctgtttatcatctgcctctgctcagcaggctgtatgttctgtgggtgcagagaccttgcctgtcgggatcattgctgtcctgcactgccttcccaccattccccaggatctggctcaccatggtgtgcaggaagtgtttgctggatgaatgaatgtttacccacaccattaatgatactcatattatcatgcattttttaataaaaatcgttgccttcattctaaaacaaatgctgccaaatttaatttaaccgatggctggagatgaaatggtgacagatggccctcaggtagtcatgtaattccttcttgttctgatgaggtatgaggtccttttccatgaaataactggaggttgtaattattttggtttgtttcttatagtttaaaatgttttctctattattgaaaggctatggatggtatgctctctaaagcaagttagtttctgtttctgatttgcagctgataatccgataaggccttgaaaggagatagtcaccttgttaaaattgtatgtaaagtaagatcactcttatttaatatttaggtttagcctgagtgtctggacagctgcagggttcaggtgctggaggtttctacctgcctagacctttttgattactggctggttcttagagagggacagttttgacggttgagtacctggtgcatgaggttttaccattcttgttactgagtgtgttgcccccttgagtacaatagcagaacatcttctgactaatccagtagttacaggttgaataaggagtgcatccaaggattattggctgtggatgtgcatctggtgcaggctggggaggctgtccagggccatgcctcaggaccctgaatctgacctcctttgtccaaggttttgatcagcaacttggataaagacatagaagccagccttatcaaatttgcgaatgacagaagaccgagatggaaagctaatatattgaataatagaatcaggattcataaaaatcttgacagagaggatgcatctgaaactaacaaggtaaatcctaacaggattacacatgcagtcggcagctcacttcagcagagctggcagcagccaccaatgacgggagaggactggcttgaaggcagtttgtggaattagtaaggtcctgggtttcctaaatgtttatttttaaaagtaattcttccttctatactattaacagcagtaaggcatccagacctaaagggtgctaatctgcccccaacactgctcctgcccccttgtctttcctttcttgctacaacaacactttccccactgtcctctgctccctcacccaacccatttgattttcaggcccaagttgggctctactttatctgaggagctttccctaagtctcaaggcacagcaagttaggctcttcttccaagcactctaacagtaccccttcttccccattagggtgctcaccaaaccatgtgaccagtgtctgtctgattgtacatcttccctttggattaaggactcctggtgggcagggcctgtgtctgcctgtgagacgctccaccctgagctatgacacagtgactggcacaaacagatcccagtggacactttggttggtggcatacattcctggagcatggggtggagtctgggtcccacactgttggatcttgtacccctgtaggccatccaggagtggcagctttctagcccttgtgctatggaaagcacatggtggaactgcagatacctaaccagaatacaaaaggatgtggtgaggactgtaccatgtgcaggctgtcatggatggagggtgtggactattttgaggggcttcagggcagcccaggggacatcagggagaagggataactcagttcctagaatggaaagggtttaaaaccattgtagctccaaccatctatgtactgcttgcttggtaggagttgtccattcactgcaaatgttgaattgtggagaggatttttaaattggaagtggaagagttgaaagataatgataatggcaaccacaatatcaacagctaactcttcctggaagttccctgggcatcaggtgctttatacaactgggtccttacagcctccctgaaaggtgtctggtgctctgtgacctcagtggagcagacaaggaaacaaagaccatgatcaaagttttatggccagtaaggagctgataactgaagcttgatcccactctgagggcatctgatgctgagattctactgtgctgccatttagcaactgatacggtttgactgtgtccccacccaaatctcatcttgaattcccatgtgttgtgggagagacccagtgggaggtaattgaatcatgggggcaggtctttcttctgcccttctcatgatagtgaataagtctcacaagatctgatggttctataagggggggtttcccacacaagctctctctttgcctgctaccatccatgtaagacatgacttgcttctccttgccttccaccatgattgtgaggccttcccagccacgtggaactgtaagcccatacaacttctttcttttgtaaatttttcttgggtttgtctttgtcagcagtgtgaaaacggactaatacagtaaattggtaccagcagagtgaggtgctgctgaaaagacacccaaaaatgtggaagcgactttggaactgggtaacaggcagaggttggaacagtttggagggctcagaagaagacaggaaaatgtgggaaagtttggaactccctagagtcttgttgtatcgttttgaccaaaatgctgataatgatattgacaataaaattcaggctgaggtggtctcagatggagatgagaaacttgtggggaactggagcaaagatgactcttgttatattttagcaaagagactggaggcattttgcccctgccctagagatttgtggaacttagaacttgaaggagatgattttagagtacatggtggaagaaattcctaagcagcaaaacattcaagaggtgacttgggtgctgttaaaggcattcagttctataagggaagcagagcatgaaagtttggaaaatttgcagcctgacaatgcaattgaaaagaaaaatcctgtcgccaggcgcagtggctcacacctgtaatcccagcattttgggaggctgaggcgggcagatcacgaggtcaggagatcgagaccatcctggcgaacagggtgaaaccctgtctctactgaaaatacaaaaaaaaaaaaacttagccaggcatggtggcgggtgcctgtagtcccagctacttgggaggctgaggcaggagaatggtgtgaatctggaaggcggagcttgctgtgagccgagatcgcaccactgcactccagcctgggtgacagagtgagactctgtattattcctgggtgtgtctgtgagggtgttgccaaagaagattagcatttgagtcagtggactgggaagggcagacccaccctcaatctgggtgggcatcatctaatcagctgctagtgtggctagaataaagcagacagaagaaagtggaaggacttgacttgatgagtctttcagccttcatctttctcccatgctgaatgctgcctgccctcgaacatcagactgcaagttcttcagattttggcctcttggacttacaccagtggtttgccaggggctctcagacatttggccacagactgaaggctgcctctcggcttccttacttttgaggttttgagactcctgctgatccaccactggcttccttgctcctcagcttgcagacagcctatcatgggcctttaccttgtgatggtatgagtcagttctcctgaataaactccccattcatatatacgtctatcctattagttctgttcctctagagaaccctgattaatacattctcttaggggtcttgtgaggactgagtgaattaatgaagttaatgagtgtaaagcacttagaatgtcccaggcatacactgagtctttgggcattccactgtggtcaccaccatgggccttgaatccctgcagtgatggggccctggaatagaagattctgtgatttgaatatttgactcctccaaacttcatgttgaaatttgatcaccgatgttggaggcagagcctaatggaaggtgtttgggtcaagggattggatcccttaagagtagatcagtgccctccttggggatggggtgagttctcactctattaattcccatgacagctagttgttaaaaagagcctgacccctccccactgtctcttactttttttctggccatgtgatctctgcacgtggagctccccgggccttctgccaggagttaagcagcctgaggccctcagcagatgcagatgcccaatcttaaacattccagccattagaattctgagcaaaataaaccttttatctttataaattacccagtctcaggtatttctctatagcaacacaaaatggactaagacagagggagagagagacaaatgagggctctgcagtcatggagcttccaggctggtggagatgaccagcaatgagcaagtatctgtataagtgctacaggaaatttcaaatgtgatgtgctagtaagtgagcagatgttaccattgttaacattttggggattttctttttgtctctttttttctatgcatatgtgcatgttctataaacaataacaatattagcaaaagggagagcacaggatctgctatattcttcccttttacctaacagtatatcattgcaaatagtcaatcaccataaatggtcagtgtatggctgtcttagtctgttttatgctgctataacagaatacctgaaattggataattcataataaacagaaatgtattggtgcatgtttctggagattaggaagtccaagatcgaggtgccagcatctggtgagggccttcctgctgcaccatcccatggcagaaggtgagagggcaagagaaggtgagagagggcaaaaggggggtgaatttgtgcttttataaggaacccattcctgcaataatggcattaattcattcaacggggcaaagcccttatggcctaattacctcttaaagttcccatgtcttaatatgctgcattagggatcaagtttgttgcattggggatcacctcttaatactgttgcattggggaccaacacatgaactttgggggacacattcgaaccataaaaatggaagaataatgttcccccagggatgtccacatcctcattcctggagcctgtgaacgtataaccttacatggccaagggaattaaggttacaaatgtaattaaggttctattcagatgaccctgagatggagagattattctggattagctggtgggcccagtgtaatcacatgagtccttaaaagtggaaaagaagaggcagaagaggaggtcagagagatgcaatgtgtacaggactcaacctgccattgctagctttgaagatgaagggaccacaaagcaaggaatgagggcagcctctagatgctggaaaaggcaaggaagtagattctattctagagcttccagaaaggaatgcagctttgctagcactttgcctttagcccagggagatctgcatcagacttttgacttccagaacttgtgttacttaaagccactatgtttgtagtcatttgttacagctgcagtaggaaacttataccatctgtttctaaacctgtgccttccccctagagctccctgaaggcagggactgtgccttattcactctgggtccaagtgcctggcacaggctttaagctcaataaacatttgctaaactcttttcacctgctcaggagctgagcctctgcattaggactggaggggacccctttgtctctcttttccatacccaaaccctagtcttgatgtggcccactaggagtggcctccaaggcctacagacctacttccagcccaggccagcctaaagtgagggcaagtggtacagagagaacactgcctgctggcttaactcacaccaaatagcacctccttcagaaggggaattcctgttaagtagaagggttcataagtggaactcaaaacatgcacatggtttttgatgctggatactgtgaatttcttgccatatttttacaaaaggaccattattgattcattcattagggaaataaatgaggtaaagacaaaaatcaaaaagaaaattgaaataaaagaaaagaacaagaaaagcaaaaagaatacagcgatgtgagctgttcacctcctgagttgctgcttgcccatctctccttgtaaggtgactgcacagtgggcctgccccaccctggctgccctgagatttgtattagttggcctagggtgaggcagggacagtgatatttttaaaagctcaacgatggagcctagtaagcagccggtggggacaccaactgctgcacgatattcttggtctgctctggtctcaagttagaagctcccaaaccctaaaactctgtaaaggatgctgcttgaaaaccagccaagcagccctctcatcttataaatggagaaaccgaggtttagaaacacagatgccaacctcacagtcatgtaatgtcacacttggtgtccgggttgaggccagggcctgcttctgtggatttttcacgcccaccctctatcttactagtgttgccaatagtcttaaattcgggcagccccgtcaacctccatctgtgagaggctttcctcccatttcatttaagtttttttttttttcctcctcaaatgctcctttgaaagatctgcttttgatgggagacatggactcgccctgcctccgcctccatgtctactgtcccctagatgaggcaataccaattagctagtatgaacatgggctctggagtcactcaggtgtggctctgaaatttggctgcactaatactgtgtggtccctgaaagcctcagtttgaccagctgtaaaatgggcttaatactagtacatcattcatagtggttgtgaggttgaaaagacatggaatacatttaaagtgctcagaactgcgtgtgacacataaatgccagctgttacacgttatattattgttttaaattactactgatatagggaggagaatgtggtttcaggtgtcagagccagtaaggaacatcgacagacgtttttgccattgcttattggcttcctttggaatgtatgtggcattggtcagtggtgtccactccttgaccagacaggcacaagtcctctcttggggactggtaacagtgagcttccaagggaatggtgtgacgagcttgttagccttggagcagaggctccctgggcttttacctcttatctactttgcctgccttaaggtcagcccacccgggctgcctcctgcaggggtcccaggtgtatggacagacatgagcccttgcttattgtgggattcagaaggggtttgctgccttctccttcactgtctccattacagaaacattttccatgcaagtaattgcagaatgagataacgaggaggaagatggggcagatgatagtggataaactaaactaacttgattacactttttcccaaacttgttatccacacttgctgtgctgtgcgaaatctcaaaagccaattaagaccttacaatcacaactgcaggttccagagaagtctcccttataagtctagcagatctgccaacagattgagcgtggtgagagtaactcttctgctttggatttttgtatttcggtgagaacagggagttttattgttacgcttttaaacaaagctattacacattgagatgggaaggcaactcttccgctgatgtggtgtgtagtgatttaggtgaacctttggtattttaaagcgggatcgttctgattggtaacattgtcaattgcacagagaactgattcattttaagacatgttgatgtcacttacaaaatcacaagttaaaggactttgggaaatcatttaagtcagagaagcaacatttgatttatttctcagcttactattagcttccttttatcaatattacttgacctttaaatcagttttttaatagacaagataaccttatagggtcatggtaagtgtgaatgaaataatgtatgttaagtgtataattcagcacctggaatgtagaaggggtgctgaaacttttggcttctccattgtttgggaggggagattcatagcatttggacagaaaaaaactctaaagtcatccagtccagttccttagtgagaaaaatgaggaacacagaaagagagagaactgtaaatgatttactcagattgctttagcagctaagccaaggatagaacgtgaatgtcctggcttccagagttggtggctactttttacctggtccttgactgtttcccatgccagcaggaaacccaaagctctcaacccagaggcacctggaaatccaagacaggagagggcaggggaactaagggatggagaccatgatgagaaaaggctccagaagtcaggggctctctgggagcagatgtggtccccactggagaaggaccatgtcccaagatggccttgtggggtgacattattcaggaagggcctggatggagggaagaggagcttggggaaaagaatgatcagggagagtgatcaaagaacagaagggcagtgtcaggagcccagagtcaatgccagccccccttgagtggtttataaagcattttcacatttattatcttatttgaagccttaaaacagttctgccatgtgggtggaatgtcaatatgtgctgaatgaatgagtgagtgaatgaatgaatgatgactgaaagctaacatttattaaacctgcttactatatgccagtcattgcatttaaaataagccttttacagatgagggaactgaggcacacagaagtaaagtgattggccaaggtcaaaccctaggaaggatatttcagaattcgtgcttttcatttaactatcttgccatactgcaagtgcatgaaagaaaagtaggtggatggatttccattttaccaacaaggaagtagcaacattgaagggcaagaggctcctacagttgtaaagtaatcagtggtcaagtcactgctagttagctcttttgatctctagtccaacatgctgctaactagctccagcttgtatcccacactacttgggcaggctctgggtcctcccaccacataccgagtcaagctgttgtcttcagcccacccattgtcccaccctcacctcagtgtgctcttgccccacattttcaaaaatagtcataatggaaatagcccaggattatggttagaagtttaagttccagttttgatgcttgttagctgaatgactttgggcagggcaagaaacctctttgagactcagcttccctctctggaaattggagataacagtgcctacttttcacttgtaaggtttgagataagatgtaagaagtgtctagcagcttcttggcaggtaagaagcactcagtaaattgatcagctgatccttccctccctccctacttccttttgtccctccaggtgcctctgaagatgacgtctcatttactgcatgaataaggagcggttcaggcagctgtcatatatcaaatccaattctcagtgagtgcagcagggctgatatagctccatcagttgggatagatgatgaagaacgcaaggtttgcaagttgatctttcgttggagaattggtggtgatagcggtggtggacagggacacattgaccacacagatgctgtggaccagttcgtcttaatgaaccacttggcgaatgagtacccagcaaagtccaggctccctgagaatagacatgcatttgttcacaggggagcagacttcagagagtgggaccaaggggccctggtgaccgttaaatacccgctactccccagacgagctagcagccagtttgagcagccatgagaggtggtgtgaacacagtgtcacactgcacaactgcggtaggagtgggccaccaacacatgggtgtggcggtctggatggggaagaccttggggtgggcatttgccttgtccaaagtgggcagctgcttcttagttttttggactgagtgctgccgtggggagatgcagactcaaggttgccagatcaaatgcttcatcagaagccagaaattcagatgttaatgtaagagctcctgtttttaaaatattggccatgagttacatttaaaaaaaaaaattttaacatggagcagctcaaaccaaatatgcagcaggctgcaattagttcaggttgccagctgccagcttccgattaaagattccaggtggcagaggcttgggtcttcattggaacagctgacatggatttatttgttcagtcattgattcaacaaatatttattgagcacctactgcatgccaggcactattctaagtgctggggatacagctcagaccacaagcagacaagaatgcctgctgcccttgtggagctggtgttctgctgtgacccctccattctgcctgaggccactgaatctttgcagtagtaatgatgatgatgacctggttattccctctcctcttcttagggagacttaaagtgagcagctcaacctcagtcataaagtccggttgtaccaaacaggcaaccattcctggtccttgactcaggtgatggccactggtggggacagagaccccaccttggggatgtctccagctgtccaaagtcaagaccagttctataggccacgtgcttgagatgcctccatttgcatttgaattgagaagttcagagtttgcagtacaggtggccatgaaaacatttattgatatccactgtgagcaaaaacttttgggacaaaaatgagggctccttatctgcttaaaaaacagcccctgccattccttagggtgggaggaagcccccgagttctccagagctcagccactgagcagatagacatgctgtgggaagctgcattccagagcctcattgaatgctcacatgtttgcagccctgtcctggatgcctgccctcagcctctcttctaatcatgggctgtatttgtggctgtttcatcttacacatctgattcctctcacctgccagaccattctagaacacagccttgttcctccatgggggaacagtaggtcagagaaatggtcatgggtgtcaggtcaggactgtgctgatttctgccaaggactggggtgagatctcgagggagcagcagaaaggcctgatgccacctgtgctgctgctcactggagccaggggaactcagatgacattacaaggaaggaaaatctcaaagacacctcacagtcccctatttaggaaaacacgctctctgtatattgtgttttaatgaaaatggcagctcaaaagcaccttcaaactaagttctgtttttcactgtgttttcccctgagtgatgagtagcattctttcctgtcctcgagcccctatctctgctcagggttatgtcctagagtcttgctgtgtcctggtgcggggtatacagactgtcccagactgctttcccattgggaaatttatttggccaagacaggagccgagttctggaggtctctgggctgctggccctgctgggtgaggggacctggcttgtgctaaggtgcatctgagctctgggttgcccaggaagccagtaggaggtgaattctgcagatttccctgggtcacaagcttactggcctcgttctgccccaagtcacctgccactgtgatgttcactttcgccagtacctcatcactcaaagttattaagcagctgcttttggaggcattcagggccacatccgagccagggagagggctcctcagtgccccaggctccagggcaccagcacctttaacctgagcattttgaaggtgactcattttgtgactgacccaacctctttccagttctctttctttctctttctgatatttcctatcctgcccttccttttactttctaatttttctcattattcttcccattgtcttcactgaaatctagatgaagctaaatatttcccaataataggctgtttctttagttggtaaaacacctaattttgtagcatctcaatggccaatgggcaaagttgttttacagaacttcttgatgtgaaaatttttaaataccctccaccaattatcagcacttttatttcatctgcttccctctctcccttttttggtgaagtcttttaaagcagatcctagatatggcatcatgtctgtatatactttgatatggaattttaatctctaagaacaacaacaacaaaacccaacaacaacaaaacccaacaacaaacatacaagcaaacaaaaaaacccaagtgatctcccattactattgtaatacctgatgaaattaataataatttctttgaatcaggatccaaataaggtccacacatatttggtatacaaatttttggaaataatttgtttttcatttagaattctttggtaattagtactactattaatgccagttgctgagtgcctcttgtgagatcttgacaattatctcaaatcttcaccacctcctaacagagtgctctgcccattttatagatgagcagggcaacttaactgcttgacccaggttatgaggcctcgactggatcctgctctgtcagctgctgcacccaggtttacgtagaccaggattttctgtttgtgttcagacaatgaaaatattttcagtcttctgttgtttactcccaaaggaaaggcaccttctgtagaaaggtttgaaaatagttgcactaaacatttggacttctggggtgatgcatgtggtttctgcacattgtgttgctgccaaatatgcttacgtttacaccatgccccatagcagccatgtttgaatgtgttttgctatttttattatgaggcagaagtggttttcaatatcctgttgctgctgaagacaactcctgcaggaagggaagcacagaacagcctggctctttacgtccattctgcattacctcactgtttattcctccccacagctgctgagatagtggcagttatctccatttacagaagagggctcggaggggacatatgccttgcccaaatcacaccatgagtaagaggcaaaggcaggatgcaggggtttcaactccacagctctggctgccagcccttgtactttcagagcaacactatcttccttgctatttccccacttttaaggtcctgcttctggacctttctatgccaacattttatcctgaaaaattccaaatatttagaaaggttgaaagagtagaatgatcccctatatgctctacctagatatagcaattgttaacatgtaatcatattggttggatatctctgtttattgttcatatatgtatttttctgaactacctgaaagtaacttactgatacctgaggttcctaaacccccctaaatgtttcagctgcttctcctacaaagagggcattcttctacatatccatgtcattactgcactgaagaaaattagtatacttccttactgtcacctaaaatctaattcattctctaatcccacaatttccccaatcatcctcagtgtttctttttaatagcttttggtttgttttgacccaagacctggtcagagcacatatgtttcatttttgattgttttgtctcttcgggctcttgtaatctggaacatttagctttattctaactttattcgtgggttcacctaattgttcattgagggtgtttgacttgttcctcttcccctgttgggtctaagggtttgatgagatccggagtatgcatgtttgggaagaatgctcagtgggatgccatggccgtcctgtctccttgtgttgagggcacaggagaaagggtctgtggttccagtgtcaggggccacaggtaaagaatgcaagttagggtcatttttctaaaagctgaagaagagtcagcatgagcaggcagaggctttgcattgggagctttgctttacccgcacggcctgttctggtcctctctctgccagtcccgctgccttccatgccctgggagctggatagatggatgacatctccaggcttgggccacacatttccacactgtccactcaccaatccccccccatcctaccccagtgtgtttaggagggtacagcagtagagtacgtgttttcattgtctcttatacacgttctcgtcgagggagggattcctgccctagggttatgaggatggtcatacatgacactcaacactgggcagatgagatcaacggcagcttactccccacatatactcacagcccaggggaggagtacactgcacgccatgcagggacacaaggaacagagtgaacagccagggactatgggaggcaggctttgtagtgtatcaggagggtggggtggtccctggtagtggcaggaggatgtaattgacttattgaataattccacgagctagcaggaagctgagactcactattctgagataagcagaaactgtgcctggtcatatcaataagaaatgttgtttggctacaggaccttatttgtgaaagcagagtagggaggggaacttgtggttaggacatttgaatgcattttggtttcagatgtcaaaacaagacataacattgggcctcaattttagactttacactgctcaaatttaacacccttattattcattcactatgtgtactcatcctcataagcacttcatatgaattaattcatttaatccttacaccaaccctctgaggtaggcgctattatcagcgtcacttcagagatgaggcaactgaggcctgacaagtcaagcaccttgcccaaggtcacgtggctggtaaggaaagaataaaaatccaacccaggagagctgcccgcagaatctgtgcccccacagttgaaaagggcatgagatttagagtgagggcacgaggacatgactcccggctctgccttggttgggcatttatgcttgctaagcctcagtctttgcatctgagttgggaggcttatcacagagcaagaagaaccatccccaagagggggtggtaattccgggagctgttcctggtccagtcctgggctggtctctacatgccagtcttccttatccaggtgaggggtggattatttgattaaatcagctgctgcaaaggaagcccctctttggatgataggtacaagagagttggtaggagcaacttcttggggtcttcatttctttttccacctccttccctgtgcattctttctttcccctctttccaacaaacatcaaactttgctctgcaaaaatctgatctcagttgtccacactgagtgagactggagatcgacatgttgcatttcccaagtaaggtcatatctctgtatctctaattggggaaaaatctgtgtcttattaaaataattgcagatgccattgagctggtggggaaagcatgtatgtgtgtgttgtatgtgtgtattgtgtatggctgtgttgcttgacttccttaaaagtccagtgcatgtacggaggaagagtgcactccgtgccgtatagacttaggcaagacatctgacatcttgtagcttcagtgcactcatttctaaaataggaataatggtaattcctgcctcatagtgttcttatgagggtgaagtcctgttggaaagcagcaagtgaagggcttggcatgagatgtctgcaatatcataactaactatgattattattctaattgttagctttgttttgggggatagccaactactccaattcagagtaaagacctgtctgagggcagtttgctggcccacaggcttacagagataatccatcaacatgttctccctataaccacacccaccccttgttcccaggactaatgaataatctgataggcctccttcctgccaagagtggagtggcctgccttttctgctgaccacatcggatgcctgtttataagagcttttccccattgcccgagagagaggctgactagggaggaaaaatcaatagtgcagtgaggaaatatgctttcctttcggctctcacctggaaaatgttttttgtttatcatgtgtcttcaagtgttactatttttttttcttcagatctcaggggttgaaagtgactttctgggccattgtttgttcacagaataaccaaatgatgcagagttttgttgccattcttctatctgctcccttttcccaacacacaacctcactaccctcgggtggggcttaaagaaggtggggcagccttctcagacccagcatattcacatttgtaagataaacagccactgtttgtggaggccttcagtgccccaggtgctatgctggaccctaacttattactgaacagaatattcacaatggccttggaaggtatggcagcatcctgggggacgggaggaagatatgtagcctcagagaggtcaagtgacttttttcaagctaccctgccagcaaacaccaaagcagggatttggactaagtctaatgatctgatctggtttatatttcagtataatcttttgttatttatagttgggaaaaaggatgatgaagtctgtcatcctagtacttgactttaaagccccctggagtcttaacctatcttgaaaaaggcctgtcatccaggcacatgggctaagggcattggcaaatccatgaaatcttttagaagcttatagggatcctctggggctttgggcacttgactttgaattagaagagagccagggggagagtggcatcactgtcccttgtcatggacttgctgtttctgctggtgtgatgtcaatatcagccattcctttggattcccaactttgggctgcacctgttgccacatttggcatatgaactgtgatagatacataccttggaacatccctagaggaccagggtcctcacaggtggctctgggtgggaggctatttcatgagaccaactactggggcactccaatctagacatcttcttaaagcagagtgcagtggcaagctcatgtgttctgatgcgtacaagcaaaaacctcaacacccaattccacgatctgttgtgacccagattatacaatctgtaatctccataagagttgggaccatatttgtattcaccagtgttataggacagtacctggcacatcatggacactcagtaaatatttgttgaatgaagaaaaatttggcaaagatgatagtccactctctgtcccctcctgtgtcctttctatataacaagacacatatcctggggtctttaagtcatgttgagctatggaaacagaattaaccaacaagagcatgggagtgagagagagagagagagaaaggaatagggagagagagagagagaatgtgtgagtgtgtgtgtgtgtgtgtgtgtgtgtatgtgcaggtgagcatatgtgagtgtagtttttatctgtcatgagtctagatgctgccccatctagccctagtctggggatcctcctagggggtaggaccatattttaatttgatgccaaggcggttaaaggcctggagagcccccagtgatgccacgtgtgcctctggaattgcatctgctgcttgtaggtgaagattcaggtgaccaaaaaaaggtagtcggtggtgcttttgtgatttagcagtgaaagagccactggcagccacggtttgcctaaaggggaggggtgtgtggttttctgttatatttcgctttcagatcactccaactttagttttcttcctgcttttcattcttagtcaatatcagattctcctttacctcttttccattttggttaatttgagtggattatccctgcatcttaaataattacatccttttgcttgccttccactcacttaatttcaggcagtgtgtatgtgtgtgcacacacaagtgtgtgtttatgtgtgtggggtgtgtgtgtgcattttgtgtgtatgtatatataattataagctttaaggaagatttaaacatctgaaccacacatgaacaatgcacaaactaaagagaaaattgcttggcataaagttagaattacatctttgaattttcttcatgaatttttttttcttgccctgtcttatggtgctgagtgaatgtgttttaaggtcttcaaactatatcatgagaaaattaaggagaaaatatatataactgcccccactttgcccaggagaaattaagatacaaatatatcaagataactgtccggccaggggcggcggctcacacctgtaatcccagcactttgggaggctgaggcaggcagatcacgaggtcaggggatcgagaccatcctggctaacatggtgaaaccccgtctctactaaaaatacaaaaaattagccaggcgtggtggccagcgcctgtagtctcagctactcgggagcctgaggcaggagaatggcgtgaacctgggaggcggagcttgcagtgagcagagatcgcaccactgcactccagcctgggtgacagagcgagactctgtctcaaaaaagaaaaaaaaaagataactgtccaatttaaacaggaaagaaatagtagtatgtcttggattaaaatccaacaacaatttatctgactttgggcagttaaaattatcattaaagaaaataatacgtttactgtagtagtaactttgcttttcaatgtagtaacatttgacctacgcagtctagacattttatttttagtttgaatccctattaagtgaaatgatgttgatcatagttaacaattcatgaatgcttgtaatgggggaagtccatgattttgaggtgagactggcactgctgctgaattagagtttattgataacaatgaagaaaatattgcattcacacctatacagtgtcattaaatagcattttttcctttgaaatgattcataaatgataccttgtaatctgttagagttccatgcctcctactcatgtaaggcggtttatttttggtcatcaaacctaatgaagttttaggagtcttactctactcttaaataaattgtgagatgcaatgatacaatggataactagtggtattatccacatgatttcagtacagagggccctgagttatgtacatagacacaccagctcttctattctttttttttttttcttttttttttgagatggagtctcactctgtcacccaggctggagtgcagtggtatgatctcagctcactgcaacctccacctcctgggttcaagcaattctcgtacctcagtcttccaagtagctgggattgcaggcacgcaccaccacacccagctaattttttgtttttagtacagaaggggtttcgccatgttggccaggctggtctcaaactccttgcctcatgtgatccacctgccttggcctcccaaaatcacttctattcttaatgaaggctttgcagagatggggaaaggctgtcacagtgagaacaacaggcctgaccctcatccccaaaggcactctgcatccttggatctgtctgagccttctggacattaagatgtttttagccgttctgtttttattggaagtaaaagtaaactaaatggttttacccaccttctactggttaaagagttgctgcaatttctttagccttttcttgaaaaactcaaggacgtctgtcattatgctggccaggaatatactgacacttgcaagctactaaggctggcagggctatagtcctctacgctgaatggcttcaggttgctgtgccttttcattttgttttctatatttttttctcccccatgacacaagtggtgcttgagatgattttaatggctttgtgaggtgagtttagattcagattgtattgggttggtgcaaaggtaattggggtttttgccatgcttttttttttttttaaatggcaacaaccacaattacttttgcaccaatgtaatacatggatgtgacccaccttctaccacagtcatggagaagatcccctggggatcatgttaaatgcagactctgatccactaggtctggggtggggctggagattctccatttttaacaagatcccacatgatgctgctgccctggccccttgtgactcaaggtttgatctacagatcggcagcgtgggccccccaggaagcttgctggaaatgctagctctaaggtcttttctgaacctgctgtctctgtatctgcagtcacaacactcccaagtgatccctggacatattaaagtttgggaaccgccgacctaacacactgctggagaccacaccttcacaccttccctagaagcagggttcccatttcttggattccaaaccacttccaaaccacttccaaagagcttgtgggaggatgtttccaggcctgggcatgtcctctcttgggaacacctttaatgtctccaggactttccattccactatgtgcccacctctgtccctgttaagatccttaagctttattaagaccttggtcctctgcatattagctccactgtctgcatgctttgagacagacgccagtggctggagcatggctggagaagggacatcaatctttcttagtactgctactcccagaggatataatttgcttgatagatgtgttctggctgcagctactcagggtagagtgagggattgtgcaaaagcctgggtgcaccagtctttagaaaaattgccacgaggataataaaacctgaaagacaaacaagacgaggaaggaaggtgctctgtggtgtacctggtcccattgccctgtggccggttgtgtgagaagaaataggagtcaaggttctggggtctcacagagtgggggtgtgtggccatcacagtgtcaatcgcaccctgtgggtggcagaatatatttcagaggtggctgcagccatatccctcatccacctgcttttctatagtaagaacttgccactacccagtcaatgggtggagtcatttcccctccctggaatctagactgagcttaggactcacttctaactggagatgacaccccacaacttctgagactaggttggaaaaagccactgagcttctgccttgttctgggatacctgctgtgggggaagccagtagctatgaataattctgaccaccctgagcccacagtgctagagaggaagggtttttctgggggtgggggggtggggtggggttccagatcctttattttcagagcttgcaacagttggttagcaatgctagctaagctggtataatccgaaggcaatccacctttctctttgggcactcaaccaaccgaatctctttcttacaaacaagatcattgaccagttaggatctgtctcaatgtgtgtgtgggaagaggttctctcccccacacttttcccaacaagattgttttatagccaaatgcaaatcaaatccataacacagcaactagtcatctccagtatcactgattccccccacccccagaataggaagttgaggtaagaggggagagactgtgtcctgttataagaaaaataatagcaggggttccagctcctgccagggttccagctaacagcctggtcagtggacagccattgactgtgcccacatgagagattctaagtaggaactacctaggcgatgagcccctctcaatttcctgatccacaaattcatgagcaaaataaaatgttttgaagtaatttgttacgtagctacagaaactggagtattctgaagctttagttatcagagatacactacatattcttaaaaacatccttcaagcaaaatttatttcatttcatttcatgtcttaaaaacacttgggagcagggagtaggttgtcacaaaatcaaacaaagaccgaaaactgtctagtaaaaatatgcagctttaggctagagtaaaatgataatagtaatacaattctaatttttgtttctcttctgtcaggccctacatatatatttcattgtttaactttcattccaactctgtaaggtgtgtctattttagagatgaagaaactgaggctcagaaaatgttaaatgactcattatgtgccacatagccagagcttggatttgaacgttgctggacctgactctagagcctgtcctgcagtggctggaagagttgttaatgagaagagttaaattacaggatgtcctgtccttggatccaagggtttgggacccttaggtatcatttagttcaatgctggggactcctggcccatcagggccacctaggggagtgttttaaaatccacattaccagacaatgttcacttggagtcttaggtctgtggtagggtgttttctagaaggttctgacccttctcaaattgaagtctctgatttagttcagcctcccccattgcagaggccctgggtggggaagcagcttgctccacagcatggagtagctcagttggtgagctggggcagagagcagaggggcagagagcagctggggcagagaccagggcagagagctgatgcccagagagggtgctcctccatgctgctctagaggaattttggagggctgatagcagaagtgacttgcaccccagtgaggggatgcaatagggattctgtaatagaagtgctccagatttagggctggtgaagggttgactgggttctgtgatgatggcactgcaggagtccattcagtcatctggcaaatagctacaagcgatgcctgtgtaccaggcagaggcgctgggggcccagtgctgagcagaacagtcatgggtaccactgctttttgaaattacataaatacacagacttttaggacttaaaacctcagagttaggggaggcagggagagaagggggaagagaaggagggagggagagacagggagagagacacagcagatgggtggattttaggtctcttagatatgcaatagaattgagagtcaggctgatcaaagtgagaatagtttcagtgtcacctgttcaaagtcccaaatagatgttaacttctgtggtctctgagtgcctacagtggcccagcagtgctactgggctctggagtgtctcctgccctccagagtgacactctacagtgacagccctggagtggctcctgccctcacaccctcacaggggagctgaagctgcaaacagcacatgctcatacaacgtcccaaatctgggatagaaagcggggctgtgggactcctgattctgtctggagactgggacggctttagggtgaccaactgttctggtttgctcaagactgaggggtttcctgggatataggacttttggtgctaaaactggaaaagttatggacaaaccaagacagctggccaccttagagggtttcctaggagaagctcagctttctcctcctctcccgctcccctgcgctcctcatcttggatcatggaactccttttcccagaagcccaaaccagaagcctaggaatcagcttcagccactcctgcccacaggttctccatgccatccatttcctccccaatctgctagtctctcttgtagggacagctgccgcaaccccagcacctcccactttgccttctcttctctcctctgagtcccatcctcaccatggccagggccgccattttgaattggaattctcattccatgctcctctgccaaacctctccttggctcaaaatcaaagtcctctagcctggcactcacagccccaaatgacttggcttcttttgccctctccaactgcatctgaagtggtgctgaacttagttcctcaggtaaagattggctggagagctgggaggtggcctgatggctgagatctgaaaaagcaaacccctgcatctctgcccctttcttccccccagtttttctcttggcagtgactgcttttcattgaccaaccgatgaagacagcacacgggcagctgtgccagttactccctcccttatgttccacctcaaacccattttgttttcaagagaccatgctgctgccctggccttgccctattctgacttcagtttccagtttactttggaaccccaagtccttggagtctttgtacacacaaagctactcccttatgcatggaattggtccttctggcaggtagtgatggaagagtctgcaaagtctcagtgattctttcagtccttcccaagcctttgaaccagctgagaactgacagcagggcctgtctctttccccttccccagcaggctggattcccaccctgagggtgcatagaaggggggcctccttgggaacttcccacagcaacagaacgctcaaccttcatgtacttttctttttatgtttcagttttacagagtttttggatccgttccagagagtcatccagccagaagagatctggctctataaaaatcctttggtgcaatcagataacatacctacccgcctcatgtttgtaagtaccatgatttcattccttatttgactgctctctcaaagatgaaccaaatgggttttcatctttgtttttctaaccctgaagacagtgggtggcctgagagaaagagaaggagagcagcccatcaaattaaaatccagttccatgtcatgataagaactgcttggtcatgtgagaagtagtctgttagaaatgctcattccctggtaccacaaagaaatagcactcaaacataaatttaattctctcagcaaggccatttttactttctggagaaagggtgctcatcgcagatggaacaatggcgggaacatgcttgaacaaaggagggaggcaatttttatcccttatgcagcttgtccctgctactgtgtcccgtctccattggctggagccagacctcacagtctaaactaatacccgattggctaacagctgaaaactttcttaaataggtaaaggcaagggagaacaaaggaaaagaggaagttgcttatgaaagatttaaagaagcaataacatttccaaataaggaaggggcataagctataagctaagatttgcctcggcctgtctagacatgcctgagtaagccaaagcaactaactgggctaaagtgtaagaactaacagttgataggaggctttagagtaagaagctattattcctagtgcctattttatttttaaactaagacgagctttgaagaggaacttttctactttctacaagtcattgcccagtattgtggaatgagagaggacttgtttgtctgggctatgctgagttacagtaaaggaagactagaagccagtgatgagaattttctgtcccctctctttttaggataagccttgattctgccaaatgaaggtacccagatagctctgtttaaacctctgttctggttttagctggtcagtttttggccactaataagactaccctgtgcttcaacctcttgagagtgtcttgtgtctctctccttctagaataaatgggcaagcacccatagagctggtgaatatattgagataaattttacctctcccaccctcaatgccacatggcaattgccacatggcagttgtaaccttttacatttcactgcctatatgccaggctttttgcggagagcttaagaaatggtggtctaatttaattccacccagcatcccagtgaggaagatgtcattattgtccacatttcacagatgcaaaactgcattccaagagagatgagggaacttgcccaaggtcacacagctagtgagcacagcaccaggttctagcggccagctcttggagctcagctctcagccaagaggctgccctgagggttgggggcagagtgtctgggactccttgctgatgctaatgaagccctggagaattggaggattaccatcaaacctttctagaacagaggaaatatttaagctcctctttgttatggaacgataatgtcacttttggatgggcagcctcccagcagtttgaaggttattcctgttgacctgccatggtgtcttgtgcctctctgggaactgctccagaaacttcatagacacaccgggaacatttttgtattttgaaagaaatccctctgattttacagaggaaattttgttaattagtgatgattggaaagatctgtgtttttgcaaactcttggaaatgcccataatgccagcgagcattaaagtattattttaattgcttcttaataattacttttctactggaaagtaaactggatttttataaatcttagggaaattgacaaattagggtggttgtgagtagggaattactaacacatgactactaaaatcagccttttttcatttctgctgtaactcaaatattctataaatcctagatataaaggaagcagtgtgtgtgtaatgagtttactcaatggctttaatagggagaagcttctatttatcagttactcctatttttcataacattttacatttcatgtgttgtaaaaacacaatttggagatgaatgttcatatgggatgttgtgagaaatctgtggctgtgtcctagatttatgaacaatggattgttttgaagtctagatacaaatgccacaaatattctggctacagacgtaaatacgatggagcaatttgcatgctggcggtggtagaaattagtcagtagagggcttattcagtgctggggttctcagagaacagaaggatattcagctacacatactgattcataccctctattctaatgaaataagttcaaccttttatttcattaatagcagttgataaatttcattcatttggtcacacgatttagtacaattccataataacataaggaaagcagtagatacatttataatacctataacacaaagatgaaaaatattttgtcaccccataaaaaagatttgttctcctgggttttaagaatttaatataaggcattatattattttggtcttttaaaaccttcagatgttagtagaagaattggtaatagaacatccattttcactgatgtataaaatggcttgattttctttgaaagctcacattttttcatttactacataaaaaaattcttggggtctcctttaattttggttggaatgttttaatctaaagatgaactttctttcttaccaaggtgttttttaaaggtagctggcattgacttggattttcttttattggataatgaatgcttctagagtcatctgtgtgcaatttagaggagccaattcggcaaatgtaacaagaaaattaacagaatgatggctaggggattaagtgcagagtaaatggtaataatgtcactggaagcctcctaacttgcactttcgctgtctgtggcaccattagctcaggtgatgtctgtcactctgaaagttgggtgtagttggaactgtttgattccaagagcttgtttcccttgacaacccagtgttcctgttgaccagagagactggctgagaattcttttcagatgcactcaaaagtcttgcttaacatttctgggatatgcccaaggcctttatggaaggctgtttcctcattcaaaagaggtaccggtttcctgctgagtgtgagaggtttatcagaatattttttaaaacctactttttgtgtaggacaacttaatcggtattagttgttgctctttggtatactttttgttgtctatagtagttgtgtctttgtacattcaggggacattttcagggagcctgctgtgggtaaagaaaaccataggggctataggggatgagaagtccaatgagacttgggaggtaccctcagggaccttccaggatccctggtacattaggatggtactctaatacaaaatggaatctgaaaagggccagaggagaggctcaggtaaacttctagggaagttcttcatcatcatcatcattatcatcatcatcatcatcatcatcattatcatcatcatcatcaacaacagtaaacatttcttgaattcaggggctgtgcttatcactttataaagaacatctcagttaatcttcagaatcctttgaggtcagcacttttgttaatctcatgtcagtggagaaaacaaaactgaggaaattatacagcttgtccgagattatacaactgtcagtggctgaaccaggatctgagcactggctgtgagtgcaaactctcacttggaggcactccgctgtgatgcttccttggtgattggttaggtggagaggcgtgtaaaggcagagaaatggagagtgagcctgtgtgggtcctgtcaataggagtttgtttggagtatctatgcgtaagggctaagaaagggggcagggatagagctagactgggggtagctttagattggttaattacaagctaattcagtggatggttatgaaacacttgccatgaggaaagatgaataagatatggtttctagtctagggaggggcacagacatgaacacaaggtgaacagttcagcatcactaaaaagccttgaggaataggtaagactcagtaagaagtttaaggaatgataggttttgcaaattttttccttggcttccaaaagaaatccacccaaggcctattctttgccctcttctctttttgcttcgaccgtgatatgtccagaagatacattctcatagactattactgatagatactgtgttgatttgataccagggttttctattctgggataggatgcttctaaggaaggcagaaataaagtcattttggggaggaagaaggaagaaaaagagacaaggctggatcatgatagacaatttaatttttaggctctttttaagagtcttagacagctcttttatctgtgatgggatgtaattgtttacccagagcagggccttttccaagtgtctgagtgtcttaaagttgtctttataatcaccctgcagcacacctttctgtcaaaagccagaaatgaaggcactttgggcccattgttttgttttgtctgttgtgaataaaccccagtgacaagctcctctctggctaacaccctcgcatcgaggctgctctggcttcgatcccttctggttgttagaagtccttggcatcctcatgccctcccccatcaaacacactgcttcacattttgtggtttcccagaagcgccccggcagtgtggtgcatggtgccttacatcagcaggtggggatgactcactttctgggtgcagcactggccagggattgacgccccttcctgtgttgattcatgggtggatgctccataacttagtttgtcgtttagggtatggtcagggtgcctgggagagttaggctccctcttctctccccaacctcctcctgctactcaaaggtgcacactacttagatctaagggtgcaggtgggcttgaattgaaaatgcatcaatcctatgtgtctggtgacaagatcttgatacccttttaacagtcttttctagaaaataatgaaatactagtcaacaaccagcatttgccggatgctagctctctgttggatcctgttggtgggcagttggtttgggctccacagtggcctacaaggggtcaactcccagctttgccattcactagctatgcaaatttggaagatcacctcccctcttagcaccttactttctttatctgtgaaaggtgtctttaagaacatgtcccatcaagctctagagagcatcagatgggggtgacagacctttggcacttcacttagtgtgtggcacctaatcagcattccataactattagtgaattgaaatcctgccaataatacttgccatggatattattatcgtcatacccatttatagataaggaaactgagaatcaaagaggttacatgatttgctcaaggacaaagaatggataagtgtcaggagctagggctgaactcacctctcctcaatctgagtccattccgcacatttttttttgtacagagctctggcttcccagcctgtggaatacatacaaaactagccacattccagatcctgcttaatgatacatacactatctctttatgtgggcactgtgcagtacaattagtaactttaaagatggtgttcaatatataatctctgccagcctcagtttccccatctgtaaactaaagcttttgggctaagggaatcaccgagattcaggactccaacccaggagcatggcaacccagtctgggagtcttggtcctactagctgtgtgcatttgtgtgttcactcatctctctgagttttagtttggttatttgtacaatgggaataatattttccatagcagaatagttagaagattggaaagtgtgaggaaagtccataacacgtagtaggtgcttaagatatgacagctgtcactgaaatttctatgacttatctatgacctggaaacaagcctccttacctttcttttttaacttggaaaaaaagcatgcactatgttttatttaatgtttactttctagggtaggaactgctctaacattgtggtcaaaagtgcagagcctaatttagatggtctgggtgcaactcctcattttaccacttgattagttgtgtgacttccagcaggttgctgaacctctctgtgctttattttcctatgcattaagtaagaagccttttccatgtaggattgctgtgagaagtgaatgagttaatttgcatggggtgcctagaatagactatagtccttagtaagttctcagtacacgttagcctttgttattgtaacctaggtatgtacattcagcagccccatactcataacaagtgagcagaactcaagtccaagaagggttcaatatgttctctgaatcctgcagcagtgttcggctggaattctttgttttctctcaggtctcagttaataagctctgaccactccccatcttcctaccctgggctcatcctaggatttcctaggatttgattcttttaaaattagccatggaaacattaacagaagagaaaacaataccaagggagactttgcttgctcatgtttttcctccacctctgcccatgtgtggaggtacaagggagcatccccaccttacgtccctctgtacatcttcatctgctcccctggctcgggcagcagaactgcagctaccaatggcctttgtcgaaagagtggaatgcttatgcactggtttcaattcagtctgctttgctgagtgaaagtgaggtggtggggtgcttactcgcctcattcctcctttacccagttcagaggtgttttgccctaggaggaagtcgttttcctaatgtgttggcttctgaagttcacctcttaattccaactttcatttaaaaatgtttgtgtacaagggggtgaatgatacatgtaactatgtctctatccatcctgattcacggactgtgctgcccaaggatatggcagatacatttccaggagaagaatgagacactagggcccattgcttttaggatgagaggaggaaacaagccacatcttgcaatcacacagacacctctgctgcagcaactctggggtgggaaccatggcattttgaaggctgcattcccttgcctgggaagcccttgatatggggagccttgggccctcctaggtgcttagcattggctcaagagcagttgatagtggtcctagaaaagataccaatatgcatctacctaggaaatttgcagcatgagttaaattaagtccagccttgttggggaagtgggggtgagggtccaattaggaagaggcaagttgaggcagggcgcagttctaaaggagaccactgggccatcaggccatgagcttggagtcattgggcagctctaatgaattcttcagcctgcacacctggccttgatcctgagcgcctcccacctggcacccacatctcctatgtgggcagtgactttctgctctggaatttcctttggaagcctcattgggaaagtcatcccaactcatacttttttctggggtttcattgttgcctaaccttagattataccagctgggattgccttgaaatgtttccttcaaaaccatgttgttctcctatataaacactgacttggtagtatcattactgggtcgtccactatttagtgagttgctttctcctatttgggagcacattgcctggtctgtatgcagtgcttaaagggacagaaaacaggaaggtaagctggtagccttcatgtttggatttggagaaacaaggacttctttgaccttgaccataacattggactttagtaagtggtgcttcaattcttgttctttaagcactaaatgcatgagacaaaagtctaaggcataattctcaatcatcagcatcagtaccatttgagatattgttaaaaatgtacatttccgggccaggtgcggtggctcacacctgtaatcccagcactttgggaggccgaggtggcggatcatgaggtcaggagatagagaccatcctggctaacacggtgaaaccccatctctactaaaaaagtacaaaaacttagccgggcgtggtggcgggcgcctgtagtcccagctatttgggaggctgaggcaggagaatggcgtgaacccaggaggcagagcttgcagtgagccgagatcgcaccactgcactccagcctgggtgacagagtgagactccgtctcaaaaaaaaaacaaaatgtacatttccagaccagctgtataagcatgtttgaggaaatcagtacttcaacaagccgtgtagttatttaggtgtgagagctgcccaataatttatggcacagacttactggacctcttaactcaggagtgttgcccttctgaatagcccccaggggaatcctctgttttctctgtagcagttctgaatctcctctagtgcatcagccctttagcacctgaataccctccatggtggcaagacttgcttatttgacttttaaacaatccaagtcattcagggccacagctgaatcatcaaactggttactaccacttctggtcagaaataaatggtagcaggtaaggagagggcttttttcatgtctcatacaaatggcctctgaagacagttcccaaagaggagtccccgagataatttgagctctagcagtctggttgtagtaagggtgtggagcatctaagcctgcattcatttggttgaattctgtttttataaaagaagagctcttggccaacatggtgagaccccatctctgctaaaaatacaaaaattagctgggcgtggtggtgtgcacctgtagtcccagctactcaggaggctgaggcaggagaattgcttgaacccgggaggtggaggttgcagtgagcggagatcactccactgcactccagcctggtgacagagtgagactctatctaaaaaaataaaaaatacatttaaaaaagaagagcatattccagccatgccttagttccatcaggaaacccctctccaaaaagtgatgtcttactagagcagagagagagatttccagaattatgaacactattcgtcaacagttacaccccagccctcccaccactgactgctaggccaattctggatttgtgagatgttcagtctcttctgatattgttatcctgagatgttatagtcatgaagaagcaacaaaaaatgccttttatatggttggtggaaggtttaaaaacaatttactaattacggaagctggaataaagactcaatatgggaatggaaaccttgtccccaaatcctagcctcgcccctctccagttgtatgttcccaggcacatcacctagtcctcaagcctggaggaggcagtcacagagttatcatgaggatgtaagaggctcctggacttgatggtaccaccagtaccatggtttccacctcacagtaggttctgtaatgagtgttggctgcatctgaatcccaccagtttaactcattaagtctgagttgagcatctatgtggaggaaagggtatagaggaaggaagagtagagtctttaaacaaacggactaaactctgctttgcagaagagataaatattcaacaaaagaacaccaaaagaaaatgaattgattgactctaagtgagtctcaaatgcactcgtgtttccagagagataggagttggaggccaagggttcttcacccttccacagaggagagcatgaggggaattactggcagacatgattcatcgtaattatagactattcttttccatttaaaaagtcactgctttaaacatggctctcagcaattacaaatcaattataacctacaatcagatcttccatttttaaagtctgtgtagtctctaaacacagacatacatcatccttttttttttgtttgtttgaggtcaggagttcagtaagattattcaaccagggagtctaaatgaaactaacgggaactaattatcaatcagcccttctgatagcaaactgatgtcctcataagggattgtttgttatttcttccaggcaatttctttcctcacacccctggctgttatttgtgtggtgaaaattatccggcgaacagacaagactgaaattaaggaagccttcttaggtagagtattcacagttcctgctttagggaatggggctgaccttaattagatgatcacatttaagaaatctcagttacacccaactgatttttttcttttggtcaaattaagctggggaggaacaagataagataaagataaactttaagcccaaagaagagccaacgtgcggtcctaaatgaaggatgttcagacaccgcccactgtcgctgtccgttgtgctgaatgctcgtaacaccctgtacacaccagagagctgtgctgctcaggcgcagactccgggtagctcttggcagtaaggcaaagtaaatctaaaactttgttgcctctgactgtccactctcacatttttggctaatagacccacattatgggcaattcagcaatcaaccacagactcctcgaccaaacactgttggctagaagcaataataggcaaatgcgggagtaaaataaaatagatattacaaacaagctctataactcatcttaagtttgaagatattttggtagttaagtgttcattattatgtgaagagtgctatgatctttgtcattgattataacatcattgttataaagtcttcccaagacgagccatgtctgcatgggacaagagtttgacatttcaggattaaatgcgtttttctggtcttcatgataatcaaatcctgagtaaatgacagcattaagagatagccaaaacgacttggcttgtttagcaaacaaaataaactaacctgtagccaggttttcagctttttgaccgtgagaaaaaccaaatcaggttgattttttctttttttgacacgtcacctaaaagttacccaaatcctcagcccaaattttgtttttggtgtgttatatggacttaccattcaatgggctagtaagtctggaaaatgagagccttcacttaagggtatgtttgtttgttaattattgggctttggggaaatgaaaatgtagcaaaatatgatcctcccttttccatggtaagggagtgagtgtgagagctgcatctagggagtgtgggacaagcagcagctcctgccctaaagcagcacagagaacgcttcctatataaccaggctcctgttaggccttatctacttgaaacgaacagaatccctctcaaattagctcaaataaattaggggtttaattacagggctctgataagcaatctcacagacatccaagaaaaagggggaaaggttcagaggcacctcacagggactggaatggggagctgggccatcaggaggggagacctccctcttggctcatgaccactgcaatgtgccttgcctcttctcctcacactcccagcctgattcttctgcctcaactttgtttctgctgccccatgtctggtttatgtgaggcttgggcttgcagtggtggtgatttctgccacaaatctgtctgcctgttcaacttcggtgcccacccaccaagcttcactgtgtttcttggtccagacttcctagacagagtctctggctcagctcatttctccagcctggacacaaaagccatgagtccctggccagcctgtcgatgccctccctcaggtcaggtgtgtaccgcaggctgcccttgtgtggcttggacttttggtcacaggtttcagtctcctcagctgaggtggaaaaaggtcacattctccaaggattcaggtaggtgtgcctccacacatggcttgagtggccgggcagtgtttggatggatatcaccatagtctccaaaaagtgctgttgggagccccctcagttcatttggaaatccctttagttcattctttattctagtggctcccctggcatggagtctcaagataagtgactgtgggtgagaactgtctttcatggttatggttctcactgacggctggcttttggagtggggctgctgtcacagcagtaagtagctcacagttgccttctccagacttttcattctcagctaaatctcccttagggtgacatttcaaaattgaacatcatactctgtctcctatacgttaacagagaaggtggaattattggatgttctgtttgcctaaataaatgagagcctgccatataaaaatgatgaacagcctcccattgtgtgtagaggtttttttttcaatcactatttttaggaagcctcggaagtagcgggtgggagtgggtgatccttaaaagccaaggacagaaaacagggtgtagattttccagtgttgtctggaattcaggactctatcgaccaggaggtttagttcttagcatgcttctttactcagatgtcttcagcagactttaacccaggcttccaaacctggatcccaagtgctgccctcatctccaggtaaacagtggccatgtttgtgcatctggcattggatgagaggagtgaggtttgccccatgcagcattgggcttttaggaattcaggctgcagaacagtcaggtctgtataatagagaaccctcttataaaagcacgatagtgctgaatttcctacaacaaaagtaacaacaaaagccctctaatctcctggaatgcttataaccagtagcgtcctgagtacaggctgcttacaagccgactcacgggacatgttgctttgagattttttatcagacacagtatggtttgtctttttgactcttctctgaaacccacagtgctgtgggatgctgtaaaaagagaacagcccttatgaatcagacccactgggttattgctaatgaacaagtattcctgataggggccatttattttcctgtttgtccagcctttcatgggtctgatcccagcacagccttctctggtatcaatgaggggctcctgcattgatccccggagggttgtgctattccagtaaaaatattaagcagtttggtttccttctagaatgctgaaatgacctccatgttaaatatcatcaccagcttcctacctttctgtttccttcaggtgtttggattagacagggaagttgccaactgtaggtggttatatcatatccatacattttccagctcagctatttcagactttttaaagaactgctctgtgctgcgataagcccaccaggctcagaggctggggaagtgatccatgtggctgtgtatgaagttcaccaagatttacatggggcgatagggaattggctagggatgcttgttcccagagaggccatgctaggaccaggatgataatgagttcagccccactgggaaaacacagccgtgagcgtggcaggccagccctaacagagaaaagaccacagtaattttgcggcaatctcacaacctgttaattatcagggtttgtggagagaatatggcaaagatatcccagagaatttgctctcgccttttggagacaggcctctccacagtgctctgagcttgccagagagaagggaagctggcatttgaggaaggaaggatctgtgtgttcagaatgcaatcagtggatctttccaagttccctcatattcagttccaatttctgcacccccattgcatgctcagtgttttaatggcagtgctgtgcggctgattcacactctgccctccaagtctgtggcctgtccctcctttctgccacactcagatatggccagttgcccccatctcacacttaggtgatttgtttccctttgacaaagatgttcatttgaatgtgtccctcccattctttctgcttcggataacttgttaaaagcaggtgggttgtgttcccatctctgtggcttgtactcttagtgaccatgttggccattccacagtactttctgctcatagaacaacacgtttgtctctctcgatgggccatgaattgccctaggcagctccttcccgaaaatgcccccattcactgctatattcttatataaatctcagctagtgttgaacagttaatatttgccaaagggaaatggtagctcacatgctttattattcaacaaagcagtggatggggcatcaataggtttgtactgcttctgtgaggcatttgaccttctatcacattgatggtgatgactctgccttttacgcactctcgataaaccacaggagagaggtacaacattttgcagtgaaagctctgtgactcatgttacctgccgccttcgggacaatctgtgctgcatctggcaaagtcttcccagactgtttggagaaagtccctgtgctctgtatggtcaaataatgtatcccagaagttcttgctgttttagatggcaaaaagcaccgcccgggcagaccttctccaaacccagtgaggcttttggactctgcaccttggcagaaacagtgatttgtttgataacaaatggacagctgtcggccggtgatgggtcaataatgagataattgccgagtgggaatgtccttttctgcagtaggattccagcagctgctctgattagaattatgtctgagaaggttgccaggaggaaataaaaaaagttatgtttcttgttaccagtaaaagaaattctacatgctgtggtattaaatctgttcatatcaggccagaaaatgatagataagctcctctgtgattgtgaaaatttcagtcaaggaggagagataaatttcatgtcacaggggcctagaattttatgagtcactctccaaagtcctggcataattatattttgctctctagcaacccaaacgtatctctgttttcaaagtattcgttcatatttctctggtcattaaatagtattataatgtaacagtgatgatgatgataatgatgatgatgattttgatttaagagccagcttgctatttttctgtctgttggttttgttttgtagcggtgtccttggctcttgctttgaatggagtctgcacaaacactattaaattaatagtgggaaggtaagttccaagaagaatgaaatggtgacttagactatcaaggtcatctatataggaagctgggccagaggacactggatgggacagatttgagctcatctagttctcccttaaattgttgtccttctgagatttccatccttagcacagatctttcctttgaattacaaactcactattttagaaagcagatcactagcaaggaagtgcccactgactgcactttcttgtgggacaaagcttactgctggcattttcagattcttcccctgccagcccagggcctcccctgacacccactcacttgtcagttttggcctctaataagtaggattacttacctgtcattctcttcaggatgagacatatggattggcatttgagccttggcttatggcacatttctcttaatgcccctgagaaatgatttctgttttccatttatctttccttctcttctgactgctctggtgaagagctggtctctacagacatgagcagtcaaaacatctgaattcaagacctaactaactctagctggctgttggcctgggacacactagatcccctctcagaacgttaggatttattttatctactggatgcaggccagggactgagggggcaggagatagataaaaatcaggcagtacatggcctgttgctgctgtgttcccttaactttgtgtgccctgaccagtgcttactctcaggcctcacccctctgaggttctggtgcattaggtggacatccatacttggagaaacagtggctgagtaccagagagacagtaccccagctgttctggtagactgcttaggccctactggagttgcagagctgaaggaccagtgaccaggactgtgacctggagtgctcagaaagcaagcgctatgtttccaacattagctaaacttcacccgtggtaggtgctcagcgaatattagttgagtatgaatgtgaggtgataggccatcacccacctgtgtgaggaccctcattcaagtgaggcagtaaagcatggggtgaaatgtgtcagcatgaagatccaggcgctggtgttcaaagcttgtccttgccacttacgggatgtgtgtgaccttgagcaatgaagagccttcatttttgcacctgtaaaatacagacagctccaggctctgcctcagggttctcctaaggattatatggcacagcaggtgtgtggagcttagcactgtgtctgaagcctagtaagcactcaggacttcctgcagctgtgattgctgcaggaggctcgacttcaggcccagggccacccctatgtgcctctagagatctctttcccatgtcctagaccagagaggccaacctggggcactgtgtcttctgcatcatggagctgagtgttcaaggtctctcagtgaggccaggtgaggcctgccatttcaggaagggcaagtggccacccaaattcaggatatacggacacgaggagcctggagtcttggatcccagaggcaacctctgaaatagatcaagcggtagagtggtagattaataggattacttatttatcgttctcttcaggctgagacctatggattggcatttgagcaatgcatgccaatatccaacaatagagcggtagatcaagacaggaagtaacttctagtccacagatggcatgaagccttccttttcacacctgtcaaacaaggaacttgggccagaggacactgcttaggtgcctcctgtaagtcatgtcactctatccacaggacctcagctttgggtcagtattgatttcccccttctacagatgtggaaactgaagctgggggagaccaactgaccttcccaaggtcataaagtgagtaagtggtacatgggagcgccaactcagatttctctgacaccaaaacctgagctttttcccaaacggctgtgtctagagtattctgtgaggagctccagtgttgacagccaagggggctgaggaaagagctgggggcagtggggagttgggggggtcagcttggggtcatttgtgatggcagcattttatattgaaaatgtccatggtgtcttttgtagacctcgccccgatttcttttaccgctgctttccagatggagtgatgaactcggaaatgcattgcacaggtgaccccgatctggtgtccgagggccgcaaaagcttccccagcatccattcctcctgtaagttcatggctgggattctcttaatgcccccagtcatgtttcctgctcactgtctttgggaatttaggtgcagagaaaagcactggtacaggaatgttaagcgcagttcatttttcttcactttacggcgtttgacttagaaacaagattattcaacaggaagtaatatgcccaggatgaggctctggagcttataaaacattgcatgtgttgctttcatgagcttggcagagcataacatgtgatactttacccctgcacagtacgatttaggacaagggaattctctacgctccctgggagcctccattgtttaggtcattgttctctctagtttatttcttcaattcaggtgttgcgtgtgtgtgtacacaaatatatagcacatatgtatacatatatacatatacatacatatgttacatgtatatacatatactttcccccatgcctccagtttatagtctgactatagatgtgtgaacaccttaaaacaaagacttaatactgtgaatcagaagccgtgcaatgtagctgaaaaggagacaggtctctgaagtctaacaaaccctggctctgccaggtattagctctgtgacttcacctccctgtgcctcagttcctgctgtgtaacatgggaataagaatgcctccattattggttggaatgaggattaaaataagtggtgatgatcgctcacatttctggagcagcagctatgccaaaatggcaacataaattatcttatttaatccatgcagtatatgtaaagcgcttagtattgtgactttcaataaacagtagttatctacatgattattgattatcagagctgaagtttcctgagtattctggcttgtgccatcatccattcatcagttcatattgcatgggggatgcaaagataaataagatgcagcttgtgtcctggggagtgcccaggtagtgacagatggtgtatttaagttgatgattcctgggataattggagaactatggtcacaggtgaccatcttgaataggacaggctcttctcatgatgccaagtccttaattctcccacgagtctgattattatttacctttagcaagcctgctattttagtttcttttttccctaaatacccgagacacatcctactaatggctgaatcaagaaataactgaacgctgtttcctggggactgtctgttgaacatgttgctcagagccgttgaagaatagggcctgtcaacgagacattagctgggggcagacactctaaatgaatcactgtcaacttgcacaacaacctaccaggtgggggattgtcccagttttacacataagggcactgaggatcaggcaggcttggtaacttgtctaaggacaccagctctgacaggaatagctgtaggtaccagctggaggaattcctgctgtcttgggactttcaatgatcaaatacaacaaaacatttacagtccatgtttatttaagtaaataacaaattttcttctctagtttgttggaaacggtggtgagttgagtagttgcctccaaacagatacgtttaagtcccagcccctggaacgtgtgagtgtgaaccttatttggaaaaagtgtcttggttgataataatatgacatcgtagactagaaatttgctaagagagtagatttcaggtgctgtcatcacaaaaaaataaagtaaccatgtgatgagatggatatggtaacttgtttgactgtcgtaatcctttcgctatgtgtatttttatttgaaagaatgaacactgttttacatgccaaaaaagaaaaaggaaaagtaaaaggatcttggcagatgcaattaagttcagatctggagatgagatcattctggatttagggtgagccctaagcccagtggcaggtgtccttataaaagaaaggatcggccaggtgcagtggctcacgcctgtaatcccagcactttgggagcccaaggcgggtggatcacgaggtcaggagatgaagaccatcctggccaacatggtgaaaccccacctctactaaaaacacacacaaaaaaattagctggacttggtggcgcatgcctgtaatcccagctactcaggaggctgaggcaggaaaacagcttgaaccagggggtcagaggttacagtgacctaagattgtgccagtgtactccagcctggcaacagagtgagactccatctcaagaaaagaaaaaaaaaaaagctcaaaattcttgtaggctctagccattcctgtgacttacggcagaacacccgtttggagttgcttcctctctaaacatgtttttttcctctatgcagtcccattttaagtgagcacctgttttggaggccttgtagttaccagctggaggaattccttctgtattgattttttgtctccttgtttccagggagtcccatgctggcattgtttagaggtacctggaatagtattcacctgggatcagctcccatctgctctccatctgtctcctggtagggtcactcaagttctcttagattttttctccctttgttctcttctccttttcttctcttccttctttcattcctcccttctccctcctgtcactttctgtcctcccaaagacttggtgctgaatcttaaggggcttcagaaattaaaagcacctaagaagtgaaattctaaggaataccttaatacgggcttccagaatggttggtaggggactgtagcacaatttactgtctactgttgcatttgaacttgggaacgaaatagctgtcatgtgaatatctcaagctgtcagactactggacctcagaggttagaagctggaccccaaaaaagatgttgatttcagatgcgcaccctcccctccaaccagcaggaagcattttccgacatggctggctttcggctgccttgtcaaatggtggctgacatctgatctgtgctagacaagctttttgacagaggcaattatatcctttgcttatgatgctgcttaaaatgttacccatttttactacctggcagacatggaattctacccagtctgtaggctttgatggtggtattttcatttattttctcctttttttaaatgacaggttagtgattggcttgaagggagtgccataaccacttagaaaaaacaccgatgctgttttctggatttcttagtagctaataagaagcctagtagttgatgtgactgctcctcagagggggtgacctaagtggactcccattttgatataaacactcttttttttccttaaaaaatcaatttcataggctggacttgagtgactgggtaggggagttctggactgagggatctcctaagactaattctccatgctaggtagacatgggttttgcttctgctgtgtttgcagataattggcggctggaatgaagtccaggtcctcatatcgtccttagaacagctggttttctttgaacttaagaacaaacattgatttcttttggaaacaaaggatcttgttcttaatctaccataagcagccaaacaacacttgtctgaagggcttttgtgtcaaactctcagcaaacagcatttccccatggcagcgtttttatggggcttgctctgtaaggcagcctaagccacccttgattggaaaagcagagaccacaatttcaaagagcaagtgattttcatccaacctaaaagaagcttaggctttaaagtggagaaaggcagtgtaccttcccatagtgcttaaagcagggatattctgaaaagagaatttgtctctcagagcgtaatcccgattttttattgagtactgattcaacttccagagagaggatagatatgagagaaaaatagaaaaaacaaattattaatgctaagtcgaggtattaagaaacttctttcctgtgaaaatggtgggaataaataaagcaatactctcatccaggtgtcagcgaatgacagcatgtggaccaagtccagtggctgctagcttttgtaggtagagttttacgggaacacagagatgcctgttcatttccatgttgtctatggcctctttcactttacaatggccatgttgaggagttgtagaagagaaacatggcccacaaaactgaaaatatttattatctggccctttacagagaaaatttactaaccttgcagtcgcccatgctccaaacagatagtattaaaaagctttactaaagcaagaccagtgcactcaaattgtgcacatgaatgtttcaattttaaacattttaaaactctattacagtataaaaaggggcagttgttgcttgtggaatacattttttaaatgacggagaaagcctaaaaggtatgcctggctgatgaagattcaacagatgattcttgagttctttccgttaggtatgtaccaggatgagcccttggggagagtacagggtgatcagacatggcccacgttttcctccaggatgaaggcaaacactaagttgttgaacaccacactctgggattggggagctgagaattccaatcaggggacagggaaagcctccagggaggaaaagccctttatcttgtagtttcccataaatgagtacatacaagttacatgttttgagatgtttactattctttagctgcatgtagaattctaggaggaaaatcatttccatgcaggattccagttcacactgtgcttgagaagtctgactgcattcctttcctttgctttgtttttctttctttctttggaaccttttatggtcctttctctgtgtctcaccatctaaagtccacaatgatgtaccttaccgggatttgtttttggtatttatcgttctgctaactctgtaggtctttttaatctggaacttcatgtgcctcacctttgtattccccgtttcttctccttggaactgtattaggcagatgttgagtctcctggactgatcttatctttttagtatctcttctttcctactgtctagctctttgtcttttttgttcatccatcagggagactttaaaatttttatctactaaagcttctatagaatttttattatgatttttatatttttaatttccaagagctctttcttgaactctgattagaaaaatcattaacatcctttttttgtcttttcatggatacatcatctcttaccccgctttgtttgccggtttcatgtgtgccctgccttccctttatttgtgtgtttttgtatctagctttccttaaatatctggtacctttgctgtgtgttgtgatttaaggttgagtcataaagctaattgggcagggcttgttaattgggcttcactgagggtgactggtgtgagctgggttttcattggttgacctccagtgttagctagcgtctggcctttactttgaggctgtttgattccctagaggaggctcttcatactcctgcctggtgtatgtgaacctggcattctggaagctgtgcagaagggcgtaggtgctcacaggtcagttcttagtctttcacatcatctccctattttccatctgtttgttcaggcatgccctctactcatctgtttttccaaaaccagagcctcagatagttaaaacttctgtcttcctcaaaagttggaaaggggatggtttcctggctttgaaggaggggtggaaacctggagagtttagcttctctttatcggcactttccacctatttgcctgtttctagccccatagttcaccccctgccttctgcagtacctggtgcctttagtttcaaagctctgcagggccctgcctggtgaatgggctgcctctcatcagcaccaccctctgcaggtgtgtagattgagctgtcttcagctctgcaagtcagtatctactttgccacctgcttcccatcttcatagagtgatgtggtgttcaggtgctccgagatggaatgtgtgttcttgtttgtattagtgagggctctctggagaaacaaaaccagtaggatgtctgtctgtctgtctacctatctgtctatttgtctgtctacctatctatcaatcaatcatcagtcatgtatctatcttagcaatcaatcaattgattgatttattttagggaattggttcatgaaattgtagtggctggcaagtctgaaatctatagggcagggtggcaggctggaaattcaggtaagaattgatgttacattgttgaccccccaaatatgcggaccagcaggctggaactcagataggatttctacgctgcagtcttgacgtagaactccttcttatctgggaaacctcaatctttactcttaaggccttcaactgattggatgaggcccctcacattatataaagggtaataaataataccctccataatttcttacttaaactcaattgattgcaaacgttcctcactgctaaaaatacctttacggtaacatctaggctggtgtgtgtttgactgaacaactggccaccatagtctagccaagttgacacataaggttaccgatcacactgtttttcctttcttcctgcatcattttaaagtcacaaataccatcatgatggtctaatgcattcgttgtagaggaatcattttttagagagttcttgctttgcctcagtgttattactgttgatagcagagtccttgagggtggaggatacagactatagggtcttttaccagctgcgtgtctgggagtttgcttttgctgaaggaatctaagtaggttttaactatgaattgagaaattatcacatgatagcatgcatctatgccaggtttaatgccatcgagcatgaatattcattattataaaccagctggttcttagagtggttgggcaggcctttgcataaagaaagaggaaacaggaaagtagaggaaattgcaagatttgtttgttttgcttcatttaatggaatgaaattgctgtcaaggggttttgctggtagatgggaaatttgaaaaataccactctccgtttttttttttttttttttttttgaggcggagtctcactctgtcgcccaggctggagtgcagcggcgcgatctcggctcactgcaagctccgcctgccgggttcacgccattctcctgcctccgcctcccaagtagctgggactacaggcgcctgccaccatgctcggctaattttttgtatttttagtagagacggggtttcaccgtgttagccaggatggtctccatctcctgacctcgtgatccgtccgcctcggcctcccaaagtgctgggattacagacgtgagccaccacgcccggccgccactctcctttcttttaagaattgtataaaatggcatgggctgcttaggtcatttgttccaacaggacacattggtggccatgtgtctgaggtcacctcaacttgtatggtttctcttataacttacaaatgaaagctcccagattcactgatatgtcaaggggtatcagcgaacttggcaagatcccctcatggttttttccctgaatttttataaccctacatctcaagcttccaagacaattgcggaggttctgggaagtaacaacagttgttttgccaaataaaggaagactccccctagatcctgggaggcttgctttgggcatgccaagtccctggagggaatggttgtttaaagctgaatcagacctctttggagggcaatgtttctcaacttgttgtttttttgttttgttttgtttttttatcactccctcctccccatggagcctttttagatttttaaaaaataattccccaccataaaatgttaatgctgcagatatattgtatatctgtttatgtcttaaaaatataagcatctaggttcacagtcatgttaagggacatcagcatactaggcaagagcccctcatgttttttttttttccctaatgattttttccctaaataactgtcatttctaagattttaagatctccccaggaaccaattaccaattttcatctcctcagggggcatatgagaatgcatgttctagggcagtggttctccactgggcagttttgcaccccccaggggacatttagcaatgtctggagacatttttggttgtcacaagtgtgcgtgtgtgtgtgtgtgtgcgtgcatgtgtaacagggggtgctattggcatctcgagaacagaggtcaaggatgctgctgaatatcctgcagggcacaggacagcccctgtggcaaagaattatctggcctcaaatgtgaatagtgtccaggctgaggaagcctgttctagggtaattaggcaaatatatggaagaaattgatcactgtgttaaattcgtccactctccaagttcctggtctgaataagtagaatatttttagcaatggatactgtttaattaattcaaaatactctttctcaaagaaatagctcactatttgatttctatgaaaaaaagatcagagtcagattaaaggttataatgaaaacccagtgcaaagccagaaatagtggctcatgtctgtaatctcagtgccatgggaggctgaggtaggaggaccactttaggccaggagttcgagaccagccttgacaacatagtaagaccatgtctctagaaaatatttttttggtatgcagcagagcagctccttcgctgagatctattgaaagccctcaacacaagggtttgtaaaaaagaaaaaacaaaaaataataaaagaaacaaaaaaatgttttaaaaagaagccagggattgtggcacacacctgtaaccctagctattaggaggtgggtagatcacatgaacctgtgagtttgaggctcaagtgagctatgattccatctctgcactccagcctgggcaacagaccaagacctgtctcaaacaaacaaacaaaaatccaatgcctctttctttcaactttttattatacaacatttcaggcatatgaaagacagcaatgtctagtgaatcctcatcccccgcgggtacagcattctgcccttcttgtatcctgtccttctctacccatttctcaccaccattcaatgatgatgattcttaaagttattttagcattttaaggtaaaattagcatcaaaatgcataaatcataaccattcagtttttacaaatggacatactgtataacccatattcctatcacaatacagaatatttccataacaccgaaatctctcttatgtccatgtccagtcaatcttcatccccatgaggcagccactgttcagggtttttttttgtttgttttttgtttttttgtcttttttaaactttagattagttttgcctattttagaacttcttagaaatggagtcatatagtatgtgctcttttatgtctgacagctttggctcagtatgtcttgaaatccatatatgttaagtatcagtaacgtattcttttttattgttgaaatgtatttcactataatgagtatcacacacgttctttatccgtcttatctttgctaaacatttaggttgttctagtttgttcagttgtgaataaagctgccctgaacatttgtgtgcaattgtttagtggacatatgttgtcacttatcttggctaagtatctatgagtggcattgcttggttaaaagtgaggtctgtgtttaacattggaagaaaccatccagcctttttactaaatgcttgtgtcagttggcattctcatgggcaatctatgaaaattccagtactccatgtcctcaccgacatttggtgtcatcactcttttcaattttagtcattttggtgggtgcatagtggtatctctgtagttgtaatttgcatttccctgatgactaatgttgctgtgcaccttgtcatttgcatacaggctgttcacttatcttactacattaattggtggagtttctccatatcctgtttgcaagccttctgtcagataatttttcatgcctattttcttctatcaatagaagaaagaatagaagaaagaaagaagaagaaatgtatgcctgtcattttcttttttttttttttttttttgagacggagtcttgctttgtcaccaggctgaagtgcagtggcaccatctcggctcgctgcaacctctggctcactacaatctccacctcctgggttcaagtgattcttctgcctcagcctcccaagtagctgggactacaggcacgtgccaccacgcccagctaatttttgtatttttagtagagacggggattcaccgtgttggccaggatagtctcgatctcttgacctcatgatccgaccgcctcagcctcctaaagtgctgggattacagacgtgagccaccgtgcctggcagccttttattttcttaatgatgtcttttgatgagcagcatcttttaattttgattaaatctaatttactactttcttcttttatggctattgcactctgtgtcctaagaaaccttttcctgccctcaagttacaaatctgtctccatatgttttctttaaaacattatggcttttatatttaggcttttctctaatttttgtttatagtatgaggtagagtttgaagttcatttttttcatatcagtattcatgtattcagcaccatttgttgagatgactttcctttcactatcaaattactttggtgcctttgcaaaaattaatagactgtataaatttggatctacttctgtactctgcatacaattcattaatctgtgttcctatccttaatcaagaaccacagtacatatatatatatgtacacacactacacatatatatgtgtgtacacacactacacacactacacacacacacacacacacacatatatatatatatacacacatacatattttatacttttaagttctgggatacatgtgcagaacatgcagttttgttacataggtatacatgtgccatggtggtttgctgcacccatcaacccatcgtctacattaggtatttctcctaatgctatccctcccctagcccctacgcccccaacaggccctggtgtgtgatgttcccctccctgtgtccatgtgttctcattgttcaactcccacttatgagtgggaacatgcggtgtttggttttctgttcctgtgttagtttactaagaatgatggtttccagcttcatccatgtccctgcaaaggacatgaactcatctttttttgtggctgcatagtattccatggtgtatatgtaccacattttgtttatccattctatcattgatgggcatttgggttggttccaagtctttgctattgtgaatagtgctgcaataaacatatggaaccacactatattgattagtatagcattatattagatcttgacatcagacaagatctttatttaaataaattcatttgaaataaatttcacatatgattcaattcacccatttaaaatggtttatggtatatgtttttagtatattgtctattgtatattcacagcatttgcacaatcaccacaatctaatttcacatttttgtctctcataaaataaaacctgaatccattagctctctccctccacctctccccacccttctctatccccagacctaaacaaacattgatttacttactgtctctataatttgcctattctggacatttcatataaatgaaataatacaatatatagtcattcgtgactgatttctttcacttggcataatgttttcaagattcatgatgtagcatatattagtactttattttttattgctcagtaatcttttattatgtggatataggtcacattttatttatccatgaatctaagtcatttgatggacatttgggttgtttccagcttttggatattatgaatagtgctgccataaaaatagtatacaagtttttgtgtggatatatgttttcttttgggtatatattagataggtgcgaaagtaattgtggtttttgccactgaaggtaataacaactaagaatggaattgatgggcatatggtaactctgggtataaatttgaggaactgccaacctgctccattacaactgcccattttatattctgaccaacagactgacatctgatatttccacaaccttgacatcatttgttatattccatcttttttattatagccatgctaattggtgtgaaatggtatctgattatgattttgatttatgtttccctaatgactaatgaggttgaataccttttcatttgcttattggccgtttgtatatcttatctgcaaaattttctatgcaaatcctttgcccatttttaaatccggttttgtgtctttttatcattgaagtttaagtgtggttttacatattgtagatacaagaccattctcaaatatatgacttgcaaatatcttctcctattctgtgggttgtatttttactctcatgatagtattgtttacagcaaaaagctttacattttgatgtagtcaaatttatctatttttcccctttgttatctgtgcttttgtcataatatctaagaaacaatttcctaacccaaggtcacatttttcctatatagctctcttgcctcctccctattttcatgctgttattactgtacatattgtatctttatatattacaaacccaataatatgttgttacaattattatttaactttatgtcttttaaagaagctgagggaaaaagggagagcaaatatatattcctagaatttgttatatttaccttcttaccatatttggttcttttcatttgttcctgtggattcgagttaccatctggtttcatttccttagtccaatccgactttgctcccacccagttcttttgtgctgctattagcaaatatattatctttccatatgttgtaggaacaacaatgcaattacatatgtatcattctttattactgctttttaaatcagttaagaaaggagaagaaagatgcatttatactgtcttttataattacataattaactttattggtgttctttgttttttgtgtacgatttcaaattactatctgggatcacttgtttgtggtctaaagactttagtattttttgtgaggggggtctgctagcaatgaattctctcacttttagtttttgtttctctgggaacatctttattttgcctacatatttgaacaatgattttgtcttgattgacttttttttttccttgagtctattgttctgttttcttctggagttgtttctattgggaagtgagctgttcatcttattagggttcccttgtaagtgacaaatcatttttcctcttgttgctttaaatattttttccttctttggcattcctcatttttattgtgacttatctgtatgtggatctttttgtgtttatctacttggagttcactgagctcctaggatgtatacattaatgtttatcatcgaatttaggatgttttcagccattatttctttgcgtattttttttctgctccccctcctctcttattacttcttcaggtacttccattacatctacattggtatgcttaaatgtgtcctatatttctgtaagactgtttatttctcttcttttttccttctgtttattggattggaaaatcgctatcggactatcttaaatttgcctattcttaattctttgtttccaatctactgctaaggccctctagtaaatttttcccttcagttaatgtacttttcaattccagactttctatttggttctcttttataatttgtgtctttattgatattcttaatttgatgagacattgtcatcatcccttccatcccttcctgaggcgtgctttcctttagttctctgaagagaattataatggctactttgaagtctttgttaaatctggcatctggtggccctcacaggcagtttctgttgcctcctttttctcctggtgtgtgatcagactttcctgtttctttgcatgtctcatttttttgttgttgttggagaccagcgaatttaggtaatagagaaattctcagtactagtcaccttgcattctaaagcttattattgtcatttgcaatgaatggctggattattttagcgaagtctattttccccacaatatgagacctgtggtggtggtattattattatgtccaagcattttctacattcctttgtgatttcctttatctgtgggctatttaggagttgattgtttactttccaaatttttaagacttccctacttaatgttataaatttttagttttattgtgaatagaaaacatatgaaattttactctcttgacatttattgaggtttgttttattgctcaatgtatagtttatcttggtggatgttctatgcacacctgaaaatttattctccatctgttgggtgttgcattccatgtgtcaattacttaagatgatgttgttcagagatttttggtccttgttttttgtgtgtgtgtcttattctatcggtcactgagagtagagtttgatagtcttcaactatgattgtagatttgtctgtttctccttttagttctgtgagggtttgcttcatatattttggaactctgttcataggcacattcatatttatgattagcatgtcttcttgatattttgagcctttttttccaatattaaatgtcctcgttttttattttatctcttcctgtttcatgatgtgacttcatgtggatgcaaacccccctgggatcatcaattgtgaaaccttttaataacagagttcttgttcttaacccttggtgatggaatggacttaaattataaagggattggatagcagctattttgtgtggttttcttttattactgtttcaaattactgacttgtaacagtcttccaaatttgagtttagagatcattcaagacatttcaaaaatagaaattcaaaattaccatgtgtcctttgtaatggacatcttttgggaaatggacatctataaaatattgatgaaagaaattaaagacacaaataaatggaaagatagttcatgcttgtgaagaatcaatattgtcaagatgtttatattatccaaagcaatctagaggttcaatacaatctctatcaaaattccaaaggcatttaggcatttttcacagaaatagaaaaaaaatcctaagttttgcatgaaaagacagaagaccccagataggtaaatcaatcttgagcaagaagaagaaagctagaggcataacacttcctgatttcaaattatattataaaactgtaataataaaaacagtataatactggcataaaaacagaccaatggaatagaatagaaagcccagaaggaaactgatgcatatagggtcaactaatttttgacaaagactccaacaacacaccagagggaaaaggtactctgttcaataaatggtattgggaaaattggatatccacgtgcaaaaacaagtgaaattgggtccttatcttatatcatacacaaaaatcaattcaaaatgaattaaggatttaaacataaaacctgaaaccatcaaacacctagaagaaaacatagggaaataagatcctcaactttggtcttcttggcaatggttttttagcatatgatacctaaagcacaggcaaaaaaaaaaaaaggcaaaaataaacaagtaggattacaaaaaaactgatgtttttgcacagtaaaggaaacaataaacaaaatgaaaagacaaccttgaaatgggaggcaatacttgcaaactgtatatcaaataagaggttaacctcaaaaatatatgaagaactcatacaattaaatagcaaaaagacaaataacccaattaaaaagcgagcaaaagacctgaatagacattgtcctaaagaaagctacaaatctccaacagatatattaacagcactaattatgagggaaatgccattcagaactataatgaggtgtcatcacacatctgttaggatggctattatcaaatagacaagagataataaatgttggcgaagttgtggagaaaagagaacccttgtacactgttggtggggatgtaaattggtatagcccttatgaaaaagagcatagagcttcctaaagaaattaaaaatgtaactaccgtatgatcaagcaatctcacttctgagtccatatccaaaggaaatgaaatcagtatgtcaaagagatatctgtaccaccaaattcattgcagcattattcacaatagccaagatatggaaacaccctgtcaatggatgaatgaataaagaaaatgtgatagatatagataaacaattgaatattattcagcttcaaaaaaagaaaaggaaattcttctatttgtaacaacatggatgaacctagaggacattacgctaagcgaaataagccagacacagaaagacaactactgcatgatcttacatacatagatgtgaaatctaaaaaagttgaactcatcaaagcagagattagaaagttgattgccaggagctgtggggttggggaaaatggggagatgttggtcaaagtgtacaaacttataagatgaataaattctgaaaacctaatgtacaggaagtgagtataattagtaatgtattgtatacttgaaatttgcaaagagcatagctcttaagcattctcacccctcccccaaaggtaactatgtgaggtgatggatatgtacatcagcttgctcatgggaatcttttcacaataaatacatatatcaaaatatcacatcgtatgctttgaatatatacaattattatttgtcaattatagctcaataaagctgaaaacaattaaagatctaaataccatgagcgagcactgttccgcattccctttttctggaaattgtcccaatcctgagctgggtgtccatcctcagccagggccctgccacagaaaccttctgttttgggttcagaaccaccaggccctttctctctctctctctctctctctctctctctctctctctctctctctctctctctctctctgtgtgtgtgtgtgtgtgtgtgtgtgtgtgtgttttcagattcatatctagtatgcatttccttagaaccagaatattttcttttcccttttggatagaactcataagtctggataagtcattcccatgggggcctccacagcaaacatttccttccaggcttgcttctttatgcctcccggtgaggctgggctgcctctcttggcatctccttggaaaatgcaaactcatttgaacattagccagaaccatcataattagggagttaactctgccaaaggaaaatgaaacagatcattctatagccaagtctgtgccatctttggatgattcagaccaatgcttctttcctttcatcagccttcggagtctgctaattagtgctaaatagcaccttccctctatgccagcagcagatttagtgctggagatatagacatagaaaaggcgtttcacgtttttggagaatgacattctagaatgatcacgtcaggtcactcctcagcttgaactctgcagtgtcttccattgcacctgagagaaaacccaggccctttcacatggtcttcaggcccttccaggatctggctcctgctgtctcttcaacctcatgtccttctcccctcctccttatacattacattctagccaccctgtccttttcatgataatgcaaatggctatcatttattaagtgtgtgaaatgtgtcaggttttgtgttaagggccttaaagcctttattttatttaatcctcaaaatctctgaggtctttactattactagccctattgtccagttgaggaaactgagagagggcaatagtttgtctcaatctcaacagccagcatgtcacagagctggcatttatacccagatcatctgacatcagaacccaaacccttgatttcagagctcagctcttgccagcagactccacaggagatattgcttctctttccttccttggcttttgcacttgcccttctcccgtatttcccacgtgctgtcagaagcccatacatactaattccttcagcccttactacgtccctgcacacctgtctgatttccaactagtggcagctgaaccttcctctctgagggcttctgctggctgccagaacccatgctgcctgtgcttgtggggaactggaagtgcagggagcagatgcttaacccgtcccctagagccactgctgttagaggcagaaggggtcaggatatggtcacaggtcaggtcacttggagttaggaaattctgtggtctctttcagcctcggtctaatcagctttataagagggcttaaaatgcctgtcaaagaaggtctggtgataattgaaagggataagaggtgtgaatacattgcactgtgcccagcacacagtgggccccttgtaactgctggattccctctctgccttcccagcagaactaaggatttgaaagactaacatgaacacctgtgagttagggcccttgctacctggaagcttgaggtggacctggagaactggggacttggggcggggcagagataaatgatcacttttactccagagcctggacatacctcaagccttttattatttatttttaataagcagacattttcagaaggtaaaagttatttgagagcctctttctgcttatttctaccaataaatggattccatttcaggccacaagttgttctctttcatgggctctccctcagttttctgggtcatgaggaactctatataattttgggaggagtgagggaggaaggacctttgctttccttatatacatttatttactattaggttggtgcaaaagtaattgcaaaaacaataattacttttgtgcctacctaataacagatgctagggaaaacacttggtatttttgagtgccaccagctgagcctccctccacagatcccaaggtgattagtaaacttgtaaaaaaaaaaaaaaaggctcaatttttgccctttactaatatggtcttttggtcaaatcttcaaatattttgtcctagggattatttcccatactttataaataagattctaattattttctatcaaaactattttcttccaaaaaagaagaaaaatgactacatttgctgactctggagagagcaagggagccaaatgcacagctgcccagctctccccagggcctgtcctgtgaacctgggtcttgtgtcctcctgtggctaaggttttaactgctagaacaagtgacatgatgttgctatgcttcacaatttggcctttgtcacaatatctttggtaaaactctcaatactctgtaaactctttaaaaagtattcattctcatttatttagtcacttaataatttgttccacacatatttactggatacctactaggtttatgtttggtgcaggaggaagtagacagacacaatccccaccctagcagagcttacagggcaggaccgctgtgagcccatacaatgccttatgccaattaggaagaggcatcgcatcctcctggcaggtgcaacccaaggtacagggcaaagtgagaagagaagaggccttgctcctctgctgggcacccttgggccctgcacatcctgaataactattcttggcagccctgatggacagcaatggacattaaacaaataattacagaaatggccacttaattacaatcctgttatgcactagtatgaaaactatataatgcataataatggtgtctctagcatagagaaatctgggacaattacttctgaaggaagaatgaggtgagaacaggccatgagaagtgagagcatttctgagcggaacaccctccagtgcacttgcctgtcatcatggcacatgtgcaggagagggaggtgagttaacctgtggtggagaaggagcagaccatgtagagcattttaactttagagtttctggtctaaataccatgaccattcattttaaaattatttttctgtatattcgtaaccagatattattgcgtgtcaaaagaatgcctttttaggactttacctggggctaaaaatgatatatttgcttttataatcattgttctacataaataaattgagttacttcgtatttaagtatgtttctatattgatgagagtagaattattttcagacagacctgagtttgacctggttccatgacttagtaataatgcaatattgggcaaattgcttcactttttgcctcagtttattgatttctagaatgggagtttcagtccttacctttcagggtgtgagggaagattaaatgggataatgcagtgccattccctatggaactgtgattctggagaagtcagaaactgatctctgtccccagatgatgggagagccagcgactgtcctgacaggtacctactggaatgcacttttgtctaatgcaacactagaggaagctacaaatccttcagtccagtttatttccccactgaaaggtacttgttcgattattgcattcttaatgatgtcctccatggcatgtgttttgctgtgaggggggacatatatttactcaacacgttccttttggagtggttctcatgtctccacttatggtattaatttgattctgagtacagatccacctgcttcagaaactccatgtcttgtagttgttcaaagcaaaaataaaaaattgactgtttctctggtcatggcctgctgtgcattcaagaagcatgaagtgccatttaagtcattcttttttttttttgagatggagtctcgcactgttgctggggctggaatgcagtggcacagtctcagctcactgcaacctttgtctcctgggttcaagcaattctcttgcctcagcctcccgagtagctgagagattacaggcgaccgccaccatgctcagctaattttttgtatttttagtagaaatgggatttcaccatgttggccaggctggtctcaaactcctgacctcgtgattcattaagtcattcttgaaagtcagtgtgtacttcaaagagccctcccttgagttaggcctctggaggtggccacatgtaatgagcacagcaaggcgctgttgcctgctagcctccagcttggaggtgaggaagactgctggaggttcatttccaggaatattggttagtggttgcacccataccgacagaggtcaccgaggcaggaacacccagggtgaggtcagccagtgtgtcagccagcatgggctcagatgcaaatgaccagagtcatagcctgactttaaacagtggggacagaaggtcattacctgctgttttcttcattgtattgtttattggatggtggctaaagtggaagaacagaattaatagtgaatcacataatttatggaagcaattgttagagacacaaaggaagcctctgggtacaactaggatagttgtcctaaaaagttagaggcaacctggggaccactgtttcctgggtctcctccaaaatgtttatgaaagatgggatttggaattgcacaggcttggccatgcattctcattgcagacgagctggctgcctcccccagaaaaggtgctattagaagacttttgccccacatgtgtaaacctcagcaaaaaagtgactttgtaaaagtatgttcagttcttttcttgcactcagcctacattctcaattccgcaggcgctgctgagtaattacgtggtaaaagctttttcatgcagtaacaatctctaaacccactgcagagtgactgtcgatgatgcttcattgtgggcatttggatcagttagacccctgattgtggggcaaaagatggcgtcatcttccaaaattattctgtgcatttgcaacatgtagtgggatgaggtttgcttctcccagaggcagttcgtgtcctttattcttgagagacagagacgctgctccaagaaatgtgtcatagggaccatgtgcatgtagaaggagattatgaagaacgtggtaatgtgtgtagcctgacacccatccccaggacggtgggtgagtgtgggtgtgggtggcaggactgggccaccttggtagagatgagcagtagggaagggtcaccaggctctgccagcacttgagacctgcctgccacagctaagtgagtaacatcacaggggatagagccgggggtcccagggacacccaggggactagagtcagtgtctttagcacaggcaccttttcagtccttcctcctcaagctggcattgtctagcgggggatgttgcctgtggatggtagaggcagaggagggacagagcccaggcaccttgcagctgcctgtctcagggttccctgctgttatggttggcctgttacccctgatagctcctatggtgggaagagctggagcttgtgaagcccttggtgctcagatgagggtgtaagcattactagcctttggcatcaagtccagattggcagatgctcaatgcaattaaaaaaaaaacacactcagcttgtcatttggccctgactaatctctgcagccttgtccatgagggacagaggagagaacatttctgaaggtgtagattttttgggtgttgtgaaatatacataacagaaaatttaccatcttagccatttttaagtgtgcagtgacgttaagtacattcacagcgttgtgcagccatcaccaccatctatccacagaactcctttcatcttgcagaactaaaactctgtacccgttaaacactgactccccattccccttcgccaagcccctggcaaccaccactctgttttccgcctgtgatttcaataactctaggtccctcatataaatggaatcataccgtattcgtcttgttgtgactgttttctttcacttagcatacgtatcctcaggatgcatccatgttgtagcatatctcagaatttcctccctttttaagactgaatattattccactttatgtgtacgtgacattttgtttgtccattcatccagcagtgtacacttgggttgctctcatgttttagctattgcgaataatgctgctacagacacaggggtacagatacctctttgagcctctgatttccattctttctgggtataaacccagaggtggaattgctggatcatatggtaattctgtttttaatgttttgaggaaccactatactgctttccaccgcagctgcatcattttacatttccacgaacagtacatatccaacgtccttgccaatacttgttattttcggttttaattttttttatagtggactccctgagattttgacagagcccctggggggatgtgtcatcttctctgcctgggagactagagtcaaagtaaaatgaagatgtagtaactgagtttccacattctctcgatcctcccaaaagcaagttgcccattcctgctgctaagctcctcactgcccttcctgccccgcaacacagagccctggtcaaggctctcattcaaggcccagctcacacccccaccttctaggaaacttcccctcccatacacagactctcctgctccccgggcctcactcttccctcttccacctccagccagtggaggttggagtgtgagcctgtcctcccttctagactacaagcccccggaaagcaggcctgcctgctcatctccccatctctttgggcccagcccagcacgttgtatgtgttataggtttggtgaacagcacaggctgagttgttgaacttccacagagaaagaaaccagaaaacctagggaaacttttgaatcagactggcaggagggcccattggtttgaggctttgtgtagcccatctgagcagagccaggggaccagagtgtcaaccagggaataggatgatgcccaggccatctccactcagacatttgctagggaagtctatgccagaagaagagaagggtcattgtcagggccagggattctccctgagcgtttggttttggctgaggagtgacatgtgcttggttgatggcgtcacttctgctttgagaaggcattgctgatcagagttctggcaccatctgtaggtctctgaaggtgaggatctttatagggctgccagtttgcctgcatggcactgtggcagacacaaggaggcaaactggagagccagccacttagccagcacctgccattgcccaattccaaatccatttgctcttaccctttcctggtccttcaggaaactaagtcctgggtggaggcccaaggcttcctctttatttacgaaagcaatttaataggataagaatgatttttgtttttttcccatctttgtctttctactacatcattgtgattttcagggccagagatttggccacacaaagccaagggacgagtatgatattctgcctttactcatggacattctttcctttcattgccctgatagtttttctggcctctgctcacttttaccttctcatagcaggcccagaaaagggctttggctctttctccttctctttgtgtccctccagcatttgggaagctagggtgatgcttctgccctggaagggaggctcagagacctcacttgtcctcttctgctggtaacccatgctcagcagaagtggggtcctgaatgttgtctcgtctcactctgccctggaagtggcaatgcagcttaaaggaaggttggataggggtttggctgccttccagttttttatttaaatctataatggttaatattgagtgtcaacttgattgggttgaaggatgcaaagtattgttcctgggtttatctgtgagggtgttgcccaaggagattcacatttgagtcagtggactgggagaggcagacccaccctcaatctgggtgggcaccatctaatcagctgccagcgcggctagaataaagcaggcagatgaacgtggaaggatttgacttgttgagtcttccagcctttatctttctcctgtgctagatgcttcctgcccttgaacattggactccaaattcttcagcttttggaatcttggacttaaccaatggtttgccaggggctctcgggcctacagccacagactgaaggctgcactgtgggcttccctatttttgaggttttgggacttggacggctttcttgctcctcagcttgcagatggccttttgtgggacatcaccttgggttcgtgtgagtcaatactccttagtaaaatccctttcatatatacgtctatcctattagtcctgtccctctagagaaccctgactcacacaaactccttcttgagaatggaaaatggacctgcattctatacctcccctgtcccccaacctgctatagagccttcctgttcagttctctcacacagtggcaccagaagtcctcatctcttctctgtggcaccagccttgaaaacctagggatctgcatcactcagaatcactcatcaattcctttaataactcgctggggaattctaacctggagattttcccaaagcatgcttgaaccagtttgcattttctctcctacccatttgagaagagcacattctctctcctccagcatgtactcttcaaaccagtcagtcccaagtcctcacagtccttgccctggtctgtggctcctgctccttcccccaacgcagtgccctcctggctcttccctatagcctaccctgcctggcacagtagatgttgagaaaatgcatccacatcctgcctacccatctgtcaggtctggattcatgtttccaaacttcctagaaacctttgattatcaagatccacatttgcttctccatatcatctatcttgtctcccttgcaaagtggttgttaggataatgctagagaatacatgagagagtgtttcccactgtaaacctgaatgtaaagaagaattaaaagcacagttctatgattgttttcagcactggataatttgttatgtgtattgattcacaggtgaaatgaataatagatgttcacaggtgtaggtctaacatgtatgttcaatgttttactagagttcagggaccctaggtagcatgttcttttttaaaaaatagatgttcctgaaatagttgtctttttttttaatctttaagaatgatgaacatagataatggaaatgaaagttatttttcttcattttctaaaataaggcattcaataagaacaagtcctgaaataaatgtttagttaaaccctaatatttcttgattaagaagaaataaatgcctttcaaagaaaggcatttatttcaaagaaatctctagaaattagagggcaaatcataaccctatgagaacctattatttaataaaaagaaatggcatgatttgatcaacacagcatattataaacttgcaagcgatgcttcccatcctcattaatcacatttttgaagtggacgttgaaaattgtgtatgtgttttaaaaattgatattttggaggagaaacccagtaggagaatgattgattattaataagtcaagaaagagctacattcctctagagctgcattcatcaaagtgttgctttccgttgtttccatcaacaatagtattttattcagtacaatgtgaaacttcttgacccatgtgaaaaactgagagacatccctttttatcatagattccctttttccatctgtatttatcgcagtttcatgaggcaccatacctttccaaaggttgactgctccagtgttggttataggaccttcaattgtttgttcatgaaaacgtcatggtttagttcataggcattggaatagtgggaagttcctaggcactggaacagagagacatgagttgaatccaaaatagcttttgtgactttgataattgcttaatttctctaagctttgattttctatttttgaaatggatataataatagttcataatattattatgagggttatatcatgaaactttccaaatatgctgatttgttttagtcacatgctattgaatttcttaagaataatgaacacatgtggaccatgatgattggtgttagatttggggaattaatgtagatggcaattgtttaaaattgccaaactttttttttaacttttagatttaggggtatatgtgtaggtttgctatataggtaaattgtgtgttgtggagttttggtgtacaaattatttggtcacccaggtaataagcatagtactcaataggtgtttttttgatcctcaccctcctcccacccttcaccctcaaataggcctcagtttttgtcattctcgtctttgtgttcatatatactcagtgtttggctcccagttataagtgagaacaaatggtacgtggttttctatttctgcattagtttgcttaggataaaggtctccacctccatctacgttgctgcaaaggacatgatctcattctttttcatggctgcatagtattccatgctgtgtatgtaccacattttctttatccagtctaccactgatgaacatttaggttaatttaatgactttgctattgtgaatagtgctgcgatgaacatacccatgctatgtctttatggtagaacaatttatattcctgtgggtatacatccaataatgggattgctgggtcaaatagtaattctgttttaagttctttgagaaattgccaaactgctttccacaatggctgaactaatttatattcccactagcagtgtataagcattctgtttccacaacctcgccaacatctgttatttttttactttttaatagtaaccactctgactgtcatgaaatggtatctcttggtggctttgatttgcatttctctaatcattagtgatgttgagcattttttcatatgctttttggcaacatgaatgtcttcttttcaaaagtgtctgttcatgtcctttgcccaacttttgatggggttgtttggtttttgcttataaattcgtttaagttccttatggattatagatattagacctttgtcagatgcatagtttgtaaatattttctcaaaattccaaaatttttagataaagtacttctgattctagacatgagggagaaactggtactgaacttgccattattattattattattattgttatttaatattaatgaaatcaataaactcctaacaagactgatccagggaaaatagagaacccacacaaattagcaatatcaggaaagaaagaaaagctattaaatatttccaaaaatcctaaatacttaaagaaaagataatcttgtgagcggtttcatgccaacaaatttaaaaactaagtaaaatgattaatttccttgtaaaccactgctaaccaaaatggatactagatgaaggcgaaatctaatttttaatttaaaaccttttcagcaagaaagctccaggcccaggtggtttcactggtgtctttaatcatacatttaaggaagaacaaatgttaaccttacctaaaactttcaaaaaagccagaagaacagggaacatttcccaactggctctgtaaggctatacagataaggtaataggataatcctgataacaaaatctgataaagatattgcagagaagaaaactataggccaatattcctcataaatgtagatacagaattctcaaattatcaagataagtccaacaatacataaaaaagaatttgaactaattccagaaatgcagttgatttaaaagttgaaaatcagccattgcaagtaagcacattaacaaaataaagaagaaaaatcatataatcatctcaatagatgtggaaaaagcaacacttatgcatgacaaaaaatctgtcattaacctaggaatagaaagaaacttcccagtctgataaagggcatctatgaaaagcttgatgctaacttcatacttagtggtgaaagattgaatgcttttcctgtttgattgcagacatcataaagagatgtctatttctactgtttctattcacaattttagtggtggtcctagtcagtacaattagacaataaaataaaataaaaggcaaggaagaagtaaaattagttttatttgcagataacacgattatttgtttataaagtcctaagatctacaaaatgtattagaataagtgaattttgcaagatcataggatacaaggtcaatatagaaaatcaattgaatatttatacaatgtcaatatgcaattagaaaatagagacttttaaagtaccatttataggtacttaggaattaataaacaaaaactgtgaaacctatatttttcaaactgcaaaacattgctaaaaagctaaataagacttaaataagtggaaagtataccatattcatgagttgaattatccaatattgttaagatattgattatccctaaatttaagtatagattcaacaaaatcctatttagattctgtatgtagaacttggaaagctgattataaaatttatatgaaaatccaaaggacctaggatagccgaacaattttcagaaagggggatacatttgaagtactgacagtacccaatttcaagagttcttataaagttatagtgatcaagccaatgtggttaaggacagataaatagatcaataaaacagaatagagtcaagaaattgacccacacctttcaaaaaaggtgtcaaggtaatctagtggcaaatggaaagattaaaatcaatgatattagaaattctgaataaaagtgtgggaaaaaagtaagcttgacccctacctcatgctatatataaaacttatttcaaaattaatcacatactaaaaagttcatctataaatcatatagaagataatatagaataatatctttggtactttgggatagacaaagatttctttaggagaaacacaacagcaccaataatagaaaataaaagataaattgaactcaagcaaaattaaaaatgtctgcttttcaaaagatattctagaaataaaatggcaagtcacaggctgaaagaaaatatttacagttcatatgtctcaaaaggacttgtgcattcatatccacaatatataaagagtatgtacagatcagcaataaaaaaagcccaatacaaatgtaggcaaaagacttgaacagagactacataaagggaactgtatgtatgatcagtaagcacatgaaaaggtgctccattattcctcattagggaaatacaaattaaaatcacttcatgacaattagaatagctaaattcaaaaagatcagcaatgccaaaatgttgatgggtatggatttaagtgtaattctcaaatgttgctggtgatgtataaattgttactgccactttgtgaattggttgtcagtttcttataaagtaatcatatacttatcctactacctagcagatgcatttctaggtatttgcccaagagaaataaaaacatacattcataaaaggtcttgtacaaaatattaatagcagttttattcctaatgatcccaaactagaaacaacccaaagttaatcaataggagaatggatagcaattaaaaggaacaaactactaacaaatattgcaacatggatgaatctagaaaacattatgttgagaaaaggaagtcagacagaaaagagtataagctataatattctgtttatatgcagtccaagcacaatcaaaactagtctatggtgtagaaattagagtagttgtcctaagtggggaggtcattggcaagggagggaactggctggcaagagctgtaacggattattctgaggtgatggaaatgttctctatgtttattgaggtcttgcttacatgagtgtctatgttttggggaacttaagacttatgcaccttggacactccttttaatgctctttgcataagttgctccttctcatctttcaggtttatataaagtggagtctcctctcctgtcatcaaccattctgtttttcataagcctatttgttgctttcctaacttttttttacaatttgtaattatttctctgtaaattccataaggccaaaacccaagtgtgtcttatttgccccccagaactgagcataatacctggccagacttgtagcaggaactgagtaaatatctgttgaattagtagcttccttataaaatgctcaattctgttgccccaggtggtgataatgatggtgattgtgttgttagtggtggtggggtgtgtgtgtgtgtgtgtgtgtgtgtgtgtgtgtgtgtgtgtgatgttatgttttgtgaagtccacacatttctctaaatcctggcaggccagattcttattcattgaaaaaagcttgtatcaccagagagaataaggcatctttctctaaactcaggtatttggctgcctatagtgagatgacctttcactgaatcacagcttctttatctaacggatgaaacattgaagccaaaatcagggtggtatatcatcatccctccaatgggtaaagttggaatctgatttgattctaattctttttgacattatccattctcattctatcaccattggccatcaaaaaataatgtcttgggaagtctccagaactttatttgaattcaatgtgcatatttcctgtgtttcacatgcacatacttttgtgctcattcccaggaaagcaatctggctggtgggtgagaagcaccattttgactgtcttgacaagcggtttggctgctgctttttttgtttgttttttgttttaactgaactttactgaatctatgacctactttggccctacagaacacaaactaactttcaccactgagcctcatttcttgcaagctatagacttgtatcagtgattagagacaggcatataggctatgctgatttacacaactcttcaaagaactgagtgacaagactgcagttgatggaattgatgcaggagaaggcctttggaggatccaagaaagctgagactctgctgctgactgacacaccataggtagcacttctgctgtgcttgagaggggcatggacattagagttctcaacattcgagttactattatctgattcttctgattctttgtagttatgagattgcatggggaagccaaaagcagcatgatatgaaagaaaatatgtagtaatgaattgagcacttccaagagatgctttcaaacacctatttcggccaaatcctggtgggagcctcttactctttctcagttaccattggttattggtcattttaatatgacagttgtcatgatgtgaatgtgttccccaaaattcatatgttgaaaagtaatcaccaatgtcatggttttaggggctggggcatttgagaggtgattaagtcatagggcctaatgataggtcatagggtcatagggtccttatgaatgggattagtgccctcctaaaagaagctccagaaagctctcttgccccttccaccatgtgatgacacagtaagaaggtaccacctttgaaccaggaaacaggcttcactagacatcaaatctgccttaatcatggacttccaagcctccagaactgggagaaataaatttttgttgtttataaagtacccagtgtatggtatttgttatagcagtcccaatggattaaaacaacaaatagcacaatgcaaatcacaccaatttgatggcaaagtacatatcttgagaaagaggcaggaggcttccaagcctcaactcttgccctctgcatacccacagacttaacaccatgtggaagctgccaaggcctatagcttgcaccctctcaaggaatagcctgagctataccttggccactttaagccatggctggagctggagtggccatgaggctgagtgccatgtccccaggttactcagggcagtgaggccctgggcctggcccacgagaaactattcttctctcctagggatctagaccttgatgtaggagctgccatgaaggtctctaaaatgcctttgaggcattttccccaaagtcttggctattaacattcagctcccagtatgcaaattctgtggctggtttgaattcctctgcagaaaatgtttttgttttttgtttcctaccgcatagtcaggctgccaactttctaaatttttatgttctgctttccttttaaatataagtttcagtttcagattatctctttgctcatgcatatgaccatatgctgttagcagcagccaggttaccccttgaatgttttgctgcttagaaatttcttctgccagatactgtaaatgatcactctcaagttcaaagttccgcagatccctagagcaggggcacaagtctgccagtctctttgctaaagcttagcaagaggacctttattctaattttcaaaaagttcctcatctccgtctgagaccacctcagcctggactttattatccatataactatcagcattttggtcacaacaatttaacaagtctctaggaagttccaaactctccatcatcttcctgtctttggctgagccctccaaactgttccaacctctgcctgttacccagttccaaagacacttccacattttcaggtatctttatagcaatgccccacttctctggtaccaattttctgtcttagttcattctcaaactgcagtaaagaactacctgagactgggtactttataaagaaaagagatctaattagctcacagttctgcaggctgtacagggagcatgacggggaggtctcaggaaacttacaatcatggcagaaggtgaaggggaagcaggcatgtcttacgtggctggagtaggaggaagagagtgaaggtggaggtgctacccgcttttaaacaaccagacctcatgggaactcactatcatgagaacagcaagggggaaatctgcccccatgaccaaatcacctcccaccaggcccctcctccaacattggggattacagtttgacatgagatttgggtgggaacacaaatccaaaccatatcaccctgcatacgtccagcaaccagctggctctgtctgccacttgggacaggtatcatatgtctgccttacctgccccaaacccacgtttgagaaattttgggaatgctgataatctcccagtggctgtcagattacagcgagtggcaaatgtggggggtgggggtggaagagagtggggaaaatacaggtaaaggagaataaactaaaaatactgaaaccaagcagaacctacatagcaaaatacttacttttacctctagaaaggaaaatgaaaaatatggctccatggtagaacttttactcccaaagctagactgaaaaaagatcgtgtttgtcctatggttggtctgcataatgtacaagcttacaaatggtaggctgtccccaactggcttttttctagtgtttaaatcacattttgtattttccttgcattgtgcctgggccatgtgagacagtttagataaaaaggactttatttggtaccacagttttcagtctttcacccaactcatctggaaagactgaacagaaatgagaccggggtctctgaagaggtcagcatccatactttttagtttagttgttcggtcagctactgaaactccaaaatagctctctgctgctcagcctgttttgcttctaaactgtggccttggcaaacaccttactgtatcaacacacactgggtgcagagacagaaagagcacgggtctgcctggcgtagtgcctgcctgtttgaatgaatgaatgcatgaatgaatgtaatttcaagtcttgtatctatcacctgccagccttgaccttcagcaggtttctttgcatctcattcattcacccaacagatatttattgattgcctcctgggtgccaggcacaaaattaagttatgaggatcacaaggtgaaaaagacagcatctgttcttaagaaattccagtctggtaaggagggatccttccaagagagtaactggctctgtatactgaggagcaaattataggtgtgctcactccctttatctcttgttttctcagactggtggcttgtggcttgcaggactgcccccctctgctttctgtcttagctaaagtggtaaggcctgttagatcacacactccattctgtgactattgccagagacctgtatcaaaagctttggtctttaccttctggaattccaagttttactttaaatgtatatgtatgtgtattttaacaaatcaggatattttcctgttgtcaggcttctggtagctttcctgctgttcacgtgttgcaaagactcctggaagtaacttttgatcacactggggagagtctcttagtgccctggggggtaattcttctagtcctgtattttttgtctctcttaaagctgacaggtggcttacattgttcttgatttttctgatgtttgttctcctttgtcatgttagaaatcacagcgggagtggaacagttatgtttaacttaaactatttctggcccacatgtctgtttgtgaatgcagggagtgttcagatttcttgggcagtaggccacatggtgtggacaagagtataaaattcaagtttgtcattcatgatagaagaaatgcagaaaaaagtccagtctcctgttgagtgtagtaaactaagcgtagaggctttctgctaactatagttccaaaatacagctagcatttattgagtacttactggatgctaggcatgcaccaaatgttctacaagggctgttttacttagtccttaggaaaaccctataagatggatattcgtattgatcccatttgcaggtgagaagcagagagttaagtatcttgcttgaggtcacacagcaagtagtgaagctaagattcaaacctcggcactagatgttactttgtatccacatctacctatcttatatttaggttggtgcaaaagttattgcagattttgcaattttaatggcaaaaaccacaattacttttgcaccaacctaatacttaggttaagatgttgcagtcagtgaagagatctccaactgatgattcatgcggctgttttcctcctcaaaactttgtaacaaaagtattttatttcattctaatgtttgtggggcatgtttcattgctaataattctcaaggaaaataaataatccaagtcctggcttagcatttttctgagcctgtgggaatcatgctgaccatcgtaacaaatggccagtctcaggtgtgtgttgtaatgaacaggaaaaataggaatgaaatctgacttttcaccctcaagaaatagctgcattagaaaaataaaatagcaatgaagcttgaaatatgttttggtgtaagatctgtaacaggtaacctggccagtttcatttattctgaatttattcccattacaagccttgaatgctccctgggctctctcttgctaaatcgatgttttcagaattctcagtggcttgaattttgtaatctgagaaatcaatcaagtgcctccggagaatgccatgtcttattctactctgaacctccaaacgcctcttgtaattaagtattagttggagttcattgcacttgaataatgaggtgatgtttgggtaggtttcctttgttgtttttttcttgaggagcacagcttctgtttttctggttagctgaatcacagttgtcacaaaaaaatgctatgtaaagcctccctaattataatagttagcatctccaaaaaccaaattcaatactttatggtcattagtgtgttgctgcagtcggcatgcatagccctggcatgtgtagcgtatgccctgtgattatggaattttacaattaagctttgacaatgagaaaagggctgaaggagttgaatttgttcctttttaaaatggtctgacttgcctgatgaccaaatgaatggctgcataactcttgttatagagcaaacagtgtggtcactagctctttctgcatttgctctgcactatataattttcttgccataccacagttgtttaacagggataattggttaacagtgaaatgtatgtacaaaatcatatagaaaaataatcattggcttaaatattatatttactattaaataataatattaataaatattaagtaataataaaaaaacagacctccatgtacccagcacttggtttaagaggttgaatttaactatacccttagaaatcctacattaccctcctggtggctgatccttctctctcttactgtggccattatcttgagattttcaaaattatttctttgcttttctagatagttttacatgtgcacacatacacatgtatacattcctaagcaaattattgcttagtttttcctgtttttgaactttacataaagggagtcacacagcatatgttttgtgatttgctaattttgctcattattattttttgagattcttctatttattgatgtatgtagcaggagtttattcattttcttttctttctttctttttttttttttttgagacggaattttgctctgtcactcagactggagtgcagtggtacaatctcaggtcactgcgacctgcaacctccacctcccaggttcaagctattctcctgcctgagcctcctgagtagctgggattacaggtgcccaccaccacacctggccaatgtttgtatttttagtaaagacgaggttgcaccatgttggccaggctggtctcgaagtcctcaccttaaagtgatccgcccaccttggcctcccaaagtgctgggattataggtgtgagccaccacgcccaggctaagtttattcactttcatttttatctgccactttaagccatgactatacctcaatttaaaaaaaatcattctaatgctcatggacatttgagtcatctctagtatggacctattataaagtgtcagcatgaattctttttgtgcttcttccaaatataactctcagataaattacttgcagtaaaatttttgggtcatttgcttatcttcagctttaataactaatgacaaactgtttttacactctcaccagcaagttatgaaaattcccattgccccacagtcttgtcggcacctaacatggtcagaatttagtttttgcttgtctgaaagatgtattggtagctcctggtagttgtgatatgtattttcctgatgactactgagctagatcattcattagtttaatggatcttagcttttctcttatataacatacctgttcatgccttttgaccatttttttcaattaggttgtcacttttttctcattaattattagggttttaaaaatattatggatattagttctttgttggtcatacttgtggcaaatatctccctttccttgcttgtcttttcatgttcatttttttttttgccttccacaaaaaagggagatgtttgtgtatttattatttatttttctttcgtggatttattaattcttttattttataatccttattaaagaaagagtacatacacattgtagaaagttaaaatatacagagaagcaaactttttaaaaagaactttacattcctactgccctgaagtcaccagaattagcatcttatgcaggatttcatattctgaatttcatacctgtatgtgtatgtatgtacagttgacccttgaacaacacaggtttgaactgtgagggtgcacttatatgtggattttttttttcaatgaatatattgaaaattttggggggatttgtgaaaatttgaaaaaactcatagaggaatcacaaagcctagaaatctaaaagaaaaatttaaaaagctatgtcatgaatgcataaaatatatgtagatactacatctacatgtatcatttactatcataaaatatacacaaatctattatgaaaagttaaaatttatcagaccttacacatacaaacataggtggtacgtggcatcattcgcagtcaataaacttgaagctgcagtattaaatcacagctgcgtaagattaactgtagaatgcgctgcacttctgtggtaattttatagccacctcccattgctattgtgtgagctcaagtgttttgaatatctacctaaaacaccgtgtggcgctgatcaccttcacgtgagcagttcgtgtctccacgaaattggcggtgggccacagtgaaagtgatttctcacagttgtcgcatatttcccattgtgtttggtgcaatgttgtaaaccttgaataacaccatgggacttatgaagtgtcactagtgatgctggaagtgctcccgagaagtggagaaaagtcatgacattacaaggaaaagtcaaactgtactgactatgcactataggttgaggtctgtaactgtggttgcccaccatttcaagatgaatgaatcgagcctaaggaccattgcaaaaaaaaaaaaaaagaaagaaaaaaatcatttgtgaagctgtcactgcagctgcaccagcagatgtgaacaccttatacattttctgaaatattaggttagtgcaaaataagttgtggtttttgacattaaaaataatggcagactgggcgcagtggctcacgcctgtaatcccagcactttgggaggccgaggcaggcacatcacctaaagtcaggagtttgagaccagactggccaacatagtgaaaccccatctctcctaaaaatacaaaaattagctggataccgtggtgtgcacctgtaatcccagctactcaggaggctgaggcaggagaatcatttgaacccatgaggcagaggttgcagtgagctgagattgcaccactgcactccaacctgggtggcggagtgagactctgtctcaaaaaaacaaaaataaaaaaatagtggtattaattttaatggtaaaaactgaaattatttttgcaccaacctgtacaaaatatgggttaattgaccatttgtgttatcagcaagccttctggtcaacaagtaggctagtagtaaaattttggggggagtcgaaagttatactcagattttcaattgcatggggtgtcggtgcccctatcccccacattattcaagggtcaactgtatatgtaatcaaaacaaattttcagtcaccaacctccaagttttcatttgagtagatttcctctcaccatataggtaaaccatcttcaaattttcccagttgaccagcagtcctttagcgctttggtcaaacaagtatccagtctaggacttattatgtatttggatgaaccaagttctcaatgttaaagtcagttttatcagtcctttgctttgtgattagtattttttatatctttttaaacacatgtctttcaatcccaagactgtattatcttctaacagtcctatagttttgctttctcctctaaattcataatccagaattgatttctgggtatagtagcagtccaattttttttccatatggataccggcaccatttattgatattcactgacctacaacatatcatgacccctgccatatttcatgttcatgtaaggatgggtctttttcttggcttttaaaattctgattcatgggtctgtttgcttattcctataccaatgctgcagtgtcctaatcattttacctttataatatgtcttgacataataaattttataataaggtttaaataagacaaatctccttggatagattaggataggttgggctgtctttgggtacaaatttcagtggcttaaaactcaaagggcttctttcttgctcatgctatgcatacagttgtggtcattcagggtcccaggcaaacagaggctgtgttactatctcaatatgttcttccacatgagagaagagagcatggagaatcacttgtcaacttgtaatgctttctcccagaagtgacacatgccagttatatttacatttcattggcagagctactcccatgaccacacctgatttcaagggtgcaagggagtgtaatccttgcataactggaagcagaggattctaccacatctctcccattgcttttcttcggaagtgtcttagctattctcagccttgagacccattttgtcaagttccatgaaaacccttactaagattttgattgggattttagtaaatctagggttcaatttggggagaagtgatatcttcctttctaagcatatggtatatttgtctatttatttaggtcttaatgtcttttagtggttttatccttctctctttaaaggatttgcacatcatttataagactaattctttggtgttttatattcttattgctattataaattttattttttaaattacatttcctagctaattattttctggtgtccagaaatgctggtgactttggtatattaattttattaatgcagaaattttgaaaaactctcctagtaattctaattacttatccataaattattttgagttttctacatagaaaatcataccacctgcaaataagtacagtttcatttttttcgtttctaattcctaaccctttttattgagttctcttgtcttctctaactagggcttcttgtgcaatgttctagaagtggggatagcaaacatttgtgtcttgttactgatcttaagggaatgctttaaacgtctgaccaataagtaggacttttttgctagatattctttatcaggttccttccatttctagtttgctaagaatgaacttcgaattttgtacatcaaaaaaaagtgatactttccctttgatgtgttaatgcggtcatttatagtaatcaatttaaaaaattttaaacctgctttaattcctggaattaacctaccttggctaagatgtattccccttttactcaatgctagatttggttgataatattctgtttaagacttttgtaaatatgttttgagtaatattggttggtaattctcatttcttgtaccatacctgtatggttttggaatcactgttactaaaataagacagatgtacaaaatagaaatatgagacctacaaaatccatgaaaattgtttaagatataaatatacatttcaggctgggcatggtgactcacgcctgtaatcctagcagtttgggaagccaaggcgggtggatcacctgaggtcaggagtttgagaccagcctggccaaatggagaaaccccacttctactaaaaatacaaaaattagccaggcatgttggcagatacctataatcccagctagttgagaggctgagtcaggagaatcgcttgaagccaggaggcagaggtcgcggtgtgcggagatcgcgccactgcactccagcctgggtaacaagagcgaaaccccatctcaaaaaccaaaccaaacaaacaaacaaacaaaaaagatgtaaagatacatttcagtgaatgatagatcaaacataaattggaaaatatataagacttgaatatcatagttaacaagcttcatagaataaatatcccctcatttttaattctttgtaaagagtctatgtgagttgatttattttttggagggatgcctggaaaatatgtccatgaaaatgtggtcctagatttcaaaatatagaatcagtttacctagagttataaaaatcttgaattttaggccgggcgcggtggctcacgcctgtaatcccagcactttgggaggccgaggcgggtggatcatgaggtcaggagatcgagaccatcctggctaacaaggtgaaaccccgtctctactaaaaatacaaaaaattagccgggcgcggtggcgggcgcctgtagtcccagctactcgggaggctgaggcaggagaatggcgtgaacccaggaagcggagcttgcagtgagccgagattgcgccactgcagtccgcagtccggcctgggcgacagagcgagactccgtctcaaaaaaaaaaaaaaaaaaaaaaaaaaaaaaatcttgaattttaaaatatttttgtcttgagatattttagtaatttttatttgtttttagaacttagtcatttcaatttatttcattggtcttttcaaagaactggtatttttgctttgagcctctttactgtatgtttgttttgcttttcattattttctttattatttttctctttcaattttgaatgtattctgctgttcttttaaacttattgttaatttaaatgcagtgcaataatgctcatcttgtttttctaacaaaaacaatttagctataaattttcctttaaatgttgcattagctatattctataagttttaatacatattattttcattaattttaattctggatatttctaattttcattgttttcttctgtgacccacagttgtttagtagagctttaaaaaaaatcccaaaagtaagatatttttcttgttatatcttcaaaatagtttataattcaattgcattatggtcagatagagatctatacagataaccagtccttagatctttgattagctttgagaattagcataaggtcagtttttataaatattctatatgactttaaaagaacgtgaattttaaaattgttggacacaaagttgttatatgtctattagaacaagattgttaatttggtgttcagatcttatatgtcctatctaatatttctgttttctgtttattcttaatttgtcaatagcaaagatgtgaattaaaattttccactattatggcaaatgttgtagttctagggtatttgtaatttcatcaatttttgattcatatatttggagtgatgtgtaaacagtttagaattgtaatacttcctattataccttctactacctgtgtaagtcatgatcatctttatctctaatattgcttcttaccataaagacaatcaaacattaatatttatacagaattgtattcattaatatttgtctcatttttctttcttttttgtgtgtgccctatattttatgtatgtatttaaaaaatttttaaatagggagcaaatttctattctatttcttataattactcacatatttaaagccttattcgtatattctttatatacttctttgtcctttcttatactgtttttatgtctgaattcattattttcctcttttagtttgaaagttctatcaaacctctagtttaacacacatagttaacgaagtctcaagttaataccttttcttccttctgagcaatgtaagaacattaaatgctttaactctgatcgataatatgttctaacctatttgacaatgttatctggtattttaattctagcttgattctttctccttcctcccaacaaaccaccaacctctgcatactttaacccacagatatgccagtatctttgcttagcattccctcgtgtatcagccttacaactttctgcctaaaacatatcccttacatttcctttgatttgtttgtgtggtgtgtgtgtgtgtgtgtgtgtgtgtgtgtgtgtgtgtgtgtgtgtgctgtatgctctgtgtttttgaatttcctaaattgtctttgatttcattcttggaagatggccttattcaatatggaattctagtttgacagttactctttctttctgaactttgatgatattatttcactggcttctagctttgattttttggatcttttgaagtcatctgtgagtcttaaactgctgctcctttgtaggtattcttttcttcctttctgcatgtctttaacaacttgcttctctttttgtgttgtaaagttttattaatactgtgtctaggtgtggagttccttttatgtatcttgtttgggattcattgggctttataaatctcaagtttgtgtctttcaatatcctgagataccctctgccattatctacttgaatatttcttcttctccattttctctattacttcctcctctaatttagaatttcacttagatatttgttaaggccttctcaccacatcatccatgtcacttatctttccttcattatttttcatatgtctttttaaatttttaactacattctggataaaatttgaatctatctttcaatttgctaattctctacttaggtttgttttacttgctatttaatccgtctactgagttttaaagtttaattactatatttttcatttatagaaattctatttggtctttttaaaactctattttattattcttttataatgtttgttttctgtccttagttttaagcttctctcaaatttcttcaagcatattgcaaatagttattttatattcatgtcttgtaactatactatctaaacttgttattagccagtttttcttataggttctcatttatgatgtcctaaatctttgtgtttcagttttcttactctgggcttttaatttttcctagaagtttattttttggaaatactttgatgtctgggttgaagttgaattcctctagagagatattttgccaattgcctgacagcactaactaccccaggaccactcaaaattaactccccacttaaggttttttggagaccatatgagaagcatgaattggatagcaaaaacctacgagagttggcttgtagttctaaaatctctccacatagcacaaagatggagacaggcaggtgtccttgccgtttccttctgaagggcagacttcttttcctacttattctttttttttttttttgtcagacggagtctcaccctgtcacccaggctggagtgcaatggtgcagtctcagcccactgtaacctccacctccacctccacctcccgagttcaagcaattatcccacctcagcctcctgagtagctaggattacaggtgcctgccaccacgcccggctaatttttgtatttttagtagagatggggtttcactatgttagccaggctggtcccgaactcctgacctcaggtgatccacctgccccagcctcccaaagtgctgggattacaggcgtgagccacggcacctggccttttcctacttaagcaggttatttagtctttggggtgcaagatttactcagggatcttctgtgacattttccaccacaggtagtcctgagactttgtttcttcgtcctcaaactggaagctcaaggtctgcagttccccacagacatgctcggggccaagtgtggatctctggctttcctgtgtccttgcaccctaggttttttctctcccttcatttttgggaaccttgtttttattaatttttctctgtgtcaacatagcggcatgtttaaaagattgttttaatatttcgtctaacatttaattatttcaaacaaaatatatagtctgctacactgctagaaatagaagccctaggtttgggaattattaggtattcttgtatttgaaaaggggaactaaactttggctaagaaatagacatgtctgggtgtgagaccagattctgtattcaatatttccagatatttgtttcctcagcttttctgataataacaccttttatttgtatgttgaatttctgtttacaaagtcctttcacacatatcaagtctttggagagttggctgaagcagatgttgttatgcctgttgagtgaatagatgagattgttgagggggacaccacactgatttggaacccaagtcttaatacctagaagagttctatttttgtttcaatgccatcttggattaaattatttcaaagaagttagcaagtggatctcaatttgttgtctggggcaagtcactgcttggacactatcttgagggagatccggagcccaaagctgggttttcttcatgttgttgctgtttgtttgtttgtttttttgataaagagttcattgatccagttagcagtgtctgcaaaagttacaagagatgaaaaatgcaacttatttgctttcccagatttaaaatggccttcctgactttaaaaaattcacagttctcatataaacataaaatatatctttctaaattcagatggcataagtaatggaaagacagactttgcttatttcaaataatgaggctactagttctatttatggtcagcttcctttgtggtgtgtgagatgagcatggaatggtctttcatgatagggaatttattgcaagaaaaactagaacatgaggaaatcttggaaagccacctcatcattgatacaatcacttggggcttctcatacggttgtgctacaatcttcttgagttacaaaaataaggacctggcttagctcgggacagtagcttgaagtcaatctgcttgcctttttccactcatacaatatttaatatctgattgggccatgtggccagcacccatcacagactgtccctattggtcagcatttaagccaaacatttcaggggtaacagatcttcttaatgcaaaggccatttatattcccttcctgtgctggctgagaccctcatgcaaggctgccagcagcaggttagaagggttcttcttctctagcaaaccctgagacaggttgtatgacatctcgtaaaaggcaggaggagttgaggctactcgtttagaagagagcaaggcagtaacaatcattacaacctaagggcttctcctgaagtccatgcaccccaattagaggatgatcagatgagcacactgggcaaatcaatgactactccttgttggtggtttcttaaatgtgcattactattcaaatatcttcatcaaatttatgctctgttaagtcctttgaaggtaaactaaaaaatcatttctcattaaaatatcatctttatttcaaacctgctcatgctcatatcagctcctctaatgtcattatggaaaaaggcaatttctttcttttgatggcttatttttatatttatgtttcagatcattgtggcatataatcaaaggaaaagttatcctggggatttagaccttctgtagattaagatgctcagatatgcaaaaccacttcccatccttgtgactgtcagtagttttctccagtgcaaggagtaacatttatgagttttcataagcatttttcatcaaggagtgtggggtggacagtggagccaaagcaccttctgtcattcaaaaatccttaatccccaaccaggtgcggtggctcacgactgtaatcctagcactttgggaggccaaggtgggtggatcacttgaggtcaggagttcaagaccagcctagccaacatggtgaaaccccaactctgccaaaaatacaaaaactagctgggcgtggtgatgggcacctgcaatcccagctactcaggaggctgaggcaggagaatcacttgaatccgggaggcggaggttgtagtgagctgagatcacaccactgcactgcagcctggggtaaagagtgagactccatctcaaaaaaaaaaaaaaattcttaatcctcctctgctgctactttccctccttgtatctgcccattcccaggatcagtgcctccagccagttgacaaaaggacagccaccttcctcccgctatcatttttcttcccaccactgttcttcctctgcacttcttgtgcgttgagcctgagttgattctttttctcagaacaaaatcttctttgaaaatgcaacatgaggtaagaaaaggagtttatagtctgcttttttctgtttgcatttcctgcctctgacatttgctttcagactaattaggagttttggagttccttttccttttccccattgctcattttcaaacaagactgtgcaaccctttccatcatgagatgaaaatctcacatggctcaggtagctcaggtatcaccctgcctagaaacaggggataaaggacatgacctttcatgtctttctgtccccaaggaccttggcctcttgccagaatccttaatagggtccaggtatatttgtaaaatgaatacatggtctctaccatttatattttcatttgggcattacatatcgggtgcctcctattgtcaggcagtgtgttcggtcctagagcttcaacagtgaccctgatgggcatgtccctaattgggggtgtgaaaacaaacaggcagttagcattgctctaactgcaataatgctaagaacatctgtgatttttgctctatttaaagagaacacatagtttctaaagagctgcatcacacctatataaatgatttgtactttctgagcctccatttctcattcatagaatggcctaatgactacatcattgtgttgttctggggatgaaatgaggcaacctaatgaaaagcttccagcacagtgcctggcccatgggaggtactcaacctctgatcacctggctgtccttctgatggaatgctcctctgcctgctctgcttggcatggtttcctcctgctgatgagggtgggcaggcattgaccaggcaggcttgtttcccacatcctttttttcaaatggtcttctggagatgcacttatatcctctgcaaaacacccttccacactaaggtttattaaactacccaacgttgcctttctccctcagagaagatcataccaactctctgaacatcccaaaatggaaagtttgtatagattgactcatcagagcacaattgtgtgttcagtgccagaaattatcagcttgtgtggaaaaatataattagcaaaagtaaaaaaatacaacataaaaagcaggacctgtcttcctgattcttatctcatttgttttttaagagttttcttttttggtgccagttttgtgtttcttgtaatcagtagggtccaaagattttccgcttggtttaagagtcaactggggatgaagttaaactataacattgcacctaagctagtgcaatgactagacctttctttacaaagggagagttttgaactcatctgggttgctggagagaagaattagtgattccttttcagtgtcaccaggcaggcagatagccctgttcatgggatggacctggtgttaccgcctatgtcagctccttttattgtaatgctttgcctatctaccctcattcgtaacagccagtgagcatcaccaagtgtcagaaacagggtgaaaagtcattatctttcgtcttcttcctagtttagaccatctttcctactcacagacagatcaacacataaatattaacaatcagctgctacaaataaagaaaacctactacaaggctttgaaagcgagggacatatgctcttcccacaggtcactatgcttacttccttcccatcagtagtaaaggggcgtgtgtgtgtgtgtgtgtgtgtgtgtgtgtgtgtgtgtggtctgtgtgtctccaactctggagagcaaatgaacaagtttgtccaggacaagtagactctgaatatcctctcatcccactggctcaggagttttctacttatatttctgttgttggtaatgttagcaggatatgagcacatttgtcctgtcttataatccccatgtttaaaaatgtttaatgccctaagtctttgaatgctcttgtctcagttttagttcttaatcaagcagaaagctaggactgtgcttaaagggaggatggaggtagggtgggggacagacactcacttggaatgcaggtcatttaacttgttccatgctagcaccctccccctcctcacagtgtgtaaaatgcttgttttctttgagaagagagtagcaagtcctatggctagagtcagaaaacatgtcttggacagccttcctggttttttgttgttgttgttttttcctcccagttgaacttgaatctgagccttgatgatttagagtcctaggatttcagagttgggtgggagatggctcatgggagagattgcaccttgatcccaaaccccttagctgccaggaagagtgtcagaaaaattatgaaatcatactaattcagtatgggttggtagagtctcattcttcctcaggtagttactggaaaaacaggagtgcagagaaccaaggcttcccatagctcagacatgcccttgggccagagggaatggcctcaaaagtcctttgtcaaaggatattatgttagttcaataacagtataaatatcagtaagaaagtgacaagcataaggtttagcatgaaattggagcctcattgtgtaacttaggaaagtaagggcacacagtgaagtttaaaaaaaatattcaaaggcccagtagcgtgtgggcaggaagactggctgctgctgggtgcccacaggatctaggcccttgcacattgcctataaagatgacttggaattcatcctctttttcaaagaggcagaggcttcaacattttggaggggtcacagtggtggtcctggctcccgccgtgtgggagagaatacattttacctacccttcaaagaatgagttagagcctggggtgccaatgctggccaaatacaagttcctgagacagagaaatcaggcggatgctgaggatctcacctcgaaccatttgcccaacagtggagggtttccacagcccttccccttctccatgccctggatgtgcccggaggtgctgtaggcagtattggttgcttgggctgatgacttatatgtcttaaagtctccaagtcattttttatggggacacataaaaattcctgctcaacagctgccctatgttcattgatttgtttgtttgtttgtttccctaagagatgccagtttggcaacacccaaggctgcctctcccctgattcagatcttggagactttcatccaaaaccatacaaagccccagggcagttttttttgtgtttccctgcatttagtgtaattaggtggataaacttgcaaagccacctgatttgaataaagtccattattcctcctgaaggagctcaggatgggatcaataccaatgggatccaactctccagcctcctctcccactggaatacctcaaggaagaatgtaaatgaatagaaggaacagagcaaaggggatgaggatagaatttaagaagtcgttgtgcttgctacgttggtggccagatagggccactttggaacatcatgtaaaccacttaataacctcccaccacagtatctagagcagggctgggccatgcagtttcttctcacatatttttactttaagcagaatacttaatatctattggcacggctctgatgttattcatcagacctaactctgaaatcctaggactctaaatcatcaaggctcaggttcaagttcaacggggaggagaaaaaacaacaacaaaaaaccaggaaggctgtccaagacatgttttctgactctagccatagaacttgctactctcttctcaaagaaaacaagcattttacacactgtgaggagggggagggtgctaatcattacgcagaagtgtttcaatgcacacaccactcacatttagatttactttcttttgctgcatctttatacctacgataaacctggtttaatattccattaaaatttttttttaaaccactgtaactttgtttaatttggttgctgaaaaaagttctactttggtataatcttgtgtttgtaaccgagatcgcttttaagaaggcacattcttatcagagataatttggaaaagctgcaggttgttcactgtttggtactatagtaatgattatcttgaacttacagtttagggtcctacttgtttcacttagcatgcatcctaagtattgtctatattgttacataatcatgtggttttcatggttgcatcatagtccattacaaggaaatgtcacagcttggttatctattcttctgtactgatcattttcagtttttcaatatttatcaataactttgagcagaaaatcttctagatttcccttacattttatattattttcttaagatggactttccaaggtctcttataaagacaatgaatgtattttaggccaaggcttctccaagtgcagtgtgtgcacagatcgctggtggatgttgtgaaatacagattctaactcagcaggtgtgggttggacctgaggatctgcatttgtcacaaatgcctgcatgatgcccagaccgtggctcagggctttgggcagtctcttaaagttgctggtgtattggcattgagagtatttataatactcgttttgccaagtcactgtgtgggctggttacctaggagctccatcccctcagaagtactttctaatcaagaagaaagtttggattagactggtgtccagagggatggggagctgtaacacctgccttcaataaaagcctctaagcttagttgtggccaccattagaatcatctggggagtacacacacacacacacacacacacacacacacacacacactctctctctctctctctctctctctctctctctctctctctctctctctctctcagctccctccagaccactacaaacagaatggctggcaatggaacctgggtatcagtattttttaaagcttcccaggtattagaggtgactctgtatagccagggttgaggaccattgttgtaagcgcttcccaacttaaatctcactgagctcccaactatgttttatacctgcttggatgtaaagcttggggcttatacatgctacactcagacctctacactttcgacaatggatttagcacagccatgagttgtctttgcaattcagaaaaaacaataaccattatttcggacagaaaacaaggtatttgtcatcgctgacttctccatcaaactcactcttttgtagcatttgctggtcccatcttactgaatgccaccattgtacactcagtctcccaagccaaaaacctggggctgatcctagcccctttactttcccatgcccttcagatctaagcagttctcacagtcctttgctctgtatgtacttgtttcttatagaatgtatcacattatattaaaattatctcttagcatggtatgtccttcaactagaccatgagcctcttgactccagagatagtatctgatgcatctttttattccccacatctagtgcagtgcctgtctagcacagagtggagactcctgaagtaactattgaatgaatggatgaaataaaataggttttgatcacatataaccctggaagattattcttatggttgaaagtttcatagcagcatggtgctagcaggagcacagattgcctagatagtgcctggtgccaacatggccttggccttgggggtgtgcaagacggcagacggaatgcccagcacgcactgagtccctgccactcaccacctgctagagtaacacctgctgtttctgtttggcagttgccttttcgggccttggcttcacgacgttctacttggcgggcaagctgcactgcttcaccgagagtgggcggggaaagagctggcggctctgtgctgccatcctgcccttgtactgcgccatgatgattgccctgtcccgcatgtgcgactacaagcatcactggcaaggtgagtccctgcccagggcctgactagtcctcactgtggttgcccctctcctccagggatgggtgtagaaatgcaccaattgtggggagctaagtgcccattgtccaaaaccagaggaggctgaaatgacagagcggataaaattttgaagcaaatatgctggttcaagtgaggtctggccttcctggggaaagaattggagctcttcttcctccttcatgctccaggagactgcttgagtcctgccagaatgtcaggccctttggtttagtgtcacccttggcctgagacccaaatgtgattttcctgctggatcacttgcctcagtcctcagagttggtgccaagtggtttttggcttcctttgcttatcaaatccagcctacaaggacgtatttgtcaccatggatgctcttccgaaaggtatatctagccagggattcattccagtaatgctccaagcagcagctgcaagcctggggtgaggtttgcctatatatatacatatatcagtcctggggtatttgttaaaaatcaaaataacacaaaacaagggaggggcttgttcctgaaatataactaaaccatgccatgtccttctgcagacaaactgcagctcacagtctgtctgaaagacaaccaccacctgccagagcacacagagagctgagacggaggtgatgtccatgggaggtgtggcctccaggaagcatggggtctagggaagggtttcccaagggcaatccttggatcaccttgatcaagctgccctgagctagaaattggactctctaggggtgcatctggagcagtggcctagaatcttcctggataataagcaagcctgtcattgctgatgaagtctaagaaacactggtaaagagctccaccatatgtgtcaattttaaccaaacaaaggaaagaaagtgtgcctgaatccagcttctttgaatgaatgggcttccatgataggtctgtgacccaaacctcctctccctttcttgttttccgactgttgctgggcattgttcacctccttcctctctctgtctttgcagccagctgccttgcaggactgccctcttcctaccttttccgggggtttgttgcagtggtaatgaggcaatggatggggacagggttgaggggaactcctagctgagagcccctccttcctcatcttctctggagaccttgtgctccttctagcactacacagcttctcctgttccttcctggtctcatccctaccccgtatcctcctggagctcatgctctgggtgtcctgtgaccccagcaggagctttgggctggaggatgaagggtatagggaaagagatgctgacatggtttggacaggtggatgcagcaagcatcaagtgctactaaggtctgaggccctcctgatgggggaggtcagaagagggtcacaggtctgaacctgcccttgttctgtttttatcaatgacttggatgaaattctggatgataagaagccgcatcatgagatggaaggatggacagagtcactgggccaacaaaaacagaggcacagccccccattggaactgggaatatgttcccgcagaattgtttcccacctatgtgagttagggcatttccccatgaagaatattacgggccaaatggccttttatggactgcttctcattgatcccttgtgagccagtttcctctttgagcacaggaactatccctaatatttcacagagcttttcatagattgaatgaaataatggatccaaatgttctttgtaaatggaaatttactacacacatgcaaagtggtatcattgttgcttagtacattttttctaaggaaggatgcattgtgtttcccaaacaactgacttggagacagactttttttttggaacatgatttatttgtaagctatgaatgccaggttttcacttttattcaaccactttggattcggggaatgattgggggtttcagaattgaatcaatttttcctttatcttggagtcaataagagcctttgcatagtactaacaacctaggatgtgaggctggcctgtcttcagcactctctggccctaccctgttttgttcctcatttcctagctgtggtagtgtaacatggccagagtaaaggaatgtggaatcacagctcttgtctttagggaatggtgaatttatgctgcagctggtgtacccaaggcctgttggcaactggggctttgaaaccgtactatccaacaggcacagaaaggaactatgagcagtcaagggagaatattcatcctgtgtgggctgttgggaaagcaaagcaagagaatttatgttcagtgatggttagaaccatatttgggaatcaaacaaaaactgcgtcatggtagacttctgcagcccaaactgaatgtgcatctcttggtacaggttattgatatagcctaaggaccagttcagctctgccattatgtgttcaacttatacccttggagtcagccaggagaggaacacaacttcccttggatgctctaaagggctctgagtcaggctcattttacctgagttccccttcatgaggctatctgccgctgtccacaccagttgttttcaatctctcaggggacatttagcaatgtctctagacatcttcttggttgtcacaactttgaggggtaggtgctactactgccatccaatgggtggagggttagagactagggatgctactaaatgtcctacaatcacaagacccctcgcccactaacaaggagttatgcagccccaaatgtcaatactgcccaggttgagaacccctgttctacatcataccccagctccatatttcttttccatgttacacgttaagaagcagcaatgttctgggagtgggaagttttgttcattcaatactcaattattaagggagaaatcaaggagacctcaaaggtttcccactgggaggagggatgcagagtgaggtcttcaactgcagtgtaggtggatgtttcaggcaggatgcctgattaagataaataacttgttttcctttggtgaactgagctgcccagtgactgtgggcgggggccatccatcatggtgagaattcacatggagccccattagcatcagcaaaactcaagtccccctcattatagactttagttaacagcattcatgttgtgagattttatgactccatttcaattttgatttaagcaactgtgcctaatgtggaaatacatccaattactcgattacacattcatatccaataaatagtctataatctctaatgactctctctctccattatcatggttattttctgctattgacactccctggtcttttctgcctccccagcccactccaaatatacaaatctattgttttattaagtgacgaaaatacagaggcacaggccatggcatagggaaggagacatgaaacatttagcagaacttccccagacacaaaaccggtgggatcaatactaaatctctgtgtggctgatgtggcctgtgtccttgtgacattctggcttgcaggtcaactggaagctggagagtttcacagatgatgctaactacaaagcccagtgccctctcaaacaggcttatctttgtgattaacaatgtgtttagcagcgctcaaacttgtggaatccccatactagagaaaataaatgcagagaaagagcagagcatgtcattaaactgactcctgcctctattcacgctcttatgtgattacgatttcttgtcaatggagggttacaactactagtggcaggaatgtggtgtttgctccatcactggacttaataatgagctcccctgacccctcaagtccctgcacctgaaaccagcctctcctcttgtgactttaggtttggaggtaacattttaaacacttgttcctctaatcataggtcattttaagcagccctgggtgcctgcgtggtgtttcattataagaaagaacatccccctctggatgtaatctagggaaacaggtctcaaagaatgaaacattcatttgttcccacccagactaaggttggaaagcgtctcggtcattcacagacacagttgtctaaccgggctgaagttttcaagatggccattattgcgttcgcctgctttcccagactgggctgtgaagggtctgtgatttgaaatgaactaaatatagttaccaagcttcaggagattactgaccctgcaaatgcaggtgttttggtagttggatattgtgctggactatttcatgtgccacaaaatacttctggcctcaagaagcccaggcagaagctattccctttggagaaacccttttttcaaagcctgatggcattctacaactcacaggactctcttgagttctccttccttttgttactgataaacccagtagtcccaaagatgggatccttccctgttccatgtgacagagccattacatgaaatcaaaagtgagcatcaagcagagtaagctttattccatggccaaagaatggagaagttggggccgggcgcggtggctcatgcctgtaatcccagcactttgggaggccgaggcgggcagatcacgaggtcaggagatagagaccatcctggctaacatggtgaaaccccgtctctactaaaaaaaaaaaaaaaaatacaaaaaaattagccagacttggtgatgggcacctgtagtcccagctactcgggaggctgaggcaggagaatggcgtgaacctgggaggcagagcttgcagcgagccgagatcatgccactgcactccagcctgcgcgacagagcgagactctcaaaaaaaaaaaaaaaaaaaaaaaaggaaagaaagaatggagaagtgggaacacagctctcagatgaacttctcagctagtgagcagtgaagggattaaaatatagggtttctctaatgaagaggtcaggtagtaaaatctaggggaggaataatcggatctttttctggaaatggatggtgaactcctgggaaccagagtgctgccttccttttatggcttcttccaattgttgtcatggcaattgtcaactgtcatggtgctagtgagagtgtcatttagcatggaaattagatgataatgaagcctgaggtcttcttgaagttgttctgtcagctgtcttggttttaaccagtttcaggtagtccagttacaaagggaactttttaccacaggggtctcatttcttaaagataaacagggaggggtgtaaatccagctatgtcatgtaagccttacgctgagtaacaccttccccttccctcccctctgtctctgtctccatctctctgtctgcctctgtctcttacacacacacacacacacacacacacacacacacacacggctgagggacatacactgttataagcaggcctcccttgtgctgtcagaagcaatctgtagattttctaaatgaagtgacttgaaaaagatcccttggaacaatatgattgtttctgccaaaaacctgccagccctgggtagaacaaaaacactgaaattctccctctaatatcctcagcccaagtgaattgatgtcacctcattttccctccacagttggctgctgtgtatggcagggcccacagtcacatttaccatcggctgccaacccccgcctctgtctgggaacctctgaaccttgactgcccatctaagtccacccgcctctgtgttggtgcctaggagagcgtaagaagcctcagcccctggctcacccctccctccggtcaaagtccactgcatatcctgctttcagcctcaagagaggcattctcagtcaggacttctgccctcttcctgcctccaggatagccctggtgtttccccgtgatgtaattcccagggaagatggacgttgattgctcccaagtctcactggcatccttcctttgttttactcaagggaacctgtctcttctcagctttctgtggtgttctgtggttcctcctgctcagcatatttatagactccaacttttccttcccactctggtctagtgatcctcagttgttgcctgaatcattgcagaagcctctcagcctggctccctccttccttctttggccctcaactgcatttggaatgtgcctttagagcctgcgttagcacatgtcacttttgcaaaaatcctccagtgattctcatttcactcagcatcacagcctgtgtcctgccatggtccataagatctgctccctccgtacttctttgatgctatgttcaagctacttgtcctcctcgttcacatgattgcatcgcttgagcttcttgctactccttgaacaggcccgtcccatcccacctcagagcctttccacaggctccaccttgtgcctggaatgctcttcttcagatgtgggcgtggcttgttctcctctccctcctaaactgggctcaagtgtcaccttctccgtctcgtgatgcccactccacttgaattgcagccccttccccacatgccatgtccctctccccttgcgcatttaccaccttctgacaaatgaagtcatttattatgtattgattattatctgtctctaaccaccagaacaggggttggcaaactttgtaaagggtcagatatcaatatcttaggctgtatgtggccatgagatctttgttgcacctattcagtttggccgtagtgcacagaagtggctatagacaatatgtaaaggaacgtgttcacttagtttgctggcgtctgcactagaatataatatccacgtgagcagggatttaggtctctgttgttggcatggcacatagtaggtacttgtatcagggtcctacggctgccatagcaaagtaccaaaaactgggtggcttagaacaacagaaagatattgtctcaccgttctggaggctggaagtctgaaatcaaagtgttggcaaagccaccctctctctgaaatcagtaaggggaggatccttctctgcctcttccagcttctagtagccccagatgtgcctttgctgatggcagcataattccagtctctgcctctctcttcccatggtgttttctctgtgtgtcctcacatcagcttccctctttgggtgtctgtctctgtgtccaaatttcccctctttataaggacaccagtcatattgcattagggcccaccctgattatcatattttaacttgattactcctgtaaaaccctatttctaaataaggtcacattctgaggtcctagggactaggacttcagcatatctttcaaaaggacacaattaaatttataacagtcttcaatacatatgtgctgaataaataaatgagtttgacttaatcatgttcctttcttactaatatcattttttctttgggctggttttactagtaacttattctctacaagttctttccttttaaaaataaacaaaaggttatactgtaaatattccctccctccctccctcccttcctccctccctccctccctccctccctcccttccttccttccttccttctctcctttcttcttgtcattgtgtctgtgtacccggcgtgttctccactgggctcagtactgagtaagatggacatagctgctgtcctctcagcttatactgtaccagggctattttgcatacttcctgctaggtaagctcttttgtagaaactcaaagtcacagaaacatgaagcttcacaagtagcagaatcactggaaagaataaaaagaacaacaaaaaaatcacatgcacttgttgagtttgccagagctgacttttgccctagtaccttgggtcatggagcccaaggcatacaaggtcccaagtcaagctagcttagtgatgttggaggctgccttggtgacagaagggatgatcttctggaggacctgacagcacatcttcagaagcctttctgcttgtttgtgccacaacagatgagggcagcctggcacctcagtatggcagaactcataaggtccttcctgtcctttgacctcatggcaagagggcagggttttgccaatgttataggtaaggattcagatccaggctgcctgattgaaagtcactctttccactaccattggagtttatctggctcatctggtgtcaattctctcctctctttttaaagaacagctttctttataattctcaattataaaattctcccttttaaagtacagaaacatttttatatatccagagttgtgcaaccattaccactatctaattctagaacattttcatcaccccaaagaaacccttatctctcagcaatcgcttctcatttctctgtgcctcaggctctggcaaccactgatctactttttatctctatgggtttgcctattctgcacattgcatataaatagaaccatacaatgtgtggccatttgtggctggtgatgttgattctttagtgcctcttgtagatgttgttcagctcatgtcagttccccatttactgaataaaagtcggctgagctctgggaaataaataggaatgaaacatcccagagtcctaggtaatgacatgtagttggggagatagattcagaaacaggaaacaccactggtggtaggtgtgaggccacagagtgcatagatggcaggccagagagagagcaggtcccctggtccatgctgagggctccacagagccacaaagggacatggaaaacattctgctccagcccataccagatgactggtcaatttgtgtcctgtagtcttacaaagacactacccctttcttaaaagatgggtctatcttcagtttctcagatttaccaagcctcctttgtcatcagcaccttctcacatacccttctctctgcctggaaaaccaccagtgccctcttttcctctacttctcaacctctcccggttaactcttgctcatccttcaggtcttagcctgagggtcatgtcctcagcaaaacctctgctccagaatagcccagatctctgtgctgggcgagctcacagaccctcacacgtttccttcatggtgcttaccatagctgcaaattgctgatacggctgtcattgtttagtgtctgtcttgcccctttgctggaaactctgggacagcagggacatgtcccattcgttcagcctgtgtcctaggcttggccatcatgcccgacccctgatacgtatgcagtgcatgtgtatgaatgaatggcatcagtgctacgtaaggagacagaagtattttgtattccaaagacactgagatccatttatttcccttttgagacttctagttgatttggggcaaagttaatcccaagtgtttttcccccaataagggctttcttgtcccctgcttgcctgtctatcaagaggatacaaatgtgattttatcaaaatagcaatagcccacttgaggcaattgatgacaagctccttcataaagtaagttattgtttggatcttgttcgccacctttgtaataaacacagccccaaaatgactttgctgagaagcagcttggatagacctttcattgcccttgttacttctcatagactcccatagcacctgtgatatcacttttcactcattccattaaatgggaaacagaattggcaggaattgtcatttccatgcatgctgctatgtcagtaaatctgggaaacattcttggaatggtttgatgtcttttggtcaatgatccacctaatgaaatgctgcttcagaaaatagaatgttgaatggtgttatttgtaggttttgctctttggtctgtttagtcagtggctcaactgcagatgttgtggatcgttttagatgctaatagaaatacctcatgggactgtttcctggggttagaggaaaaacaaaacaatagtgcaactctaagaccttgaactagtaaaaggcctgacacattttataggctggtggccataagctagtgaagagattcttcatttaagcaacttcatttaatcacgttaattacaccctgtggccctgctccagaattcacggtacatattgctttacaatttcttgggtgacaaacgtgtttttaagttccttagaagtttatttacgatgctatgaaaatgtagccatgccagagaggtgagatctgtaagcttctgagttgctgtgtgaggagaaggatggggcagaatgagaaagcctccggcagctctgaagtggaatgtgagaggaatggcaaaaggataacaaggatggatactatttttatgtcctattttggcatgctccatgaaataatcattagaagtaatatattattaaattatcatcacaacttaatgaggcggatactgagatccacatttgagagagaaggaaactcagagaggcaaagcaacttgccctggtagggcctgcaatgtcttagccttaggatttctcagcgtggaagattcttggatcgggggtgaggataagtggtggttaccttactgcagccccaggagcctccaaatggccaacagttcttctcttgggaatggatctgctgcctccttttcttcttcattcttgggaatgcctcttgctttccctgctgtcctccaatccccccgctaccctgatggctgctcaccaagtctgagcagacacgaacctgtattccttgcctttctcccagacagctactgctcagtcacactgtattcatcagttgttgaagtttgaactcgtatggggagaaagcagtgacaattatttggtctctcccattgactagttagaatgacttttgtttctaactgatattttatctgaaccaaagagaagatatgacctatttttttctcttttctttttctttttttcttttttttttttttaaagagatggagacttgctctgttgcctgggctggagcgcagtggtacgatcttggctcactgcaacctccacctcccgggttcaagcaattctccttcctcagcctccagagtagctgagattaaggcacatgccaacacacctggctattttttttttttttttgtagttttagtagagacagggtttcaccgtgttgcccaggctggtctcaaactcctgagctcagtcagttcgccctccttggtctcacaaagtgctaggggatatgacctattttctaaatgcaccttggtagagtctccaaataatctcaatgtgtggcctcagtaggctgactcaggatcacattcctggaacacttacataacaaggcctcttagccaccttgtacttgtggttccatgctaatatgttactgatgaggtcatcaggaggaccagaatgggaaaggggcatgcccaaaaacacacaggacagcaacccgacctaaccctgagttactatgtatccatttccctcaacaaacataattatgctgtgagcaagatgttggccaaggtgctgaaggaatcaacagccaaccctaatagagttttgagtccagcattaaacattaaacaatcgcacaatttgtcattgttcgccactctaattgcacagggagtggggagggactattaacatgtgtaactgggagacttggtctagtctggaggtcagatgaggctatgttgcacaatgatgttgagctctgaaatatgaatagaaatgacattgagctcagaaatatgaatagaaatgacattgagctctgaaatatgaatagaaatgacattgagccctgaaatatgactagaaatgatatcgagccctgaaatattaatagaaattgattaggggaaggcatgaggagaagggattcctgggaatccaggatcggaacagcacatgtggagccccaagaggagaagcagcacatgtatttgaggaactaaagggaagaccatggcttcggtaggaggagtgaaggggaaatggctgggatggttggcagggccagggatgcagccttgaatgacacaggggcttggctgttctgttacagcagtgggaaggagtcagccaagcaggagaatggctgcgcctatttgctcttgagagaacatcaccagctgctgtgtcccaagtccagttccagagcagcgtactgggcccctggtctacatgcactgaaacttatgctgccatcacggacatgtctaaaataaaagagcttttcttttatttgtacttcttttcctgctttgctattgtggattaataaaattacatgcatgaaattactaaatttgttttaaagaagataaagctattcattatagaacttttcatgtttaactattagcttcatagaaactgaaagtagaagcaattctatgaaagatactgaaatatgaaaatattgtccccgtcctcaaaaattatcccgttagatctagatagaaccaggatacctataacaggatcacaaaaagactgataggtgcaatgcacgtttctaagcattgagcagcttgttttcttgaaagatacatttctttaatgaccactcaaaatgtcacctacaggagatgcagggacattagtttgtgacttaaactgaagtctttatatagtgcgttgcttactgggaagcgttgggaaacttgccaccctgagcactgatccttcaggaaaaccattgcctcctacctgaatgcagatggacatacccttcagcccgtggggcctgctgcatcctgaaggctgggacctcagacagtcatgtggttatcaagcctggaatgaacccgccagggtgtggacacagcatcacggaccagtgcaactgcaggatcaggactccagggttcaagcccaattcttttggggaaaatggggctgatcctgcctgcctatgggaagtctgtacggttcaacaagagtttcaaatttttttgttaggggagattttccactggactagaatcttttcagcaaaaataacccatagacagttaaagtgaacacacacacagatactaagcgagagttgtttatgtgagctgcttttatgaggtctctattgagaactacctgaatgttctctttggcagggggctgcccttggggcggagggctggtattccctgcagatgcacccccctgcctcacctgctcccctcttgcctcccagctggtaagatctgtatctgttagagaattgagtccttcccgccagaggtctgctgagtttgccaacacaggcatatcttaaaatgttttattcactttgtctgtgactcagaaggttcatttcatccctgggaaaccacttaccatgaggcagagaccctggcatctgctggcttttctgcagcacaccagcaatactacaggactctgatgggaacttactaaagaaaaaaaaaattacagctcccaagatatttagatcctacagagatggcttgaattcttcttccagaatttagaattgatttcaaaaatcagaaatacaaatctgagtttatgcaatgctcaggtgtgagttaaagaaatacagggaagggctgggtgtggaggctcatgcctgtaatcccagcgctttgggaggccgaggtgtgcagatcacatgaggtcaggagttcgagaccagcctggccaacagggtgaaaccctgcctctactaaaaatacaaaaattagctgagagtggtggcatgtgcctgtaatcccagctacttgggaggctgaggcaggagaatcacttgaaccagggaggcagaggctgcagtgaggcgagattgcagcactgcactccagcctgggcaacagagcaagattccatcaaaaacaacaacaacaacccaaaacaaaacaaaaaaccgggaagaaagaatcaagtactcatttttaagtatttcagtaccagaaatgctggcagtttgcagaggccaccactgtggtttctttcctttagtctttcagggggtcctgtaagcaaaccaggtcctagaacaggaaggaaaagtgctttctggaaaatataattggccacatttgaacaaatggtaacccatttttcctgctctgctgtttcctgcctagattcctttgtgggtggagtcatcggcctcatttttgcatacatttgctacagacagcactatcctcctctggccaacacagcttgccataaaccctacgttagtctgcgagtcccagcctcactgaagaaagaggagaggcccacagctgacagcgcacccagcttgcctctggaggggatcaccgaaggcccggtatgaccagtgtcctgggaggatggacactaagccctgggcacatctgccaccctgacatcataacacaatagaaatggttttctgtagtgtatttttcatcagttgtttctcaaagtcatcgtacttctgcttctgtttcactgatggtgttcctgctactttaaatgtctacttccaacatccttgaatttgcaagtgaaggacaacaatctctgagagacgtgtggaagaggctgtgaaggtggggtttggggagcttggccgattcgtctatctgaaatgtttgctgtaacagccaccttcctatgttttcatggttgtaaaacataataaaacctcccacgtggaagacttgg

SEQ ID NO: 74 - DNA, 40663 bp, Homo sapiens
gcccgcgccgccaccgcctcttccctccccgtgtccggtccccgtgcgtcccgaggctccccgccgcccgtcccggcgcgcaccgcgggcgtctgtccgaacgccttccagccacctgagccctcctgcgggcgactcgctcagctagcccgtgcccgcctccaccttctccgtcatcccctcttccttgcgtccggctctccactggggctgcacagtcgagggctgctcgcgtcgggaaggagatgcccagagtctctggggcgcaccctcccgtcccgctcagccgcacccagctttagaaggtgctctcagcagccactttcgggctctagcgaggacaccctctcgcagaagtccttgccgagaccccccgccccagccattctctgaaggggctgaggacactcttatcgcgcccctcatggccaagcctcggctgctagttctctacttcgctctgattgtggttccggcctgggtgtccagcattgtcctcacagggacaagcgagcccccagatgcgcagacagtggcgcctgcggaggacgagactctgcaaaacgaggcggacaaccaggagaacgttttatctcaggtaggatgcagagtgccacgaccgcccttcttgccctggatggtggtgagagccagaagctggtccttgctgaagtgtttgagggcagctgtttttccttccattaccaatggaaagggcttttgatttttcatgtatcggaatattttcttaatggaaggatataggttctcctcgcaaaatcatagggtgcttaaaggtcatcaaatcaggagaaaggagaggtgaaggaagggaagatgccgctcgacttcttgagaagaaagaaaacaaagttgtttttggtttcagggttgtaaaaagtatctcttgtctatgtggctgtctgtcagaattggaatgtgaaaacagccggatatgttgaccaggaggcagatggcatatcccatcgggagatactttatggcagagggtgggacaccaggcgggagcatggggtgaagtcagaacagaagcatgtgtgatgaatgtgaggtgacccccaaacagagagactgagaacatgacggagtgtactgggaggggagagtgggaatgcagatgcaggcagctagggcagactgtcagtgggggcccgagtaacccatgatagtgatgggcttcgtaaagtgtccgtttaccaagtacttaaacttgttttttctgactcaatcttcaaaacaccctaatacccatttatagataaagaccataagagatacatgggtaggccgggcgcggtggctcacgcctgtaatcccagcactttgggaggccgaggcgggcagatcacgaggtcaggagttcaagagcagcctggccaatatgatgaaaccccatctctactaaaaataccaaaattagccaggcgtggtggcaggcacctgtagtcccagctactcaggaggctgaggcaggagaatcgcttgaacccgggaggtggaggttgcagtaagcggagatcgcgccactgcactccatcctgagtgacagagtgagactccgtctcaaaaaaaaaaaaaaaaaaaaaaaagaagagatacatgggtagagccagggcgtctgacagtcttcagcccagatctcatgtctgtaaggggtagttctctctggagtgtttattttgtgctctccagagccggcatgatgacgtgtggtgggtgtcaccagaatcctcagaatgggggatgtctgaaaaaggatcctccagggctgcctgtaccttcacctccaccaagccctaggactgggccttgtctccttcctgtagagagaataatcagctgcactttgggatttatcaaacactagcctcctcactcttcctttaataatgatgctaatgtatgccctctgcccccccattacctcccactgacccctaaatcgaaaagacataaaaatctctcacactggggctctggaacactatcaacaaaaactttcctgaaacccgagcctcctgtaaggaaggaatccacccagggttctcagagcagggttatgtaggaatccaggcagagtttcagagagcagacagccacaatttactatcagcccgtaaagaacagccgcttaagtcacccttaactacaccaccttcttccactgatccattctgtgtttgacaacagccctaaagcaaatattagtattagaagaaacccaatctttgcaaggaaaacattacaagtcttcttcccccagacagcatcccaaggaacatttctactcaaacaagctcaatgcttgcccactgaaatcattaatcaaatgaagggaacccttctgcctgcctaggaagggagccctggctttggggatgtagggccttttggagaggattgggagagaagagccttttcccagcaagcgcccagagttggggctccagaaagcctactgtcgcgtgttttcctgcctggggaggctggcaggggcaagtgcccagaaggaaatgtttagcattgcaaaagcagcaagtgctgccagtttgctttcctgggtttggcctggggtttaggttcagaagcatgaactcttagactgagtaaaccttactaacttctggacctgcctctttcctctcaattccctttctccacatctaacccatccttcaaggcccagattaaatgccactcctcgaagaagtcttccctggcttccagttggagccgctcttagctcccactgccctttccctctgcctcttcgggggcacttatcactctgtactctgtgtgactgctatttctatgcctcctgcactgtaggcttcttgagagcaggctctccatctggcccatctctttatccttcacagcacctcacagtccttagtaggcactccataaatgttgaataaatgaatgagagatgccagtagtcttcaaacttgaataccaacttttcaatctctccaatttcttcttttcctttttacacttaaacctggattctgattgggtgcggtgtctcacgcctgtaatcccagcactttgggaggccggggcaggtggatcacttagggtcaggagttcaagaccagcctggcaaacatggtgaaactgaaaatacaaaattagctgggcatggtagcatgtgcctataatcccagctacttggaaggctgaggcaggagaatcacttgaacctgggaggtggaggttgcagtgagctgagatcatgccactgcactccagtctgggcaacagagtgagactctgtctcaaaaaaaaaaaagaaaaagaaagaaagaaaagaaagcctaaacctggattgtagcagaaggcaaaggctattggacaaatgacttggctcatctggtttttcctttaaataatgaaaggctaaggccccatgagaaaggcacagctttccaagacaaacgaagagagctgaactctgaatgccttcaaggaaatgtcagagtcagcaaactgcatctcagtgacctattggctctgtggttcagagttttctgaggtctctgactagtgcaggacatttgactaagtaaatggagagcctccttctggaggctgactgacacctgtgtttgcatgcccctaacccgttttctgtgtgtctagttgctgggggactatgacaaggtcaaggctatgtctgagggctcggactgtcagtgcaagtgtgtggtgagacccctgggccgggatgcctgccagaggatcaatgcgggggcctccaggaaggaagacttctataccgtggaaaccatcacctcaggctcgtcgtgcaagtgtgcctgtgtagcacccccatcggccctcaatccctgcgagggagacttcaggctccagaagctgcgggaggcagacagccaggacttgaaggtaggacctggtatggggcaatgccttggacgagagggcacttttgagatccacaagtctggtaaggccatggttgaagattctaagccctttgaagaaggtcaggcctgttccctagagtgctgtgtgtggatcaaggttgatgtcctagcaaacttgtccttttcagctctggtgtataagggagatgcttaaagcaaagtgtgcctacccctccttatggagccagagaggctgggcctgggagcagctgccaggcccagctggccaaaagaactcagcgttcttcaagaaaattgctgccacaatttactatcagcctagcacacaccccaaagaggcaaaagaaaaatgcgagtaaggctttggcccttagcacaagggctgggttggcctagggaaggagaggccgggggcctgctctagattgggtcatcaaactgtgatcctataatggtccttagggtagggaagctcaggccccacttaggcagccccatgggttggctgagggcttctgatcctgcaccccctcttcccttgcagcgtggggtagtggaacaagctgggttttggagtcagacagacttgggttcaaatcatagcagtgtgatcccacttaagttatttaacttgtctgccttccagctccttgaataacatgtggtaataataacatctacttggtggagtaatgagataacaactaggaggtacttggcacgataccagacattcagctaggcatgaccatgtaaatgaatgaatggatgactatgtaaagcgctgctggcatctggcactcactcagtgactagtaatcattagtgtctctttcagcagagtagtgtttaccaatatcaggagtatctcaggatttggccagagccgcagctctgccatggaacaactttctgaaccaagtgccacactcactcagttgtaggattagactctgggggaattctggaacactataaggcaaaatgtctattagaaatcaggaaattatcacagtacatactaagagccagctatctttttatggcttctatccaggattcagctctcttcctctggtagggagaaaggagtttaccttctaaacatgagtatttcatacttggacttcttcatgtagaagctaggctctgagataaatggggagtgtagattgcaaaagtgtggcccagtaaacttccaagaactggccctcatcatcttccctcttaccctgcagtctgcatgccctcagtgccgccagagcctcggccaccttcctgccagggcctctgtactggcaggcaggatggtattgataaaaactgagaaggctgggtgcactgtggcagcttgccatagagcaagagtctcaaagatgggacgctgagtcctcttttagcccagggtcagtttagcactttgtgctaaggagaacctgtcgatgtctttcagagcctttagtagacaatgaaattgagtgtttcagaagcacatcctcagggtattgacatgtagagccaccttgttgagtatttatagaataaaaatacctgttatgagccagctatcttggggaaacagagatgaaggatacagagacactgcttgcttgttttctttttttaacttgtattttaggttcaggggtacatgtgcaggtttgttatagaggtaaactcacgtcatgggagtttgttgtacagattattttgtcacccagctactaagcctagtacctaatagttattttttctgctcctctccctcttcctaccctccaccatcaggcagcccttagcatctgttattcccttctttgtgtctttgagttctcattgtttagctcccacctataagtgagaacatgtggtatttggttttctgttcctgtgttagtttgctaaggataatggcctccagctccatccatgttcccataaaagacatgatctcatttttttcatggctgcatagtattccatggtatatacatactgcattttctttacccagcctgtcattgatgtgcatttaggctgattccatgtctttgctattgagacactactttcaaggagctcacagtctagtaggaaagacagatgtcaatgcaactgacagatttcataaaagaggtataaacagtttgtgaagaggtctagacctcaggtttacttgttcttgtaggactctcccattttcttacccaaacatttcggaaggcagaatgcacatacaccattgtgcttgcctacatccctgtctacacaaatgtgtttctcacggcaacctctcaattcctggctagtggctttcctgtcgagcccccagtatgcagatctgaaaggaaactctgccctgtgtctgtgtgccccagccctggactaaccccttgccttgtttcatagctctccacaatcatagacatgttggaaggagcgttctatggcctggatctcctgaagctacattcagtcaccaccaaactggtggggcgagtggataaactggaggaggtaaggaagattctggtttctatatctttttcttgattgagcccaaaagcatatcaaacgtcccacagtaaattttcagctagcacatgtgctgactagacttaacccatcctattctatgaaagggaaaatatacataaaagattcattcaaaattatgccaaattgttggtgacaaagaaaatcagttaagtagaaatgccaatactgtaccttctttttttcataaaatccccttaatcatataaccaatgtctttccatttttaccttgacttccagggacctcagaactcaatgaaatgtaaaggtacaataagcatcttacctccagttttaaggtggagtcatctccttcctttgtatatggttcctaatttctcttaactgttctggtgcatacccctgtatttatgtgtgtgaatccatctgaaattcattttagaggaagaagacataaaaatgattactaataagtaatgttccctactcagcattcaggctggtcatgcccagaatgaatggacgagtcatgcaattttcatagacaaagacaccatactattctgactgggctctgggagtggtacaggtggtgctgtggttttcatctagtggtgtgtgaagggagctgggagttgttacagatactgtaataatgttgacagtgcttgttgctgtgatgccttaacatatagatgagaaatcatgtagtcacccaaaaagtaactaacgatcattattcaatcttattggtaaggaactttatggatatgtttcattgactcgcacctggttcttggactgataacttgaaacagtgactcaaagagctgctgctctgagtggaaatctatttctttaatgtttacagcattactgtaagtggcaaatttaataacacaatgactgtaaacatatcaatattccttatgaaaaagtggacttttggggggctatcatgaaagagctaaggttcttcgatctatgattagtagatgtagcggtttgtggcagaaagagcagcaggcttggagtcaggacagaatgagttccttactctttgtttgtgctgccaagcagccatgtcctaccttctccatctggacagtgagaatagtaccctgcctactccatatgattgctgagaggatacaaagtatgctaatcagtatgaaaatgctttgaaatggttaaattaaacaaggctctgaccatggagagattgaggacaaacattcctacattactttgccaggatagctggcacaaagatgatgaaacactgaagttacaaggattagtttcaacacactccttccaccccttaaaattttcccggaaagtgaacactagttccttttccacccgcccttgggcttagctcctccaatgctatgatgagatgttttctgaataaggctgttggctctgggagggttggtaggtccttaatcacatcagatatgaggtctgatgagaggggtcagggttttggatcctgagatttgtacacagatcagagtggccaacagaaccgcatcagcctcctcctcgctgtctgccactctcttcaaggggttctctcaaagaactaggaccctgggcatcttgagtctctccttcctcaatgttaacagccaaaatgatgacattgtggatggtcagcaccatcccactactaatggacttcatgcaggcttcggactcttcctcctagttaaaaccactttctggttctttcagatacattcaaaaggaattaaaccaaggtccaatattgggaagtgcctctgttttcctaggcccccagaaccatccaaatgtgcaatgcccctttaagaaaaggattgctcttctataggaacaggagcgacagcaacctcttctgcttttacctgaccttggcagccaaacagttgccattctgcctggagaacacagcttgagaaagatagatctggagggagagtacagtgctctggaggccaaggtcaggtactcagcctctgagaaggccagtgggctgggcttgtccaaggaccacagtcttgttacagccttgtctagcagctgagccctccctgctcaggagggagtatgggtgaatttgatgcaataccagtgccccagcagggtggtatcgtctatacagtcacacagtaacctcgtttttgcaaaaaacagttttagttacatcaatgagagtatctgcttgccaaagctgtgatatgtttagtagcaaagattggaccttaataataataatcccttacatttgtatagcatattacgttttgtaaagcattctgtatacatttagcccatttgttcctgggtaatgtgagagccaaggaaattagatgacttgaccaagatcacagtgctaggaagtacagggccttctggttcctggtccagggctctttctaatcaaccccgtaagtttcttcaaatcattgccatctgtcctgcaagcatcagtttttcttaacaggaacttcaaacaatagctcttccaggggaatttctaggcagaactgtgactctatcccatagacccattaaataggattaaagttgagttcgggaaggaggtttccccaaaccagacagcctaaggtgatagggtgctgaagtgtgacagtagtcttcagatgggtctgggcccctgtgcccaaatagtggagcactgtatttgtttgagtttgtctcaaggctcatgccagctgactgtctggagtctgcagtaattgaaaaggcagaatgttgggtaaattgaaaaaacactccctctccagctcggttctgcaggaggaatggaagttaaattctgctcctggtccttgaatattcttgaatcccaatgggagctctttggaggtcagacaagacaaaaaaggggtcagattggagaggcattttgcccagagtaagatcaatggttggcagtataagcaagcacacatttatgggatatagccacagttccaccttgggtatataggaggaggtaggaatggaaacttcatttgcagatgaaagaggaaggaaggagagagaaatggaatctgaactattttgagtttaccttttggtaaaatcagctctgggagcagctctgcttagtggaatgattttgggtaagcttttgttttaaatactgaaaaacgacacatgcatagaaaagtgtataaacaatgaatatagtttaacaaattaccatgaacaaaatgcctgtgtaaccaccaaccagctcaagaaacagaccaattttaataccccaaaaggcccccatatgctctctcctactcatacccttccctcaggggaacctttatccttacttttatgttaatcattttccttgtttttctttatagtttcatcgtttaaggacgcatccctaaatgtaatagttttgccttttttgaatgttaaatacatagaatcctacagaagtgtgtgtgtgtgtgtgtgtgtgtgtgtgtgtgtgtgtgtgtgtgtgttgggcttttttcactcaactttatatttttaatatttacctatgttgtttttgtgtcttgtggttcattcatttttattgctgtgtagtattctattgtatgaatatactacaatttatctgttctcctgatgatgggtatgtggattgtttccagtttctgaatgcgtaaatcagaatagccctatggacattcctatacatgaacatccctgtgcatgtaccctggtgcatgtgtgcctgcatttctctatggtacattagataagtggaactagaagataagcattagttatgcttatcttcaacttcaggagatattgccaaactgttttccaaagtggtagtataagtttacattgcctccagcagggtataaaagttctgcacacatcctcaccaacacttggtattgtcagactttctagtttttgtcaatttggaggctataacttagtagggtcatttcactgtgttctagaaacttaactccaaaaatatctttccagttcactgggggaggtctgaaacctcataaaccagttttaaaactgctccaggaataagaaacactcaaggtggtcagcagtccaacatagaccccagctgacctctccttcctgtgagtggctgggaaggggaagggcatgcaggaagtgtaggtacatgttggagttgaggggtgggtgggcacagaacataagtatctgaagagataggagttaaaagtctagaaagaaaacctgtaacttccaaaggcaaaggcaagccctgttcattgcatacagagctggcagtggcactcactcagctcaagaaaagacttcatccgggctctgagtgcactcagagacccatagacttgtaggctgccaggcctaaaggtggattctgaaggcagcaggactagaggcatggtgttcaacccctagcagcacatactgcttccaggggcagatttattactaaagtggagaaaaagacaaacagagggacagatcattataataatcttctagcatcaaggctttagttggtttcagtcatttctgtaaaatttgcaaattttatgaagaaatgtcccacccccaccttgctgcaggatacctgtaagtgtttataagtgcttgaaatgcttatgtacacatgtgcctttgtatatgtgtgggtgcatagcccatgctcttaaaatagatgcatgcctgcaagctttccatagcgtggtttctgctttgtcccttctggtgtgtgtatctctttcctttttcacgaatctacctgctggaatttgcaaaccacacccatgagcatagatggcacgagggaaccttgtgtcccagctgaagacttttctcctgataatgttgcctccgaggaagatttaagtccacgatggatttaccagacccagaactggtccgctccccagaatgtactggcacaggcattgctgagggcttctcccccacacctaaagctttggtggcttttgtgtttctggactgaaaggcatgatcaaagaagcattcctgaccctgggggatatatcgtttcaccagctaataggaaaacgtaattttcatctgtgcagacttggctgtgagttgggggagctgtctctttccaagccctacctttccttccaccctccacccctgtcgagacacccccagggctcactctcctgatcaaatctgctctttccgaggggtttgctgtaagtcatttcactcttcttcctcaagtgaaggcttggagaggggcactgcttacccggcctgacttcagtgtccttatacgtgaaaaggcagagggtcgaagttagtgtttctaaaatatatttcagcctaacactatttaattcaatttacatcttaatatgagttaaagccaatatattacctctcccagggttgtatatacttcaaatctaatttgcaattgtgggatataaagttttcttcttggctgaagagacttacagtgcgagtgtcagccctccatccgtcggcctaggaacagtttagagctgccaggatgtgcaagtgtgcatggctcgagtggctctattttaaggggtaagattaccctaatatagaaattcatcaccagaggcctgggtcttcttgctgttgccttgtttgactttcctgccaggccctggacttcttaagggcaagctgggtcaagtcatctttgtttcccaggccctggtccagcacctgatgtgggacagatgctccacagctgtttggttggatgaatgttcaatggggcagctggtggctccctgaacccaggcctgcctgtctctcccatcagctgtggtcggagggattaggccatggcctgcctgtcctgccatcaggagcaccggctgtttccagctgttctcttccccagctctcttaccaggggctaggagacagctgtcagctggggttgctgtcccaggccatctggtcgtagctgtctcctggagggtgcaaaggttgagcacggtgagctgatgggaactacgagccctccccccttgggtccagttaccctcacacttgctcaggtcactcccatgagaaactatgtcccatctgcccttgggcttgccatctgtatcttagccctgtgcgcatccagctatctgccagggaatcctgatgcccacaggacctaccaggcagcctcccaggcagcctccttagatatggctgtgtgcacctgctgtgtgacttggggccagggtttgcctcacctgcagtctggctttgtctactcccacaggtgtctagtgtgtctctctacagcacaccagccttgggttcttaccttcctccccatgccagccataccaaaccctggcttccctttccttttccacctgcatgtctgctatggagaccccaagggtccctcccactccagcttcacccacatgcctcaagcctgatttccttgcccagcactgtaccacatgcagccccttatccatctctgtgccaagcttgggtgaggtaggtgtcatcattccttcttttcctgcctggggcctagagaggtttcatcccttgccctatgtggttatataagtaggccatgactgtggtgtgggtttacacctgatctccagagccagcaccctcccccgaccacacccctgtccctggttctatttgtaaaaacgagaccacagagaactgccagaattctgccccatggtcatctttcccctggtcccaaggttttggcttaagatactacacggtctcacccgggcacacgcacacgtgtctaagagctggacaaggtcaggatacggtctgtgtccttcatacccattccatcggtctacacatctggttgtgctggccctacatggcttgtcaaaacaccagccatgctgactagggctgactgatggctgtacccctaactccacctgcatccggttcccctttgccaagggtccctgccttgtttgcacgttctcttccctctggtgtgtgtgcatctggctgaagttagcagtggacacctgttcccatctggcagtgtggcaccagtggacacctgttcccatcaggcaccctccagtgcccaactgcatacctctcctgcacatggcacttgttctatgaacacctctgagttccttggctctgcctggcccaaggaatcatgatgacaacgttcccaaatctttcattgccacagttggctgtgtccagccttctgtctgagccctctatctgtctgctctttctccctcttcccttccctcttcttcagtgtgccaggatccttggcaggggccatgggtacacttgcttctgccagataggcacgattcccacctctgccgccacattgccagcactgcccacgagccaagttgcacacaccagaaatgtcatggttgcagctgtcccagggggaagagcctgaggcatgaggtcatggggttcacctatttcccagggcagaatcgagggtaccctgtgcaggtggcatcccctgcatctcctgagaatcgcctcaccaaaggcctttggtgtgagaagcgcagagtcccagggagaggtggggagctcttgagggccagcacccccaggttggaggtggctgactgggggtggccaaggaggggcagctgtggctgctgccctgggggacaccagctggctgagccctgcaggccaatggggtgatgccaccgccagcctcttgtttattcaggcggctggcaggctttgccattcccgtgaggggaataaactgtactgcttctctgggttctcaggggcaggcttgcctaaaaccctcatctgtggaaatgcagaataatggctcctcactgacacccaaaaggggatgggagactataaatcaatgtgaagggggactccctagggccctagaaaccctaagaccggggttgggggggcaccctttgcctcacagtgagtgtgccacacccactgatgcacagtgtttaggaatctagtgagatcttccgtcaaataataaggatacttaggcccagccagtcagtccacccagaggtgtcaccacctttagtagagtcctagggccagagctgggccgcaggtgtggacactcctcagtccgctcctcagagaagcctatcgacctggctgaggagtcagtgcgtgcatctgtcacatcaccctggcagagtttctgcagagcacttttcactagttgatattttcttgtctatttctttgtctattgcctacttccccctcatggagggtgcccttcaccagggcaggatcccagtggccttgctcacgcttgaaccctcagtgcagcactgagcacgtgaacgccttaataaaaaggtaacacattgaatccctgcacctgctgggcttggtgatctgtcttaggctgtgagagctacaggaggggcatccacaggtgttgctctcagcaggtgctgatggattacagaaatgcttgaatcccactaaggggccaggaacttttcccgtcagtcccagaaagaactcagctcctataaaacagcccttctcacacatttctgtccgtttttcaagcagctgtgccccaagctttctccacttagggcggtgcttctcaaactttaatgtgtacacagagtatctggggatcttgttaaaatacagatactgattcagcaggtctgagtgggcctgggaatctgcagttttaacaagctcctgtgtgatgctgatgctgctgaactctgcaccacactttgaatagtgaggatttatgagagtccaacatttctgtatttctcagcatctatgcatatcctgtcatgtatcctgaacccaaactgtaagtattctccggctttttgacatgcttggtgctgctgagagctgtctgtgtgccgggatcctctcctggtgttcttagtgatccagcaggtgagctgaagaagcaagggccaggaggctgggtgctggttccactctgccacttttttgtagtgaccttgagcaagtcacattcttgctctgggcctcagtttcctctctgtgaaatgagaggttagtcatgagttcttgggtccattccagctgtaacattatatgaaaaatagcagccacttagtccggtatgtttcatgcacatccatatatattaactcacttaatcctcctaacaacccataggaaaagtgctagtattatccccactttacagatgggaacctgaagcagaggtgtttcagtaatgtgcctgagatctcagatctagcaatagcagcatggaggatgaaccggtttccttcaaaatccatgctcttacccattacacttgacggcctgatagataacacctaggagtgactgcgcacccgggaagatcactcattctgagcattcttaaaacaagatctctttctcatggaacttagctctcacagttaattctgtgcaatttagagaggctggcttagcctaagtgccatggaacacactgagcccttccagcactcaggatctggcatgtgatgaaatgccataagaatggcatggctgatggttcgggagccaggttcatttaacaagcacctatggggcttctctgggcagcccctgtaggagactctggagccgcggtgtctgggtgtcacagcctggatatgcccacctcctctggctctgcactactgggacttccctctaggatgttagtagcatcccaccaggctgcagagctgtgcctggcaatgtcagcttttacacttcctgtgtctgtttgttaaagaaagatggaaagcaaacacatcctctattttacatcattgcttcctcaacctcataaacagggcccaaaggagaacatcacatttaagaatgtagatgctcatggaaactttagaatgagggccaaagttggatctcaatatagtcaaatctctttaaaaataactagaggaaaaggggcacctctaaggctgtcgacaactttccttgatttaaatcccattcagtgttcaacttctctaggaagctacctgggacgcctccactttcctcctgctctgaactcaggaaacctcacatttggtatttacagaacctgacatggtttgtctgtctccagttatagttgccatctctcccaccccacccagatccagaaccccaaggatacttacagcctttctttctgtagcactacacttagacactcaagaggtactcaccagtgttggttgaatgaaatgtagccttgatcttctctggtatgaaccaggtctggaacatggctaatttgccaagtgaggggtcatttagtgaaactgtttttatgggtaaataggaaagtttgaagccagcctatcaattttctatgtaaatgatgcttttaaagtaccagggaatggtttgtgctcactaaaaaggcagagtagttttttgttgttgttgttgttgtttgttttgtttgtttggccacctcttccaaaattgcttagaaagcccctctttcattaactgagctactggttcagatgtatgggatgcgagtgaatggaattctttaatgttcttcaacactggataagagtggactatatacaaaggacagaaaaagaacctggtgtcctggtggcccagagacttgtcaatgttattaatagaaaagctatggtagtttgggcagtattttctgtagttggatatccaagcgctgagctgccctggaaatactgccaggagacctggtaccggtgctcagcccagggctgggcacactctctagccccaatcacttgttggatgatttctcagcctgtctgttgtgtctgtgtgctctgagcgaagatggctgctagctgcctcctgcttgtcttcagggtgctttaatggatcatcttttttttttccttctcaggaagtgtctaaaaacctcaccaaggaaaatgaacaaatcaaagaggacatggaagaaattcgaaccgagatgaataagcgaggcaaagaaaattgctctgaaaacatcctagatagcatgccagacatccgctcagccctgcagagggatgcagcagcagcctacgcccacccagaggtatagccccagcctccaagggcctctgatcacaagccctggaagtgtgatatcagcatctctcctctgcatagaacttttcaggcttcagtcctttcacagagatgagctcgcttcatccatacaattgttctgcaggttctgtagatttgatgagcagttgactccattttacttcacactgaagcccagagaggatcagtgagtgttgaagccaggactgaaatctgagtctgagtcccagcccccatttttttcaagatctgatatcccacctttgtgaacatctcttgtgtttgtaaatagggaagatatgcatgctggcttgtctgggaccatcctggtttactcctgctgtcctggcatgattttttttttttttttttttttttttgataggttccagctctgccaccaaggctggagtgcagtgttgtgatcatagctcactgcagcctcaaattcctgggctcaagtgatcctcctgcctcagcctcctgattagctaggactacaggcacatgctaccatgcctggtaataaaatttttttattttttgtaaatacagggtcttgttatgtattttctgtaaatgcggctggtctggaactcctggccacaagcaatccttctgcgtcagcctcccaaatcactgggatgacaggcgtgggccactgtacctggccctggcatggttattagtagcaccctcttttactctaaaaaatgccccagtttggaaacaaattatattccatccctcctcatttataggggactttgtaatttactacatattttcataactataccatgtggctgtcgtcacagctctagaaaagcaggccagacggagatcaatagcctcattttacagataaggaaacagatccagctatgagcatggtctccctctctcagttgggaagtggtggcagagggtctcaaacctctgtttcttcctacccagttgtgtccctagcacgaagttacccatgaatggattgctgcctaatgtgatttgagtgataccaaaagacctccttgcttaaaaatgcctccccatttggtgcctgtttcttttggctccaattactactaagttatgtttatgtactaatggttaagtgctaccatttaatgtattgggttatttactgaattgttgtccaagaaataggcattaatttgggagataatccaaaaggaagaggaaacaggtaagttttggtggcaggacttgaagagtcctattagcaagacacattattagcaagatgggtctggatcaagtgttataaaaggggtcactgggcagccaggggatggcagcatttaagagagactttgctcattttaactggttaccaggggttgatggtagatggcagagttgtggcacactggtgcccagggagtgggttccagttgggccattgagggatcccctcggcttcggggagtcgttctgagtgtggattgagcagggcctgggacagctagagtccctgagctggtctgtctgtatgctgtgacatgaagaacttttgggaagcattgctgtgcaggactgtgttgcctgggccattaagaattgagataagagaggcaggaagtctgggtgtgtgggcttgaaactcttgggtagggcagttcatcaaagggtgccaggcaggcagcagctgggtttggggatcttgggcacacatgttccaaaggcaggactgcaggcagattggggcttttgaggtaacaagccctgagaagaatatggtgcctccaccctccccaatatgtaactcaaaataaaaattccaaaccataaaatagatataagaaaggccaataattttctggctttgcccatgatgactactttggtgcttttttggaaatatcatatttcttcagaaattattttgattctcatttttgggtgtccctgacaggctggctactgagcaagtgtttagtctgcttggtggatcatctctgagtgggtatgagctcataaaccaaggagccagaagacatttgggctggaagggaacttgaaggctcccactcattacacctgggctcagtgtctcttatttcagcccacctggcatcggtggctcagctgcccagtggagccaggcgcccctttcctgctctggcttccagtttcccagtcggctgagcttaagagtgcatctgttgtcttgatgacacattatgtggtatgttcgggaacccagctcagatttcctgagggcaaacagcaaaccaaataaaaaacaccaaaccctttttctccttgctcagcaaagtcccttcccctcctccagtccccattcatcaggctgctgaagttagcacaatccttccccaccagggtggtggggcagaaaggggaagtggtgccggaggccccaaggcaggatcttgccatccctctcttttgtgaaccccatgccaaaaagcgggtggaaggggcgctgggtttagttgttcattttcagggttcctgtagataatgtcagagctttcttggaatggtgagtgttaatttgttgagggcttctctctaagatggtccttgcctgaggggttggcatggggctctgggggctgggttgggagtggagagagcagggtgagagtggagagagcaaggtggaagtaggaacattcgactccaggagctgaagtcatacagcagacacttggattcatagagaaaggaaattgaagcttggagggggccgctgccgcccagtgcagcctgtcgccagtggatccgtggaaattatatgttctctggcaagggctgtccatggtcttgctccatctccttggctgggagaaagcactgcagttcccacccttccctgagagcctggaattaaagacagttactggggtttgcggcgaagaaatgacaacctgcttttgcaatgcagagggagaccagggtccggtaattagatgccgttcagcgtctgagtcacgggctgtggccagggtctcctgacagcctgccgagcagctcttcccagtgggaaatgagggatctcccaagtctgctgggtaggagccagaccatgacccggaggactagggcaggcaggcgagtttttggatggcaggcaagttagtcctgtggtcacagctgcaggcagaggcttaatggaaggaagaggcaggctctgagggcaggcagcctggggctgacctgagttgtgtgacttaagaactgcccctctcagccacttaactgattgactttcaaccaaattgctgaacgactctgagcctctgtttcctcatctgtgacgtgtggataatggtatctaccttccccattgttgtaagggttaaaaataatacaaagggacatggccataataggtgttcattaaaatatcatctccaccaaccagatatcccctacagctcaggtggaggttacatcaccagcaagaacagggaattgagggaggggcaaggagcaggagttggggctgccccaggcacagccgagcatgtcggcctgtttcccctgggcagacaggggaggctggcagaaggatgtcccctacctttcaggagtcggtcaccactgtgtgctggggagagagagatacacaaccccattggttgtgccatccagaagaactctcttgtcatgagaaaacaggcacacgcttgggggtgtccttgggggtaatgaggactcagggctttttccaggccaaattgtaaagatcaaagcaagagcctggtttgcttcttcctgtgcgaaaggagcacattggccgtggtggccaggttcctacagccaacatggagtagctaaaggccctgccctgcctccgggcactgggcatctaggaacacaggttttgtttccacatgggctctgctctctgggtggcttccaccaaggcctagaattacaagattaaagggagctcactcacctccccctggttgagaaggggcctcatggttcagggggctgcaggaagccgcctcttcattatccagccactggagtcctggggagagcagggctgggccacgctcctctcaggctcccacacttctctgatggagccaccaaagcagctggacccacctgtggggtggccctgactttgagcacagtcagttcacaggttgtatgcccaaggtcctttgctttcaaaggtgggtgattataatcctggacagggagtctggctgaacagaccaacacaggaccagagatcccgccacactgtggacacaggggctcctccttgggcagcagctctgtggaggacagagtggtccatctacatgatcagagctgtcacagggcactctcacagcgccatccagatgcccagtcaccgggccatatgagcatcatttgttttgacaaaattaaatgctggttagttaccaatgtagatgattccttgggatttgttatgattcagaaattcaatttaacaaatattagggagcctcaatccaggggaatcaaagatgaacaagaaatggtctctcttctttcagattcccatagtctacagagatagcaacatccctaaatagtgcctgtggaaagcaggctaggagaggtgctacagcagaagcacagacttatattcattaggacttgtgttcagcttgggtaagagacccaaatacagtgccttaaacaatagaaatgtttgttgttctttcacgtaaaacaagctctggaggcaggcagtccagggctggcatgatcagctccaagatgtcgttagtgactttcatcctcaaaatcccctcatgatcacaagatggctgctcagctccagccattctgtccacatttcagtccagagaaatgaggaagagagcaaaagatgcctccaagctgaatcagccccccttatgcagaacttttccaaatgcacatcccatcaacttcttcctataccccactggccagaattcagtcccatgcccactcccgtaaaaccaggtcttcattagtaaggaacaagagggcagggaatttgggtaatcagtgagaaatctctgccataaagcacaaaatgaggcttggggaagattgattaattctgaattagaaggtccaggagtatttccttggggacctgaaattttagctgggccttgagaagtagataaataagtagatatatgggggaaggaggtataatggctatccaggcagagaaaacaggctgaacatagatccagtggctcaggagagccaagagtttcagtagtcagccaagtgactggagtgcctagggcgtggggtgcagggcacgcaacaagagagaagaatgctgagctagatcaagatcagttttactttggactttattctgtatgtaggaggaagggtttgggggctgggggtgatatgtgttttaggaagcccattttgattgctgtaacaagcttcatcctgaggcggtgtgcatcctggtccttgggcttcatgtcccagcccaggcatccttcccctcacatggatctcacccaaaacaacttacaccagatctaagtcacccagcatccctaggccagatccaagaggaggactgcattctctgggcagtatacgtcaagcatagcgacactgattctggaaccagacatcctggcttcaatctgccttaccacttacctgttgtgggaccttgggaaatttatgtaacctctctgtgcctcagtttcctgaactgtaaatgatcatgataaaaatatgtcctacctcatagaactgatgagaagattaaattagttaacatatgtaaatgtataaagcacttagaacagtgcctggctcttcggaagtgctgctgttattagcacagccttggctccagccttgcccccacctgcccactgcctctctgaccagtgacctgaccttcccttgtgtcccctctgaggagcagtatgaagagcggtttctgcaggaagaaaccgtgtcccagcagatcaactccatcgaacttctgcagacgcgacccctggctctgcctgaggtggtgaagtcacagcggcccctgcagaggcaggtccacctgagaggccggccggcctcccagcccactgtcatccggggcatcacctactataaagccaaggtctctgaagaagagaatgacattgaagagcagcgtgagttggggtcaacagggccgccccagaggcagggtagggaggaagtcaccatttggaccatagtgggctggattcctgggagccatacacccctccatacacagcattccaattactgctgtggccctgttatccagagctctcactgcatttcctcacagctcgctgagtggccttgggcaagtcacttaacttctctgagcttgcagaagaccatatggcagagtgtggctgggctggaagggacttcagtgccctccagtacagtcctccccatttgcagatgagaaaactgaggtttggggagactgacttgcttagagccacaaggtgggcttctccaatacttgctcctccctccgggggccctgagcttcctgtctgagtctccagcacctcccctttgatctctgtccttcttcatttttcatggaagagagacgatcccttttcacatcacgtttaccttgtttccttaggcttcttcctcttcctgtgctcctcctcgcctcctcctcctcctcttgtcttctttcttttccttgcccagcactcccagcaggccccgactcttcccctctccccagtatgtctgagcgagtccttccccatcagggctgatgcagcagcttcctgtctgtctccttgcttctgcctttgcctccaccatgtttattctccacccagtagctggcgtcatcattttgcccatgtgttttttttggtcattttttttgtgtcattgatttgtggtagttttttacatattctggatacaagttctttgccatcatatgtattgcaagtattttctccctacctatggcatgcatttttagttccttaatggtgtttttgatgagcacatgaagtctactttaccaattatttcttttgtggttagagctctttgtgtcctctctaagaaatgtttgcctctccatattccatctctgctcaaaatcctgcagcctcccccatttctttcagaataaaaactgaactccatacacagcctctaagtcatgcatgcccagcgcctgtcctcactgtgaccttgcctctgcttcagtcatgctggccacctcgctgctcctgggccgctgcacgcatgtcctgcctcagggccttttctctgtggttattcacccatggaatctttgtgcccgatggctgctcagctgactccttcacctcctccaggcagctgctcatctccccagctcaatgagtctcatcctcaccactttattcttctctgcaagtttcccttcccttctagcttgtttgaccctctttaccctacattttgttccccatagcaccttcaggtgcacaatcctgtctattatcaagcgtctccaccactatatagaagctctgtgaggtcaaggatccttgttttgcttgctgttgttatccatactccataaacatgtgctggaaggatggattggatgactcacttactcccagccatcggggttcaggacccatgactatgcgtcctgccagtgacccctgagtcctggggggagcatggctgcagtctattcagagaaaccccctggaaattcaatgtccttccacctgcgctcctgtacaccttcttccaaaatcccagccaggccccctctgtaactcaagccgtcgtgttaaggaaaggcaccctctaattcacctgctcattgccatgtgctcttgtcatctgtaggttgtttctttcccgtgccacagtgaaccttgtgtttgtttcacagaagatgagtttttcagcggtgacaatggagtggatttgctgattgaagatcagctcctgagacacaacggcctgatgaccagtgtcacccggaggcctgcagccacccgtcagggacacagcactgctgtgacaagcgacctgaacgctcggaccgcaccctggtcctcagcactgccacagccctcgacctcagatcccagcatcgccaaccatgcctcagtgggaccaacactccaaacaacctcggtgtctccagatcccacaagggagtcagtcctgcagccttctcctcaggtaccagccaccactgtggcccacacagccacccagcaaccagcagccccagctcctccggcagtgtctcccagggaggcattgatggaagctatgcacacagtcccagtgcctcccaccacagtcagaacagactcgctggggaaagatgctcctgctgggtggggaacaacccctgccagccccacgctgagccccgaagaagaagatgacatccggaatgtcataggtaagttcattgtacctggccttggtctcctgatcagctcaggtaaaaggctgagcctggaaatatcttgagaggagagggaggcaccagatggtcaaagttctttatgggaatggcaagtggagttaagcctttgaccaacgattagttttaacatctagggtttatttattgaaaatgtgccagtggcaagggtgggactcttttttcctaaaatagacatataaattaatggagtcaagatttggcttcaggagttagttttataaatatttgttgagggctatccatacactaggctttgtgatggctattgaggtatccagtgatgaataaatgaatttttctgtggtaagtttaccaagccataaaagaacaaagggtttttactggggggaaagtctcagatttgtagtagagtgagagcaggggaatagctggggcaatgggcctccgtgcaaaatcatgagccccacccatggagagcatagaaacatcatggcaccatgtgacaagtgctgtaccagaggaatggaaaaacagagaaaagaaagaaggaatattagcttggcctggctgccaggaaggctggggaaacttttctaaggaggtgtcatttgagctgggatttgaaggatgaataagagttttctttttttttcttttttgagacagagtctcgctctgtcgcccaggctggagtgcagtggtgcaatcttggctcactgcaagctccgcctcctgggttcatgccattctcctgcctcagcctcccaagtagctgggactgcaggtgcccgccaccatgcccagctaattttttgtacttttagtagagacgggttttcaccatgtcagccaggatggtctcaatctcctgaccttgtgatccccccacctcggcctcccaaagtgttgggattacaggcgtgagccactgcgctgggcctgaataggagttttctaagcagagaagggaagcctcctgactgttaggtctaaaaaaacaaggtatgttccagaagcatggagaatgcagccctattctgtgcctgggagctccgtggcccaagagaacgcagagcagtgaaataggaaagtagagaaaaaaggaactataaaaggaaaaatgggagccagttacaaatgtcttttccaaaaagaactaaaccaaacattcattaaatcaccactgatcatgactgaaaaataacactattgagtaataatttcatcaaaatatttgttgaaaaatacacttgatttgacagaagatttggcctgccttatacatatctttcccttctcccatttttcttgcccttggcagcctcattcccaatccttcctcagcataaggtaccagctgctgccagagacagagcggtgaaggagtacctgccaggagtcagacactgctctctgccattgatagctgtgtgactttggccaaatctctgccttctctgggtctcagtatatgctatggttttccgcaggaagtttaccaggtcatgattctgctcctcttcttccattcatggtgtgtatgtgcctctctctctgtctctctctccttatggtgttttttatttgctgttccatgctattgtaaataaagattcttgttgggtgaaagtttcagaataatggcagaatgacagcagtgaaatagcccatagaaatggaccccagggcaaaatctcatgaacgctggcctggaggaagctaagcgagaaggcagttcttgggccttagaggtgagggtgggagcaggagagaatgtttaagtttctgaagcaggggtcctgctgtgtttctgcagactgccttggggtcagagaagaggctaccacttgtgcaccagctctgggcagcctggcctttgtgctcttgagaacaggccctgagcccaacactccatctctccctttgccatggaagtgaacttccctgggcccccatacttctaccatttcagcttcctgtcacccttgggtgagagggaacatccctccaaatatttaggaatctggcccctgtcacccctaccacagttttccagaatgctaacagtgaagacaggctgcaggtaggacccacacaccttgcaagccatcaggcaatggtgtctgccagcctgggagcctcttccgtcggtgacttgctagccaggagtgagttgttcactctctccataacctaccaacctgggtcccagaacccagcctctccccaactgcctccccaggactttgccatcagcaggcttttctggtgttttcagggacacttataactctttccccctccagtagcctaattgagatgctgatgcccagagaagccatgtgtcccagcagccatttacctggtggtaggaatgacattttctcttgttcaatattctgtttaactagaatagcatcatcatgctgacgatgtaaggtttgcttaaagactagcccgtggcatttttcagaggagctggggttctcacctcttatgtcgactgcagaagaaatagacatggacacagatgtagtgtgttcttcaaatgccaaggggtgagaggaggggtggcccagagaagaaagctttggctgtctaggcattgtctagcttcaacaagtttgtttctgggaattattttcaatagtttatcactgccaaatgcctccctctggctgctgttggtgtggatgagattttcataccctaacattctctgcagacccctgacttgcctgtgtctggccaagaaagaccgtgatgtgatgacatctcccagtcatcagtaaaattaaaaagcttttggctgaaatagacatgggccactgatttgctacctgggaaagcttgtttgctgtttgatgaatccagcaattttgatttttgagctatttaagatgtggttgtaaacagcactaattttaaaagaaagatttttatcccatggtttccaatcctgattttgtgatgccctaaaatgtctaccattatcctcaggagagttataaaatgttcaaaaaaaatccaaaaacaagtaaattagaattcatttttggctgtgcaaacgaaacatttggccgtagtgtagctctaggacagggagaggaaaaatattgtcagtaattggagctggggtttgggtaggattggtaccatccgagaaggcgcttctgctcgggacagccctggctttgggaatagctcaggctactgcagagaaatgaaactgccacatggccaaggctctgcagattcccagactttagcaactacaattcctgatgcattttgtagaaggggctggtttggagtgggggagggcaggtggcaggagcagacaaagaggacagtcagtttataacaataccagagagagcctggctcctatttgaatctagaaaataccatgaactatgaagaatgtctcccccacaaagcagatgactgtaaccaccccgaggcttggccagctgtgccgaccatggggcgtgatggccagtcctgcctgtctcgtgtcagggaggctggtctggggcagcccaaggaaggcgatgctgacgtgggctgggacagcttccagagcctctgcagagcccagactctaagtcactagacaggcagctcccccagccccagctccacagccccagctccactggtctcagtctctttgctgatgctcctaacccaacttgctcagaaaactggaaatccagtcatcgtataacacaggggcctctggccctagaaataaggatataaaatggataaaatatacccttgcaggtggtaaaggactgaagtctaagccttttgatgaggataaagagtcatctagtattaataattcatctaccactacagcgtgctcggctgcaaagatccaaagtgagcaagaagtggtcactttcccaaaggtgcagggaggcagcagtgactgaagtggccgagcacatgggaagtgtggctggcaacggatgcatgctgtccaggggcgtcgtatcacttctgccatggggctcctctctgagggtgttctccagctcaccaggctcagagggcagagaagaactctccaggcagagccaagagcatgcgccaggttgggcagggaatggaaggcagcccaggtacgccagcacagatggggtcgagtgagggagagtgatggaattccagggtagggagccggggcctgatgatgaagggaatgagaagtagggactcgatgctaaaagagatagagagggctctaagcatggaaacaatattcagatttgctccagtattaagtggaccatcacacactcaggatgtgtgagtgccgtgggtgtcagggatgcaaagacagatacggcaggggccctgccctggagttgcacagcttgtattgagaccaacacagacacatgacttcaacgcagggtggtgagcactggggggcacaggccacagtgggtcacagagggagactgaggcagcccaggaccctcttccagaaagaggtgctggcctagctgttttgtagcatcaggggaaattagctaggcaaagaaggaaggtagcactgcagtgagaagaaccagagccaacaagagcatcggggcccagtgcaaaatgacaatgtggggcccgtgctcaaaaggcaggggaaaagtgccatgccgagtagtaaatataaagctcctcttcttccattcatggtgtgtatgtgcctctctctctgtctctctctccttatggtgttttttatttgctgttccatgctattgtaagtaaagacatacaggcatgccccatcttattgcactttgctttgttgtacttcacagagagtgcatttttttacagactgaagctttgtggcaacgctgtgtcaagccagtctaccagcaccattttccaaccctatgtgctcactttgtgtcacattttggtaattcttgcaatatctcaaactttttctttatatctgttatgatgatctgtgatcagtgatctttgacaattactattttcattgttttggggcatcacccacccacaccgatacaaagcagtgaactcaatccataaatgctgtgtgtgatctgctgctcccccaactggcattccctggtctctctcccactccttgggcctccctgttctgtgacacacaacaatattgaaattaggccaattaataaccctacaatggcctctaggtgtttaggtgaaaggaagaattccacacttctcactttaaatcaaaagctggaaatgtcagagctgagcgaggatggcatgtcaaaagccgagataggccaaaagccctcttgtgccaaacagttaaccaagttgtgaatgcaaaggaaaagttcttgaaggaaattaaaagtgctactccagtaaacacatgaatgataagcaaatgaaacagccttattgctgatatggagaaagttgtagtggtctggataaaaagacagtccaaccacgacattcccttaagcaaaattccctaatccagagcaaggccctaactctcttcaattctatgatggctgacagaggtgaagaagctgcagaaaaaagtctgaagctaacagaggctggttcgtgagatttagagaaagaagttgtctccataatgtaaaaatgcaagtgaaatagcaagtgctaatgcagaagctgtagcaagttatctagaagatctagctaagattgttgatgaaggtggctacactaaacaacagattttcagtgtaggcaaaacagccatccattggaagaaggtgccatctaggaccttcataattaaagaggagaggtcagtgcctggcttcaaagcttcaaaggacaaggtgactcttctgttaggggctaatgcagctggtgactttaaatcaaagccagtgctcatttaccattctaaaaatcctagggcccttaagaattatgcaaatctactctcctggtgctctatacatggaacaacaaagcttggataatagcacatctttttacagcatggtttactgaataatttaagccctttgttgagacctactgctcagaaaaagaaattattatttgagacagaatcttgctctgtcaccaaggctggaatgcagtggcacgatttcagctcactgcaacctctgcctctcaggttcaagtgattctcctgcctcagcctcccaagtagctgggattataggcacatgctaccacgcccagctaattgtttgtatttttagtagagatggagtttcaccatgttggccaggctggtctcaaactcccaaactcaagtgatccgcctgcctcggcctcccaaagtgctgggattacaggtgtgagccaccgcgcctggccaggagattattttaaaaatatgactgctctttgacaatgcacctaatcacccaaaagctctcatggagatgtgcaaggagatgaatgctgtcatgcctgccaacacagcattcattctgaagcccatggattaaggagtctttttgactttcaagtcttattatttaagaaatacattttgtaaggctatagctgccatagataatgattcctctgatggatctgggcaaagtaaattgaaaaccttctggaaaggattcatcattaagaacattcatgattcatgggaagaggtcaaaatatcaacattaacaggagtttggaataagttgattccaaccctcatggataaccttgaggggttcaagtcttcagtggaggaagtcactgcagatgtggaagtatcaagaaaactacaattagaagtggagcctgaagatgggactgaattgctgcaatctgatgatcaaacttgaatggatgaggagttgtttcttattgatgaacaaagaaagtggtttcttgatatggaacctactcctggtgaagacagtgtgatcactgttgaaatggcaacaaaggattttgaatattacataaacttagttgataaaacagtggcatggtttgagaggcttgactcaaattttgaaagaagttctactatggggtaaaatgctatcaaacagcatcacacactacagagaaatctttcatgaaaggaagagtcaattgatgcagcaaacttcattgttgtcttattttaagaaattgccacagccccctagccttcagcatccactcctctgatcaatcagcagccatcaacatcgaggcaagaccctccaccagcaaaaagatgacgacccactgaaggcttagatgatcattagtattttttagtaataaagtatttttaaattaaggtgtatacattttttagacataatgttattgaacccttaatagactgcagtatagtgtaaacataacttttatactcactgggaaacaaaaaagttgtgaaactcactttattatgatattcgctttattacagtggtctggaaccaaatccacaatatctttgaggtatgcctgtattaaaaatttaatttactagcatgaattatacaattcatctttatattgtgcaatgttagttttaaatgcaaatataagatctttcaacttttatgcagaatccaccaaaatgactcatttcatattttgtaactccttcatacctgtgtatgtatgttcttattagaatagtggaaatactgcacaaaactaattcatctgtttttgttttacttgatatatgaacattttaacaacactccctgccttcagcttactgagtgaggaaggactaaaaagaaacggaactatgagttgccctatccttccctcttctttcgtatcaatttcaacataggttgttgtctaatacagggaagtaacacaagaaagaatatgatagggttccttgaccatttgtgtttcttagaacaccactgccttcttcctgctttcggagcacgatctggttcaaatgtaaaatgtggcctctggggcaacacacctaccttgtgctcactttgaatctcactgaactcaggcacgtagtgggtctacctgcaattctgtgctcattgggcatagcaaaccctatatgcaagtgggggacaaagaatgtggccacacatatcttgcattctcctctgctcacaaacaggctgcactgttagacttcacataaaatacaagttcgagggtgaaaatattaagatattcaagatggtgacagcagatcattaaatgaagggcagcccttcaaagcaagggtcctgtgtgattgcacagatcatatgcccaaaaagccagccctgggtttacggtgaataccatagccctggcaactatggtgaatacaagcagctaggtgtgggcaagagatctcaagctggcagcctgagggccaaattcatcctaagatgtgtttttatgttcttgaatctgaatgccttcaggtcagctcttccagttcaccacagtgtcttctgccaccttttgtctcacactcagcctgactcatcatttcagctcctgcctgacccctgtaggcatctgagtttgagacctctgaatgaaggcagatgacaacagtaagaatggtgatgcaggaagggctgatgtgctaggatggggactctgggctgcacttggtggttggagatggtgagtcattaagggtttaagaagatgtgcatcttggaaaagcagcacagggaatactggggaggataagttagaagtgggcagagatgagccagagagacaaactggcgcaattggagtgatccaggcaagagttggtgagatctgaactacgccatagaggtggaggatcagggtcaagatgttactcagtgctgagttggaatgtgggtgaagggaaaggggacatcagggatgacctaggtttctggctcagttggtggatggtgtgccatggctttctctgggacagtaaatacaggaggagcaggctgtgaactgaagcaaatgatttccattttcagtcctttaagtttgaggagccatgaggacatccagaaagaaagtgccttgtaggtagttggatggattcacggtgctcagaatcaggacctgggctgagttgttggcaggagctgagtctgcaggaagaatgaggagggaggaggctgaaggtggaactccagagggtggcatttgaaagcaggcagaagaggaagcactagccaaagagctggagaaggccagaccaggcaggtgggcgggaccaggagagagtggtggtggaagctgggggaggaaggaaatgccttctgaggtgggtgggtgggtgtcagcgggggtggggggtggctacctcagtttccaagcaaaaaacagaggcttgactagaataagaggactggagaacaccccaaggggcagcagtcgggttgaggggctgagaggcattgctgacgaggttagttggggagcagacgcccaaggaccctactggggaagcttgccaagtaagcaccagagctgagagctggggagagccaggaaggctcttgcttgctgatttatttcttttagaatgctgagatttgaggaggtttatatgctgaggggaagggccccttcttttcagaccctggtaacgtttgaaacaggaccagctgtctcccaggactgttggttaaacgacagaatacatagaaagtgcgtagtaaatgtcagtgtcaccggcatccttggcagccctgctctgggaaaacctaagatgagatgcagactgcactctcctgtctgcagttcctttgaactttctcccatctttctgtcatcccccttgaagaggagtcaacatacagtaccttctctccaaagctgatggtttgctgccaagtgtgggagcatctgagctgccccagattctcagagcacagtgatgcgtctgggtctcatggtttactgatctcttcccttgatcctgtcttcaaatgctctgaaatcatttgcatttgtcctgcctgggctcatccgcagggcagcagtgtttgctctctctgagggcatgtgaaaatgcagcctgaggtcctagtactaggactatgaaaatgcaagcggggactcccctcttcctgcagaaataagggtgccctaacccaagaagctgactccatctgtatccatttcctatgcctccaaattgccacaagcttagttgctaaaaacagaaatgtactctctaacagttctggaggccagaaattcaaaatgagtcttgcagggctaaaatcaaggtatcagaagggctggttctttccagaggcttgaggggagaatccgtttcttgccttttccagcttctcatggctgccagcattctttggcttgtggccacatcacttcagtctttgcttttttcatcacattgcttcctcctctcttgtggtcaaatctccctttgcctctgtgtcataaggatacttgtgactgtatttattcaataggaccacccagatagtccagtatagtctccccatctcaggattttttttatgtaatcacatttgcaaagtcccctttgtttccttttgtcccaatcacaggctccagggatttggacctggatatctcaggggtatattactcagtctaccacatcatcttcagaggggactctccatgcactctggtgaaggaggcagggcatgcattacaatcattttacttctgaagagattaaaactttttgacattacagttgcaacagactttggagttggtggctgggccaagagcagagccaggcctctggccccagcctggggcacatctatagcccagcattagggccctgccactgcagagccttggtgtgagacggaaccctgcagggattttcagggctgctggagctgcacagacgagtcctggctttcaagagtccatctgcaatttctgtgtttggtcagagaggtggcatggccatggtaatccccagacagaaaacacctcacctcatggccatctgtggggcttgagggcatgagccagggatgccgctggacagggaattggtgccctttctgagctttgccagggcagaggattgcccggtgatggcaatcctcatggtgagctagggctcacctcagtgcagaaggagcgtggcgtcctcattggcagccagggccctgcttagctccagggaatgagagcttttccatcaaatctctgctgccagggctcagtcagagttttctgttttattgtcttgaacagatgagctcagctctgggggaatgaggcattggcagggaggttcttttgtttgtcttatggagactgaatctctccccgctccgtcagaccaggacctaataaaccccacactgagctgcctaaaccctgccaactgcacccagctatggggcctgcctgcaaaacagtgttcatgcctcttccatccccagctgccccagacccagggccaagggcccagctgcttgctcctgtcctgtcagctgcagggcttggactccttcctcaaaccactgcggggagcagagtagatggaacggattggaacagtttggaaatgagggtgacctagaatttagagaactctggaagccaaactgtagggtcttttgttacttttgtcccaggtgagtgtcaaggaccaattattctcatcacccatcagtgtcgtcatgatggcaggtggggcaggggttctgctggccccagctgccagcagggggtaaggaagctgtgagggcagcattcatgtggctctctcactgcccccttccactgccctcttcccacctcctccataatccacaagtgtgaggacaggaagagcacatgcccttagtcacgtgtgacttcactatcattcaaggctatgctcaataataatactgcatataagcattgcaggctctcaacttcatctagaacccagtatagttccagtggctttttagggcctctcctgggcaccggatccagagccactcagaaggacgttgctgagttcctgtcccatcgtggccgacttgatctctgaaggaggcttctatacccagagtcagctccttattcaagaacttggtatcttgccccccagttacccagcagagggccctggcatcctgctcccagtagtgacaggggcttaggcttggggacagctctctaggacagcaggtgggcctcagggacatgaatagccattgctccactagggctggtcccacagcctggggcagctcagcagctggcagagccgagttcctggttacacccagcagaggcctctcctctggccacacttctcatgctgtgtgttcaccctgggatcagacatttgggtgcctgcagcaagccagacaccgtgttctgagcactgagaatgcaatgaggaaaagccacattccctcatcccttggtgcttacgctccggttgggggcaggcgtggagggaggagagagaagcacaaacattgtggagatgcaggatgacatgctctgtaagagagcagcattcatggtaccctgagagctgaatggaatagaatagaatagttctccagaggagggcatgatgtcataaaaggactctggatcttaggtctttgaaggataggactgagaagtcagaacaggagcaaagcatagtggtgtgaaagttgccaaagatgggcatggtggaggctcaagtgtagggtcaagtgtagggtggatcaggggagtagcaggagatggtgtggaaaaatgtttggggtcaggttatacagggctgttaaagcctgccgaggagtccagactctaaatggatgaacagcaaaggtttaaggggtgaggcatcactagatcagcccaaaacctccatccacctcttctccaccaggaaggtgcaaggacactctctccacaatcacggggccgaccacccagaacacatatgggcggaatgaaggggcctggatgaaggaccccctggccaaggatgagcggatttacgtaaccaactattactacggcaacaccctggtagagttccggaacctggagaacttcaaacaaggtacatgataaagatccaacccagactgctccttcccttccccacgtcctctgtttttatcacagccaggcctctttgggtggtaatgacggataggaaggatgacaccttcttctgatggctaaaggacctttccttggagagcggtcccccttccccactccctcacattctctgcctctcagctctgcccctcctcctgagctcctgggacatggaaaaacctccgagtccagaagacaggctccctttcccatagcccttgacaatttatgaaccacattcatgtatattagctccccggatccttgaaacaggcagatgggaattgtcacttccctatgacagataaggacactgaggcacggacaggttgagtgatgtgctacaggatgctagaaagtggcagagccaagacacaaacctgggtttccagacccctcgttgatcatcactcacttaaccacatgggctgcccaccctctgccatgccactctgaagcctcctgttttctccccacctgcaggtcgctggagcaattcctacaagctcccgtacagctggatcggcacaggccacgtggtatacaatggcgccttctactacaatcgcgccttcacccgcaacatcatcaagtacgacctgaagcagcgctacgtggctgcctgggccatgctgcatgacgtggcctacgaggaggccaccccctggcgatggcagggccactcagacgtggactttgctgtggacgagaatggcctatggctcatctacccggccctggacgatgagggcttcagccaggaggtcattgtcctgagcaagctcaatgccgcggacctgagcacacagaaggagaccacatggcgcacggggctccggaggaatttctacggcaactgcttcgtcatctgtggggtgctgtatgccgtggatagctacaaccagcggaatgccaacatctcctacgctttcgacacccacaccaacacacagatcgtccccaggctgctgttcgagaatgagtattcctatacgacccagatagactacaaccccaaggaccgcctgctctatgcctgggacaatggccaccaggtcacttaccatgtcatctttgcctactgacacccttgtccccacaagcagaagcacagaggggtcactagcaccttgtgtgtatgtgtgtgcgcgcacgtgtgtgtaggtgggtatgtgttgtttaaaaatatatattattttgtataatattgcaaatgtaaaatgacaatttgggtctatttttttatatggattgtagatcaatccatacgtgtatgtgctggtctcatcctccccagtttatatttttgtgcaaatgaacttctccttttgaccagtaaccaccttccttcaagccttcagcccctccagctccaagtctcagatctcgaccattgaaaaggtttcttcatctgggtcttgcaggaggcaggcaacaccaggagcagaaatgaaagaggcaagaaagaagtgctatgtggcgagaaaaaaagttttaatgtattggagaagttttaaaaaacccagaaaaacgctttttttttttaataaagaagaaatttaaaatca

SEQ ID NO: 75 - DNA, 53384 bp, Homo sapiens
caatgggctgggccgcgcggccgcgcgcactcgcacccgctgcccccgaggccctcctgcactctccccggcgccgctctccggccctcgccctgtccgccgccaccgccgccgccgccagagtcgccatgcagatcccgcgcgccgctcttctcccgctgctgctgctgctgctggcggcgcccgcctcggcgcagctgtcccgggccggccgctcggcgcctttggccgccgggtgcccagaccgctgcgagccggcgcgctgcccgccgcagccggagcactgcgagggcggccgggcccgggacgcgtgcggctgctgcgaggtgtgcggcgcgcccgagggcgccgcgtgcggcctgcaggagggcccgtgcggcgaggggctgcagtgcgtggtgcccttcggggtgccagcctcggccacggtgcggcggcgcgcgcaggccggcctctgtgtgtgcgccagcagcgagccggtgtgcggcagcgacgccaacacctacgccaacctgtgccagctgcgcgccgccagccgccgctccgagaggctgcaccggccgccggtcatcgtcctgcagcgcggagcctgcggccaaggtactccgccgcgctcctgggcagctccccactctctccatcccagctcggacctgcttctgcgggactggtgggcaggttgaggggcagcgaagcgttgtggggtggccagggcaactctcggggacaggcaggtgggccccggggtggcggatttccgcgggctgcctcggaaccgagcttcgcgcccagcccggggccggttctgcgcccagacgatgccagtacgcccggcctgcactctggggctcgagacgccgggcgaccggccatggagtgccctgagggcaaccacacagcgcggggaccccaggacaaataagaggaatgggggcataaaggaaggagagaagttcaggactgggaattggcgcctcgcagagcggcttcaggaccacaagaagtcatttcggttgctttttcttctatttacgtcctccgtcccctttaaaattcactgctttgatcacgggaccgctcagtgaaaactgtatgtaactcttttggaaaggaacagtgtttgccggcccgccccggagtttctccaaaaagtctaccccgagcagggaacggtttggcaccgctctcgtttcggcggcgttgctgcctgtcttgctttcctcgttttgagccagccctacaaaaatgaaagtggctccttttgaataagctgaatcgggctttggatcacgaaatctgcagaggcggagaagggaccgggttagtgatgaggaagaagtctacccctctgttcctacagccgcacacaggacctgttctggcaggggagacggtggtgatgggggaaggagtggaatggagcaatgtctaactctctcgcgggaccttccggagagatgctcctcatcttcaggcagaggccatgtggaaaaataatatcgagttcagcagcggccagccccgcgttgtaggaaccagacagcggggcttggcagtgcgcttgggcgcagccgtgccgctgctgccggaccccagtgctgcctcctcaacacgggcagtgccaggagaggggcataggggagcacagtgcagagggactggtctagagtttactttataggaatatggttcggtgtgaccaactagggcttagcatagtttggcttacgtggacgggaagatgccagagccgaactgggtgaaattcgagattgcgtatttcaccaacacaggagcacagccctcgggaaactcagcctagtcaggcagtagagagttgtcccggagagaagtgatcctgcagactcgagaaggggcatgatgatagcacacgtctgttgagcacccagtctgtgtgccgggtgtgttacctctgtgacctcatttggtcaaacgaggaggcagttgctcctctctctctctttttttttcttaagagacagggtctccctctgtcgcccatgctggagtgtagtggtgtgatcatggctcactgcagcctccgacccctgggctcaatgattctcctgcttcagcctcccaagtggctgggactacaggcggatgccaccacacccagcttctcattcccgttttacagatagcggagctaaggttgaaaaacttgcccaaggtcattcagctggaatttaaacccagacagcctcattcagaggagtcagcccagcacttaactccaagggtgtgggagaggggtcaggtgctgtaaatttcctggtgggctggacgtgcatccccctcagagctgggaacagcatacacaaagcctaagacttgtttggaggtgaatagatcagtgtggctggggaacgttttgggagggcagcaggagtgagccaggctggtggcccagagtcccagggctgaagaggctggctgtgccccgtgccctgtgcgcagatgttcttgaactggagcaactcaaagcctagtgtagtgtagggctgacctagcagtggagtgcggaatgcatccagggtggagagtttagactactgcaataatctgggtgtgaggcgacaacattgaaaaagcatgtttttgtccaaaacaagccagctgttactggtctcgctgtttgtggtctcatcgcacggggtcctgagttgctggcaccatgcgagccgcctaatttattgctagtgaggcaagttgcttaacaagttttggagttggctgagtccctgtgtggaggaaaacaggtcccccattggccatcgggctcacagcgggcccccggtgtaccagtgaggggacagccacagagggataagcatggtggctttgaaaggagggagagacagagtgggtacaatgcttttcttatccctccctccttcttttgcaaatatttattgagctctgtagggtgtctgacaccgtttgcatgtttgtctgtctggcacatcggaggtacttggtacgagtggattagtgaatgaataaatgaatgaatgaagacaaacgggaggtgcttgcgatacacagccattctgtttttccttagtggaaggcactgctttgctgcgccccctctctggatctcacactccacccttgacttttcggaggtgtttccgaggacaggcgcctgggagccagcagacttcattcagtccaagccaggctccaggactcaacagctggtgcccacgggcaggtcacttgacgtcactgttaaatgaggtgaattggctgcctgctctggctggaagattggcgggagagtcactttagctgccatggacatgagccttttctaggggtgccacttgactagaggcctggagttggagcaagtcatacacggatctggagacagagctctcgaggcaggagcgggtgctgcgatttcaaatattataaggtggctttgtctggggcagagcatgccaggggatgagaggtagaaatgtcatcagatcaggggtccccagggaggtgactagcactttgggtcacagtagatctttggatagaggaacatgtcaccattcaaaggaaagcactttcatctgtaagctgtttattgaatagacctcagagaacatctctgctcaccgctctggaaatgaaggcaaatcatctatttcagaagtcaatgcactggcagggtttggatgggaaagtatacaattcagctagagaacaaagatctgtcatctccagctgtactggtcagatgattacaaaaaagaaaggaattgaaatactaatagggtactaataatgagggctaacatatatgttgtgcttattctatgccgggtgcatactaattcatttgatcctccggacagtcctatgagtgagtgctgtagtcttccctgggttacagctgggcagctaagtcacagagaagtaccttgctcaggactggtggtcccacacaactggatggagagcctcgttcataaccaccatgctgtgctgttgacagagcaacagagattttaaaccaaccccagctaagccccagctaatagctgaaataaacagggctccagatggctgtggcttagagatggaacaggacagatcacagccttcactctgcaggctcaggagcctgaagacaaggttgcctccagttgccgtcagtgcagccctcactaaagaaaagcaaaaagagccgagggactgtaggaaggctgtttccaagccagagatccagacaaactgctcttgaagagagaaagcccttccagattcccccatgtcccaaaagaccagccgggattccggacctctgctaaaacatggacaagaagccaggaacgagacctgaaacagacttcccaaacagcagaagcctcatccatttctcctgctagtacatcctccaggaaagcccaccctactccatgcagcagcccagacaagcttggaggtctgcaagctgcaggggtgcccagaaactccacccctggaggtttttaggatcgcctgctcctggtctcaccccagagcctctaaaggcagaggctgtatgtacatacctggtgaagaaccaagggcttagatggttgctttacttcttggagccctggaatgtttgtaaaatttacttttttttttgagacagtgtctcgttctgtcgcctacgctggagtgcagtggcgcgatctcggctcactgcaagctccacctcccgggttcatgccattctcctgccttagcctccagagtagctgggactacaggcacccgccaccacgcccagctaatttttttgtattttttggtagagacggggtttcaccgtgttagccaggatggtctccatctcctgaccttgtgatccgcccgctttggcctcccaaagtgctgggattacaggagtgagccactgcacccgtgccaaaatgtactttatttaggtgactctttcgtgggaacctcaaacaagcaatcattgctagctgagtgctgaccctgtactgagctctggggagacagggttgaataaaacaaagtcactgcccacaggtaacttatattcaatacaatgggggaaaatacaatcactgcttccctggggttgtatttttccattgttaaagtgggcagtttgctcgagagtcattttcactattggcaattcaaatacaccttttgtcagttaaaaaacaagtgtgccagggacctgagcttcatcttagggcagggtgggtggaaacatttgtgagtctccagcttttagtcacctgaaacttggaaacttggaggtcttttgagcagtttatgagtctctgcctgctctggtcggctgccttcttttattgctctgttggttttgctaaagagttaaaatattaaggcttcataaaattaggaagttaacaagctcaaaaaccaagtgtttgagttacttcattccactgagagagctgtaaatgggttgcattggaacttaaaataactgcattgagtaagtgatggtggcgggcaccatgagctaactgtggtcagaagcctgatggcctccgctttggggctggattctccgtttggagctgtgtgatcctggatgagtttcatgccttggattcagaaatcagactttccatgagcttatatttcaagtgaataaatagctctggtcaggcttaatttgaagaagaagtaagcttggcagtgggtgagggttccttggaaggccaactggggcggaggggctgagggcaagcggctctggcccttcctggggtgttacctgaccaggtaacagctccctcgacctctcggagcctcggcagtgaggggattgggccagttgatctctgaggctccttttaactagaatggtctgggatttttctaagaaaacaagtctttgaggaggttgtggtcacctcattcctaatttaaagcctggggaggcttccttatgagctacttctttttcctaaattattgatggttaaagccaaggctggcatcgaatagatgtgatccatcttgagcctggttgctttgtgtttcagctttgtactggctgctgaagtccccgggagaccacaggggtgacatgttcatctccaagagatgagcttccacgagactcataccccttgctccttccctggggctccaaggcctttgggtcatctgaagtgagatacccttgtgtcatttcatcttttccttctccaccttctctgccgttaaaaaaaaaagaagaaagagaaaaatcctattaatagagaaaccgagaagtgtagccattctgaatgtgtttccaaaaggctcctggaagtggcatggaagttacagtgattcagcactacttggtgacgtgtgcctagaaccacagggggacattagccaggacaacacgcctcaggacagaagtaagtggctgcgaagaggcatgtccatcactgccggaaagatgcagagttcagtttttggagtcagtgctgagagttccatttctaaattcattcagagcatttatttaacacctactgtgtgctcagaagtgtatcaggtatggggactcagaggtaagggctggtggcccctgatctcaaggtactcgtggtagatagtatgatgctcagcttaagggctgggcttctgaagtcggattgccattttctggatgtgtggtgtttcttgggtgacttcatctctaagtctcagtttccccatcagtaagataagagaagtaatagcagatacatacgtagctcttagggcattgcagaatggaaggacctccttatatgaaacgcaaagcactgtgcctgatgcattgctagaactcaggcaatattagcgtgttgtcattgtcatcatcatcatcatcatcatcatcatcatcatcatcatcttcaaggcactgacaaaggagtcagctgtgtgggaggagtgctgggacactcttgtctccctggggatgaggtgggtgggtgggttaggaaatcttcacagagaaggagggtgatgtgagacttctgtccgggagctgactcggaatttgccatctaatatgttggaaaaggttctctgggcagaggtatccaaagtcactttgcctgtcaccctttgaggtcccagttgttgcctatatcatgtgaccagtgtgtggcttctcttgaattaagagctgcatgtctggactgcctgggattttacagatgtcatctcgttaactctccctggagcttgtgacacccaggagatggcagtttatagaagccctggcaccttcttgaatgatgcttggtttggtttctatgcactgggaattcctcacaaggaaagatttgtcacatcttaaggaaggaaaaaaaggcaaatttgggagtccatggataccctattattttagattccaggacaaattgtcgaataagcacgtttcataaaaacaatcctccgcagcatcccgtgacagcagctggtccctcgccacaggataattatgtctccttgtgcacacaaaagtctccgagggcatattgttgtggctggagtttctgataatttccaaattgaacaacctcagtcctaatgagtcagaggcttgtgcaatattttcaaacctcaggaacatctttttcattagttgtgcaataaagatggtaggcctatctctgtgatgagctgtttttttttctcaaagtttgatgagattcgccgtagaattccttctcacatagtcttgggcaagattttacccgatcttccaacacatgagtcatctcatatcctgtgactaagaagagctgtctctttggtgccagttttctaagtgcagtcaccacttgatggagacggatggacacagttgggattgcccaggcagatgggcaatcttgccagctagacataggggagggaagcctcaatgttcagcggtcacatctgcttttctgtggcacagagtgagctatacaggaatattgtattctccaggacagttagggcagtgggaaatgtcatcaaacagaacagtgacccaaagagccactgccactgggtgctctgtgggagctgggcactgtgctcattgtgttatgggccttgctttgttcttaccttgtagccacccagagaggcagggcattatccttgcttcctagctgaggccacagaagaggctcctagaggttagctgtaacttgtccaaggccagccagtgcaaggaggcagagccaggatttgagcccatgtctgtttcactcccaaactattcttcagatttctttaagtcaagtgttatttagaaatgttttgtttattcatcaaatatttggtgggtgtttccagctatctttctgttattaatttctagtttaattctattgtgggctgagaatatattttgtatgatttctattctattacgtttgttagggtgtattttctggtctagaatgtggtctgtcttggtgagtgttccctgtgtgcttgagaggaatgtgtgttctgtcattgttgaatggagtgttctataaatgtcacttaggtctagtggattgatagtgcggttcaggtcaactgtatccttcctgattttctgcctactgatctatcaattcctgaaagagaagtgttgacgtctcctgagtctattctgaaacactgaattgcggtctccatgatgaaccactagagttagaaaacctgggtcctagccccatttgggcctttgggatgactcccttctgcctcagtttcctcatctacaacagggggacaatgatgctgcctaggagacatcagcaggatactgtgaaagtccagtggcataaggggtatggaggagcttcgtcaactcctaaagcttcagtgctaggaatcctaaagcattgaaatccaaagatataaggaatatgaaggagttttgtcaattcctaatgcttcagtgctaggaatcctaaagcattaaagtccaatgatataaggaatatgaaggagctttgtcaactcctaaagcttcaatgctaggaatcctaaagcattgaagtccagtgatataaggaatatgaaggagttttatcaactcccaatgcttcagtgctaggaatcctaaagcactgaagtccaatgatacaaggaatatgaaggagctttgtcaactcctaaagcttcagtgctttaggagtcctaaagcattgaagctgtaagagattaggacctctagttggcaattccagactcttccaggactcctgatagagccaacaccaagaatagtgaagccagaaggatggaaatagtaaaatgcctcctgggtgtcaaagcatgggtctcctctgggcatgttctcttgtcctactgagacatgatagctcttggccaaagtgactgaacttgaccctctgtttcaggaaggccaaatgcagggttcactaccatcatgtccaagggcagatgcgttggtccagaacatcagcatcccaatcattataccaagcaaacagccgtctctgcctgcaccgtggagagcacacgctcctcctggggtggcctgcatcctgtgttcttctcaggccgactttctgtttaatgtttgctggtcaggaaatggcctgagctgaggttcttcagatcccagtctgacctttctccaccagcatttgtggctctgaaaaatatagcccagtgtggtttagccccactggatgaaacccagtaggaaaagtctgataatagcagaagacgcacaggaggaagagtgaggatttgagagcatctgggaaggaccatgtgcctggatatcgttctgtctgtgggattctgtgacacttgtcatttacagtctgttcccatggaattctcatcattggccaaacatatagtccttctgtcctctgaaaaatatcattctgctccgacctttcacacccatctctgaccacatcaactccctgtttgcatgcatcttgtggatgaaggacaccactttacctgtaaagacactggtggcttcccaaagccaccaactgacttgtagagaagacagaatcccagagtatgaaacctgagggtgaagggtcctggcaggtcctagagctcaacccttcacttcacaggtggggaaactgagggagccaatgggaacatgactctcacaagctgcacagctcatctgtaggggccagtgtggagtctgtttgtcctgagacccagggctgagcctttgagccctccgcatctcagccgcatcctcctgttggagcagttaggtgtttgggagaggccacggtccatgctcatggttttcctgtaaggctggagaaacaggccttgttcccttagtctctctaatcaaaatgaggttgcagaaaacccttctccctacttctccctaaaataatttccttgggttagaagatgactaaaagactattcatccgatgactgatgtctcccttcaagagttataagcacatataaatgcctttgaatggtaattataataattttgctgaagggaaaatatcagtataaatatcatggtggacacatggaatgaggactgagatgctttcatgtcttttcagctgtggttagattttctttaagcagaatatacaagtttttcctctcctagcataaggactctttttttttgtatcttttctctctactttttagacatgatggaaaatgcatttatacatttgatgacatattgtactatctcagttgtttaaaattataaatgtaatttaatcatatgaaaaattaagaaaagaagattcatatttcaccatcatctccccagaaatatcatttctttattactattattattattattattattattattattattattattattttgagacagggtcttgctccatcacccaggctggagtaaggggcacgatcttgactccctgcaacctccacctcccaggttcaagcagttctcatgcctcagcctcctcagtagctgggattacaggcctgcaccaccacacccagctaccttttatatttttaagtagagacagtttcgccatgttggccagactggtctcgaactcctggcctcaagtgattggcctgcttcagcctcccaaagtgtggggattacaggcatgagctaccatgcctggcctaattccatcatttctgtcccaagtgttgccaccgtttggttaactgttcccctgttcacatccatttgggccaaggttgcaatgttaaacaatcctgagatggacattttcatgtttatggctatttctgtatctagggtcattctcttaggagaggtactaaggagtacaaaaactgggaagaaggatatggaatttttatggatctggtataaattgccaaattattttccagaagggttgtagccatatttgttgccatcagctctagaatttcaacctcgtaagtcactgaaagaaattctcccaaaatcaatccttcaggaataatggaagaagatggtgccaaaccccagccattctgctcactgttagattccttttttggtcttacaggttacttttattctcaggttgatggctcttagagttgagcaatgtttggggtagaataacgagcacttttaaaacttggttctacctggggagggggtgagttgtgatcacagacagtctcacctgggaggggcttgggtgtttgtcggcttgtccttctaacactcgtgtctcaggcgagcagcctgggaccagtgaggtgacctgaaggctggaggtcacaagctaagaggcgacagagaacccaggtctcaggaagcccagcccagagctcgctgcactgagcctctcggatgccagctctgtccaggatgcgggaggaggccagactgatttggtctgttttgaaaagtgatgaaaatatttattcaaatgttttgtactcataggcagaagtataacaggagctgcatatacaaaattattttctagtagtcacattaaaaaagtaaaaagaaagaacacgattatttttctttttaaaacagctttattgagagataatttacatactataaaatttacccctttaaagtgtacaatttgctgttcttatatattcacaatcatgcacgtatcactaccagctccaggacactttcatcaccgtaaaaagaaaccccgtatccattagtagccaccccatacttctcctctgcccagccctaggaaaccaccggttcattttctatttctatgaatttgcttattctggacatttcatataaatggaatcaaagaatacgtaacgggcttctgtctcttagcataatgttttcaaggttgtccacattgtagcatggatcattatttcattccattttatgattaaaaatatgccttttaagggatacagggagaccagacgtctattttatctcccctccctgatggggaatcctaatttcagcctggaaagtcactgcgaaagtctaaactgcagaggtgatactgtttccactggaagaaactgtagcacctgactcaggaagccagcattaaaaccaagaatattctatatggatggggattacgcactgaaaggaaaacatgaggaaatgcacttttcagatttattagatcatagaacttttttggagctggaaaggatgtcggaaaccgtctagcctaccccctcatcttaccactgaggtaactgaggcccaggaaggggaagtggcttgttttgggtccgggaccactcttcatttcttatttgagccaaagcttccttctggcgtctgtctctgtttcacaagttcccctcgcatgggggctgggtactgcttggaagaactggcttcttccttgatacaggggctcgttcaccatcacctccctccctcacgtctcttctgcctctctgcagcctcaggccctcctcctgcaccaggggggcagactcaacccgggtgggcactgcctcccagtccgtggccagaggctggagggctagggagactgaacagccccggcagctccagacataacaacctatgttgaggagtcagggcaggaagcgaacccagctgagaaatctgcgaaggtcaggaccagagccagacgcttatcaagagcaaagttaatggtttttgtgaaccgagcagtcagctgtttccccgaagataataatagacacatcatgttgggcattcaggaggcatctgaaaaaaaaaatgtgcagtggaattgattggaagcttttccctaatgcataaaataggccagaaaagactatcaaatgtaacagcaccgatcaaacccaatagatcaagcaaggactgaaaaacacaattttttttttctttgccagtgagtctgaaaagtgattttcaatgacaggcgcctttaaacatagacaacataaacaacaacatagttgttctggaagaggcatcttttcccagtaaagccaaagatgcagatctaggctgtgcttgtgactgacagcacagtgaggggttcacagccagctggccaggtgccccccgaaagcacatttcgaatctactctatttgagagagactgccttagccttgtttgggtaagtcttcctccttcacttcacctgccacagacttttccaggcaccatctgctgcagtcttggcccagcccctgcaacagttactgctcaaggcacccgggacatgcaggacgggggagcagcctgaggtctggcgtccggcgagcttttcccacttggagccgtctgggagactgtcccggaaagagaggggctgccaacacttggaagtgccaatgtgtgctgcaagtcgaggccaggctcccggctcccccgcctcttcctccttgattcattaaaaggaaagaaagaggccacacgaaactctcctgaatttcatttctttgtttctatgcaaaagacagagcgtggtcattcatcattcaaattttagcctttttaaacaaataataattcctgcttgtgaattcagtgtattttaacaagagtaggtctgagggccgttggccgtgtctttccttagatttgcagacagcggccctgatggtgcatagggtttcaggtttcctttagacctcagctggctgcctgggccaccacttagcaatgccattgtccttcctgtgcattttctttgcagaattcgaggaaatccagtcgcacaggcccctctgtgcccatgtccccggcgccctggaatgtgcagtaccagcagcagcgattagaatgggggtctggtttcccggaatgtgcaaggtctggcttctgtttctgctgcctccatgccccagaccagtgctgggccgggctctgggctggagccgtggctgacaagtttccttggaatttaatggagcgggccagacagcatgcagccactcaaactgaaaacctgggaaagaaatgagtgttgtggggcagctttgctgcattcactgggtcatatatgcttctttttcttttcctcaggcaacccctcttgcagacaggaggccccctcccctttcgcttcatgcctcactggccattaggaaccttttaaaactgatttctctcctgaccctcagagagaacatagtccaagttccctggaggaggaggaagcgctctgtgtttctctgcagttcacggctcagttaaatgcagcctacgtgctgtctttccccactcctctgcctgctcccgttgtgcttctcatgatcattctcaaattcagcgagaaacctcacaaagggagcttttcttagggaagagtcatccttggcctcccgaatgtggaccagcccctctccccagctgcacagcatcaggttagttaaccacctgcctccatctgggtcctgtctggacaggcctactcacacctgctgcaggcatccaacttgccctcaggtgcctgtggctcgtccagaggggtggagcccacattccagtcctgacaggtaaagttcagtggcggggaccctgcatttagtgtaaagatcaatattccaggtcctctcttcctgccacccagcgactggccgtttgcaggcactcggtcccagttgtcctgggcctgcagcccttgcattctctctgctttgtctctgctattgcacccctgccccatcagaaatgcaggtgggggggccttccgctgggacagtgagagactgggtagtaaggggagcgctagagggatggttgcgcttgcatccagccctgactgcattcgctctcccccgcctctctgtgaaggtgctgagctgtgagtggaaccaagtggatgagagtggccttgggcacctgccgataaatttcccggtgtgtcttctcctcctgggagtcccatctggatttgggtctggatttatttattcagcaagtagcctctttatagttactttttttttttttttttttttgagatggagtttcactttgtcacccaggctggagtgcactggcgcaatcttggctcactgcaagctccgccttccaggttcacgccattctcctgcctcagcctcccgagtagctgggaccacaggtgcctgccaccatgcctggctaattttttgtatttttagtagagactgggtttcactgtgttagccaggacggtctcgatctcctgacctcatgatctgcccaccttggcctcccaaagcgctgggattacaggtgtgagccaccatgcccggcctgtagttacttttaatttagccatgctcggggctgaaggggatgccaaagaaatataagatgagcccctcagacggctaaagatgaagatgaggcctccagtatgtacctcccacatacaccccaggaaattctgggtgtcactggattctggacctcccaaaagctgctggcacctggaggatggggccccgaggctggacctcactcctgctgggttgctggactgggaaagtactgatggcagctgaggagtgtgtcccagacttcactgagccattcccaaagattattccaagttctcctgacactgcactggaggcctgctgtgctggccttctttatttacagtttctgactggtgtctagcagccctgccagagagagcggcagtgtgtctgcaggcgaccaggagaaatgtctcaggctttagagcaggactttgagcacatagctgtgggggcccagcaggctgtctcctgcacggttacttctccttgtcctttcatggtcgagaggttgctgcctggcccttcaagtgaggatgggacatgctatccattggccttaatttccaacctctgcatgatgcattttatgctcctgcctttgaaagaacttttattttcttgtcatttatgcccagaccccacatggcagaaggaagggaggctgggacaggggaggcggataagctgccgctgacagacctgcccagtttcttagctcatcccggcctccatcctggtgagcagacactggcccaatccagccatatttttggctgagtttctgtcttcacatctcatccttaaccctgaatcctggccatagttggtactgggttgtattcttatttgtaatctttaaagtaggaatacctttgctggtatttaaagtggaagaaatcaggtgaagaatcacaagtgatttgcaaactggaagagacattagaatgtaaatgtgaggaagcgtcagcatgaggggcttgcctgggctgcacagcttgccttggctggagtatgcactgttctggcattgcagagaggatgggtaccttgcctccctgcaggtgggggactgtatcagcccccgcagactgctcctgggctcctgagtttgacagattttttttttttttttttgagacggactctcactctgttgcccaggctggagtgcagtggtgcgatctcggctcactgcaagctccacctcctgggttcacgccattctcctgcctcagcctcccgagtagctgggactacaggcgcctgccaccacgcctggctaattttttgtatttttagtagagacagggtttcaccgtgttagccaggatggtctcgatttcctgacctcatgatctgcctgccttggcctcccaaagtgctgggattacaggcttgagccactcgcccggctgagtttgaccagattaaggcagcatctccagtggcacctgagcagctcctgagatgcttttctgtgctaaatctggatttggggtattaaatcaaatgaatttgaaatgcaggcacagctggccccatgggcatggacctgtgcagtcacaccttgccccgtgttcagaagggtgctgtgcctgttttaatgctctgctgttgctctcttgagattcttaataatttttgaacaaagggccccacatactcattttgtactgggtactgcatattatgtagctagtcttgaatctaggacagtgcattaaaatgccattgattggatcaatctgctcttgcaactgatttgaattttgggaacatgctgtttcctgtgaataaaggaggattcatttcttttccctcgaatacactgcgttctgttttccaaattagctctacgtatcaactcagctgagaaattggaagcggggattgttctggctggaagggaaggttagattgttaatcctgcatcctggccctgatctcaccgagtgtgaagcatgttcccacaatggtgtgggctgcggggggctggaggctggctgagaaggtggggaccaaggagggaggctagcctgggagccagacagatggggttaggctcttgcttttgccactcgccagctctgaggcttagggcaacatgatttaattctctgatccttgtttttttcatctttctgtagactggtgatgagatgcaccctgcaggcttgcaggcttgcaggagtaattaaaggtaatatttgtgcctattattgggcttgacatatagtagatgctctacaataaatagatcctattattcttattgataatattattttattgctaacattgaaggttgggtgggatttgactagctggaggcgaggagaatgagatcatccaggccggaaggaaaagagacatgaatgcagggggatggggtggagcactttggaggtgtggggagaggtctgcagggtgggagttgtgcattaaggagtcgtggggagagtggaggaatcagtgccacatggtgaatgagaggggatcgtgggcccgaggagatggcgatggctgcggggatcctgcaggaagtttatgtgccccaaagtggcattatcagttagggggagacactgaagacagaggtgaggcctgcctgaattagcgtagagtgggattcttggaagcttcagaagcttgagaagagccacttggaggtgttgaaatgcacctgggagggacgtggggacccagctctgggctgagagctgggagacggaaacgcaggtgaccttggccttgaagatggggcatgatatttagtgctttatgtgcaatctcacctaggactcccaagccctttggagtaggtgatattagctccgtgttacagaaagggagactgaggctgaagcagggacattcatgatctgaagtcacacagctgtacggggcagaagtgggcatggaggcattaacttagagccgaaaggtgtgacctttcttagtgtggctggccccacggggaacgtgtgtgggttggagtacaacttggtgttcctacccatcccagatgctctgcgtttgtgaaccccagttgccacatcagggcgggcgagggcaggaagctctgcagggagaagggacaagggacagagccaagaacaggggcagtgccccagggtcctgcaggggcaatgaagggggttggcacacctgggttagttgctggccagtgtggggagagagctggcctgggagtctaatgggaatgccagggaaagctgccttggtcccctaaagtgaagcccccatgctggccatggagtgttggtgattgagggtccctgctagttgtctggccgaggcagcatgtcctataggcatagctctggtgtcctgctggcgtggcgtgagtgcccctcatgctgggagccagccctgtgctctggagggaggtggtgggaggacaagggacagtgggacctgccacctgagcaggaattggcaccttctcccactggcaggtccaggttttatggaatctgaaacttgtacaattcagtataccctcttcaagaaaaacacccctcaaaattatgaatataacattaggtatgaaactattattgatatagattgaaaaaagaaaatgcccaaaatgacaaacttcagaaaatagacaaatactgcaaacatcacaaaatcagaaaaataagattaaaaaaagctaactgctgaacactccgtcatcttgaaaatgcccctctctcctcctctattttttggctgtgaactctttgctcaccttttcatgtgacaatgcttttgtaatatttcctacagagaaaatagaataatttattattacttttattgtttttggattattattatgatcaattcaatatttttctgctacccacacactcactgtcttctgtccaacctctggcctgcaccaggggaaccagcagtttcccctgccatagggtgtccctggagaccacacatatagcaggatagatatagcaatttaactagacacagaagggacttcaaagccacaaatatatctcatttaacctgaacaaaatgattatccagttttacttttcccttagcctcttcccccaaatgctggcagccaccctgatgggatagatgtgtgacagagggcaagagaccgtggccccaaccagctgcagcttcactctttcatttctgtatactctctacaagctgtgatgatagcactttgctagggcccctcacagggcagatggagggctccacgctgaagctttgtggatgtttgctgtctatccacctctgctccttgtgcctatgcagggattcaggcccaaccactgcagagagcccaagagcatcaggcagaggttcccaaactgtcatgattggtggcacctttagtagttgatacggtttggttgtgtcctcacccaaatctcatcttgaattcccacatgttgtgggagggacccggttggtggtaattgaatcatgggggcagatctttcccgcactgttctcatgatagtgaataagtctcccaagatctgttggctttataaaggggagtttccctgcacaagctctctctctgactgctgccatccatgtaagacatgacatgctcctccttgcctcccaccatgattgtgaggcttccccagccacgtggaactggaagtccaataaaacctccttcttttgtaaatcacccagtctcaggtatgtctttatcagcagtgtgaaaatggactaatacagtagtgcagtcattttttcatggtccccagtaaggccaaaaaatacccaacagttccatttatcaattagtggaggccaaacaatttgataagtatttgtgtccctataacacagtggtcattaaaaaaagacattttaatttcattattcaataagcatgattacttatgaatgggatatgtgcacctgttgggtgtcacatgacctttcaaatcttggagtcagattggacaccaccatgcccatttccagttcaactctgatttttgtgtggtacatgctttttatcacagtgactgccagaaatccaacttcatatggaatcatgaaaagggatgtagtgtgatctgatttcaaaactatgatcaatctagagctagtttacaaggtgtctaacagtgatcaagtatcactgtatttccctagaaaacctgaaatatcgatgaattttctgtggcactctggggtcccttggggcacactatgggaaccatgggattaggaccataaggatatgattttggcttcttcctgcctcagatctaatctttacctggcatttttgccttaaagatgaaagaagcatacattttgatgtatttaaagcacatattcggccaggtgcggtggctcacacctgtagtcccagcactttgggtggctgaggcaggcagatcacaaggttggaagtttgagaccagcctgaccaacatggtgaaaccccatctctactaaaaatacaaaaaatagctgggtgtggtggcatgtgcctgtaatcccagctactcaggaggctgaggcaggagaatcacttgaacccaggaggcagaggttgcagtgaaccaagattgcaccactgcactccagcctgggctacagagcaagactctgtctcaaaaaaaaaaaaaaaaaaaaaaaagcacatattcattttgtgcttattcttttgagagaaacacagataaaagcctatcctttaattcatactccccatactgtgattttcatttttactgcaacaaattttgttcagtgtgataatgaatgtcaaacacttaatgccttgctcttttcagtaacatgacatattggagaataatgactgaagcttatctacactgcctacgtctgttttcttccaccttgaaagaagttgttgaaagtaattaagaagtattatgtgtaaaactccagggatgatgtgcttcaaggaagcaacatttatgaagttgtgtgcttgactagtagtttataaagaggaaagacgaatcatttattgtcttgggattgaatcttggcaatttttaaactataaagttacaggaaatgttggctgctcttaatgggccatttgttgtgttaaaaatcagtaatgagaaatatttactaggtaagtggaaagatccatctctataaattgttgtaacttaccattttacaaatcttagttactcagtttttctgcttaaaaatgaaatcatgtagcactgtataagtcattcagttttttattttggagaattactctggattgtctaggctctgtgctctccacatatatttttgaaatagtttgtgaatttctacaaaaactcctgctcagaattttcactgagagtatgcttaatctatgggttaatttgtgagaaattgatagcttaacaatagtgaatcttctgatctacaagtgtggtatttctctccatttatttaggtcttctttattttgatagcgttttgtagctttcaatgtacagatcttgcaaatatcttgttaaatatttccctaattacttgatatttatttttgatgctgttatagttatattttaaaaattttgattccaattgttgctaatacatagaaatgaaattatttattgacctcttatcctgtgacattgataaacgcagtcatatattcgtagatttctagaatttttctatatagactatcatatatatcatctgcaaataaagacggttttacattttcctttccaatctctatgccttttgtttctttctcatgcctcattgtgtggtccattactgaacggcagccagttccagctttctgttcaattaaggagcaggtaaaatggccaggccttgacctttcagggggcttcccgtcctcattgccttctgctgcctcagttctggcttaacagaacagtgtggggaggaggcatggtccttacctactagggcgttacttggccttcttcaggttggttgcttcgtcaggtttaagagctcacctgggctgcagttcaggctaggttatctgctgacctggccctgtctcccttctgtagtgtctgtggggtacccttgtaagctagggagaagagacacacgtgaaggccagaaaaaacagcctgccacacagcttccctggatcataccttcgcagtgacatgacgacgtcgttaggaggcgccgaggtggctgagtgggtctccagacacctccctttacctctctgctgtgccactgatgtgtgacttgcttacacctatgcagagctgccactgagcagcactgtggccagtcctttggattttcttctttctaaattgtatgccgtggcttgatcaagcatttcatatacagtagatcatgaaatcagcatagaaaacacattgaggtaggtggtgttaccacattttatggatgagaggctaacacttggaggagtcaggtaacatgtccaaggccacacagctagtgagtaccctgctgagggtcacactctggtccatctgaggccagagcctgtgccagccttctcctcatgctgatagacgaggaaacagaaagaaggagcagtggacgcccccaccctctgtcccctgaaccccttggagagtaggcagtggcagagccagcctgggcccatctatgggaattctccatcgggattgactcctctggaaggaagacagttgacccacagttgagatcacagcagatgggccagccagggtgtctgtagaccatcaggcagtggccactccatgtagtttaatggacaagcccttttaatggaacaggaatctaacactgaaccaagctgcttttagacacacttttattcctcactctgaaatggcgtttggacaagccaaatatttcttcttctttcagttgacattttgtccatctttgaactgttagttgatgcttcttctgtttagttattcctgttctattttcctgttgccactagtccacccagggatggtaagaatggaagtcaatggttgctttttcatctgagatgcaccacgaaggcttgtcagtcagccttgtcatatggtctgtgctcccactgctccttctttctgtttcctcatctgcagaatttggagagtcctggacctgatctcaaatttcacatgttatttatcttcctgcagcacgctggggagaggaagagacagggacatagaaggttggagctggaacagacttcacatctcattccagaggcatttggtccatcttacagatgaggaaatggaggctgctcagtggactgaggctggaactgggccttccagtggccaggccagatcctccttgatctcccttgttgctttcctggtgggaagaccctggaaccactttatgtgactgtgtgagaagggaactgcctctcattttacccagcaaaatccaccttcaatccatcttcatttttgcccctggtgtgggcaaattctcccatacctaattcaggaagccagaaagaggaagtgagttaatgatccttagtgggaaggcgctggtaatggtccttcttgtgagagtttctgaaacaccacgctgtctctgtgttctggcctggctggagttaaacctcttcttggcctttccccaggaagctggtctgaggaagcccagatgcgtttgtttacagctgtctggtgacattcgccaggctctgttttcagaaggaacatttccattcccttatttacacctcccattggagtgctcggggggacacaccaattatttgcaactacctggaaacctaggagggtagcagatctgtaggaggccagtgttgaagtgagaagctgtagatctggtgacactgtgggcttgggagggcttgcccagatctgttacttatactctctattaagaaacttcagtgtccatggagaagttatttaaagtctgcgagcctcagtttccccatatataatatgggaaggatacctgattttcctattccacatgaaggtagaaaaaattaaattaaggcagccaatgaaagggttttgaaagcaaaaataataatatgatactgttctgaatttgttaaattattcttccaagtagttgcagatctttttctgtaccttagaaaaaaaccatgctatgtaaaaggagatgattccaatctttaaataaagcaactcagaggtcaggggctaggacagaaaacggccctttgttcacagaagcgctctcacttccaagaaagcaagcgtgggagaggcaggtggtcctcccgatgtccctgtgccccatggtgtcaagctgggttactatggcccttcgtgacccagtgcagcagggatgtgggaaccagtgggtgtgaagctgtgacgggtcacaagagggctgggacgtctcacagcttttacttatagcctagagcctggggaagggttgccactctagtgatgagagaggcgtgtgtgtgtgtgtgtgtatgcgtctgtatgtatgtgtgcatttgcatgtatatatgtgtgactgtatgtatgtgcacatctgtgagtatatgaatgtgtgtggaagtgtgtataggtgtttatgtgacagtttgtgtgtaaatgtgggtgtatgtgtgggtgtgtttatgcatgtacatctgtgggtgtgtatgcatagtgtgtatgtgtgagtttgtgtgtgtgtgtgcatttgcatctctgtgtatatatgcatgtgtgttaggggcaggcacacaggcctgttggtaaatgagacacaaaatacctacaaaatacaaaatgtgagacaggaaatacaagccccagttactcatttttcagtgcaacagacataagattaccatgtgaaattgctatgaaagtttccgaaagcttcctgtcaattcgtagtgagcagctagcagaggagtgcgggtccctggagcctgcttgtgcaacgctgagctagtccaagggggaagaatggggtgcatggctctcagctgcagaccagcctggaacctctccagcctgctttagcagagacttgttaagaggtagcagcaggtggcaagattaggagccggagtagtaggctaaggctgcacttccagggacacactgcctctgccaccacccgtgccacgaaaatgggagcccaggaccctgaatctctagcagtccgtttctgaatcagttaccttgggtatgtgcctctggttgatggaaactaacttgtagccctgctgggtgagagcctcacatcgggacatgtgacagctttgttgaaagtagctttggaaacgcccaccacgtggggccactcactgtaatataaacggtcatgcatcactgagcaacagggatacgttctgagaaatgcgtcgttaggcgatttcatcactgtgggaatgttacagagtgtgcctacgcaaacctagatggcagagcccactccacacctaggccagatggcagagcctgttgtttctaggatgcacgcccgtacagtaggttactgtactgaatactgtaggcagttgtaacaatggtgagtatttgtgtattcaaacatagaaaaggtatagtaaaaacaatggtgttatggtccgcggctggctgaaacgttatgtggtgcatgactgtaggtataaagcattacagttgtttgatttttctctttttctcacccacagtcttaaggcacctcttatgccttttgtctgggatgtcccgggcagggttggaacgtgtggttaaggcatggcggaaactgctttggggacagacgatggcctcagcttgccttggggtgtcagtgggaaagataggagctgcccctttgccttcgtgtttcttcgtaataatctcagatgtacccgtctggtgggcctctcctagaaaaagccccggtgctctttgctcctgcggtgtttctcaggagggttgttgcttctttgtaatggtggggactcagggaagggacgcaggcagagggtgatgccacatcaaaaagggacccttggctgggtgtggtggcttacgcctgtaatcctagcactttgggaggccgaggcaggtggatcacctgaggtcaggagttcgagaccagcctggccaacgtggtgaaacccggtccctagtaaaaatacaaaaatacaaaggtggtgggtgcctgtaatcccagttactcagtaggctgaggcagaagaatcgcttgaaccggagaggtggaggttgtgatgagccaagattgcgccattgcactccagcctgggtgacagagtgcgactccatctaaaaataaactgaaaaaaaacaaaaaacaaacttgggccatcagcttcttggaaaggctggtgtgaggttgaagcatttgctggtgcctctgctcaacgtttttgtggtgaacctgagcaaagaggttatcattagtggattttactgccttacctgggtgggcactcccttgggaggtggatggacatttgcagctgagcccaggtgggggaattgcgctcactccgccttcagaattccaaaggctgggcatgcatcttggcttcctctaacccatgtctttctctaggtggccacagcagagtgtcattaagtatctattctttgcttttgttctcagggcaggaagatcccaacagtttgcgccataaatataactttatcgcggacgtggtggagaagatcgcccctgccgtggttcatatcgaattgtttcgcaagtaaagagagccttcctttttcctataacctccgaagctttcaccgccactagcaaaacatgagagctatttttgagatacattaaagtgtcaaagtgtcactgaatatcttcctacttaagataagtgtgtctcccttagaacattttccctattcgactatataaatctacattcttgacccttctgaatgtttaaagaacctcgggctctgaagagattctctaagaatattttgtaagtggaagtttttgatgcatgcaaaaaattggcaggatgtttagtgtttaaatgctaagcccgatatataaaggagcgatggctaggtgtgtgtggctgttgcacaacccattaatcaatgcgttgaagcgttcattttaaggtgctacaggcttaagtgtgtactcctttggattttaggcttccgttttctaaacgagaggtgccggtggctagtgggtctgggtttattgtgtcggaagatggactgatcgtgacaaatgcccacgtggtgaccaacaagcaccgggtcaaagttgagctgaagaacggtgccacttacgaagccaaaatcaaggatgtggatgagaaagcagacatcgcactcatcaaaattgaccaccaggtaagggtgttctcgcctgcagaggtgagttctcagatgccccggaacacccttggcaaaggcaccagagctctctgattgcagctgattctcggggggcactgaagccagtctgagccagtcacaggagggccttgaggagatgctgagtatggcctgggggtgtgggagaggaaggggctcaggaaaacttctgtaaggagccagataaaagtttttaaaataatgttttaaatgtttgtcaaagaaagcaatagatttgtaaagaaattagtaggtaagtagtgaaaattgattctccttcccattcccaatcctgtggcaactcttgttacagattttatttatcctccacagatacatcatgcgttcacaatgaacatagaatttactgggttttagactgagccatccttaacttgtcaacagttactttgaaaacaaaccagctctcccaaattggggttttgcggggttatgagatgtgtttcaaaagaatgtttcgtactttaaacatcttggaaaacttgaattaaaacagagctaatggatttcttctttccagaccttctcagagcttttagtatgctagtgtgcacgtggcttgcctacaaaagggtgttgactgaactatttgcccaaattataatcatttgagtatacagctttttgtgggggcaggcagaactgagacataccaaaatcagtttgggaaatgctgtatttgaaaatgctttctatttaaatattctctttgcaatcatttttgctctgttgatttgcttagcaaagtcttcatgtctgggacaatatccatttcttactgactcatcaaaaacccccactcgacacgtcgatgagagaggttttgtttgctgtgtggcatgttcagtgaaagcgtggtttccagtttcttcacatccttataattttctagacttcagatggagggaacaatcagaggaggctggaatcctgcctctgaccaaggaaaagaccagaggctgagccaggtggggtctcttgtccagccctctgcttgcctcgctttacctgggtgtgggctgagtaattccagacaagcgtggaattaatctggctgtttgtgctgttcagtggcacgctggttacacctccttctggaaacaactctgcgtgtgctgtttgggtggtaggattccgggtctccttctccgtctttttataacatcaagttgctgcccagctcaggctcctttacggccagtcttcagaaaaccaccagctaacacatttactaccctccttccccgatgttcctgtagcttctctatggctgggtggccaggcatggccgaagaggctctgggtagatataggctctgtgcccggtgtgtgtaactggccttgagtgaggctgcagttgtgtgttatttctattaggtcactgtggaatttctagcgacaactaatctttcaaagtgtgtttattggtcacaggattattgggccagcctctgccttcattctttttcacctaatctgcataatagctgtgttatccccattttagagaagaagaaacaggggctcagagaagtctagtaacctgtgtgaggccacacagcaaacacctcatgaccctgccctcctaaggcagcccatggctactgctggagggatagaggccggccccgtggtttgatgggacagcttgaccttaaacagcccatgggaaggcgggtgcatctggtttaggaacaggctgctagaaaggtatccaggatgtggtagtctcaccggaaggagccagtcagaatagcacagcctgtggccacgcgtgggacctgttcagcctcatggagctttgggaggcagccagcagcagggcatgggctgtgtgcaggcgaggcgctggcctggacgccgcccccactgcgtaacttcgtgtttggaatgcgtgggcacataccgtgcggctgcttctggccgggggatattcttttccaattttgagccaaggtggagactgtctcctcgtgccatccctggcatgtcctggcaagacgtgaacgatctcaatagacgagctttgcagagtgtgtctgacctgactcctgctgtcttgggagtttagctcttcagccagcagcatgctgtttgacatgtgtttcaagccccccaagaaagggtgcttgaaatttaaaattgaactgatgtggcttttcaaaatggaattggaaatgaaaggatattaaattgcagacacccacacaaaagactggtttccactgactaaactgcttttttttgctgatagtagttgaaagtagggagagtaacagcatctcttccagctttttctcttttgttcccttgttttgatgatgggttatttcgggggaagctctggctggccttgctttgtgtcatcttagggataacaaagaggatgaaagagatcaggaaaaccgagaaggcagaacagaaccagcagaaactgtgcttgaggaatgaaaatcacctacacggctccttgtcatatgagactgtggcccagcctcctgcaaagccatttaagagtaacccagtgaagctggtgagactgcctgccgcgtccgtgggcccagtgactaactcggtggcttatcatctgggcccagctcctcccctggcatcctgatttcacttggaggggcccccgttgtccttcataaacatgtttatttcattttatttttatgttttgagacagagttttactgttgcccaggctggagtgcagtggcgccatctccgctcactgcaacctccacctccaggactcaagtgattctcctgcctcagcctcctgagtggctgggactacaggcgtgcaccaccatgcctggctactttttgtatttttagtagagaccgggttttgccatgttggccaggctggtctcaaactcctgacctcaggtgatccacctgcctcagcctcccaaagtgctgggattacaggtgtgagccattgcgcgtggctgtaaacgtgatattcttgagactttcagtgaaataagaattgccacggacatctgtggtcattgtccacttgccactcacctacccccttttctggcagcaacagccggcatttcacatgtccatcatcggacagcgtaggtgggaccatcagtcatggtgtcctaccctctgtggccaaggagtggacacaggacccagttagggcaagcagaggctccccttggaatcgcaaagtgaagctggatgccacccacagagactaacatggtgaagctgctgtagcccctgctgttgagcccccagcactgcctgagttcttgcactttgtgagtccagtttaatatctgcttttcctcccattcttggagctcccctcacatctccagtggcttgaagttgccagagatgtttctgggcttgtgaccaaatgactccttttctgcttctcactgctgagcagacacatgtgcgctcactttgcctgctgagtcttgggacccggaagagcttttgggagacaatcacggaccagccccctcttgcctgccctgctgtctccctccaagcaggaggtgagaaggtgtccacctgcagccccggccaggcatccctttctgtgcttctgcccaaatctgaaattcccctctccttgggacccacgactggggccagcctgcctggggagggaatcccagctgcagaaagtcgggacagtgtgcgtgtaaacatgttaatagaaagcagctttgagggcagactagttcagcttcagttacaaactctttccaaatgcgtttaacatgagccactggctgtgcgcagcatatgtcaagctttcatccaatggtggcattttgtccctgcggggtttttttttcctgagcagtttggggcaggggtggggacagggagagagaaaagtaaaaagagagcagtttggtttcttcaggctggagtacaaggcagaggtaatgggatgtattgaagaaggtaggagggaaagttactttagctacagctatttgtccagctgtgctgattaagaaacttggagaaaagcatctttggaatcatgtccttcccatcttatatacagcctttgcagatttcctgctgttctgagagagatctgaactccttaccaggaccttgagggccccacctgattgggcacccctcactctctctgcccctcctccccttcccctcctcccctcctttctccacccccacctgctctgctcagacaccccttccttggttgcttcccacaggccagggctgtcccctggggccttggctgttcccctcccaggagcgcccctctccagctcctcatgcagccaaccttcctgtccttcaggcctctgattaaattctgccttagacatctctccccaccccgctgtgtgaggtagcgccccatgccccagtcccctcaactccactgcctcactttggggacacatcaccccagggacaactgcattccactcttggtttttccctcctcgtctatttatcacaatttagagtcgcctcactcatttgtcaaatgaagttcatctctgcagctggactgcggggttgggggcacatccggctgtcggtcctcaggtaggaggtgcttggcaaccttgttcagagtaggacgttcacagctgtctgccccggaggaagcaagggcacccgccacatggatggaattgaggggaaggcacccggggctcctgcatcgagcttccctcctatattcaatgaggaaatgaccctgcagaaggctggctgcagatgcccctgcctcccggctttgcctgcttggagtttgatggacacgtggtcctgtcagggctacagcaggtctatggtctttggtaacggaaagcgctggtgaaacagtgagctttcccgtgggtgcttttccctgacgccaacaaccaggtaaatatttggaaacggccttgttgaggcttgtgaggtggttttcctccctcccctgtaggcctgcgccacccccccaaccccacggccacctttgggccagatggcacccacagacctgtttgaagtggccacagagggagccctctgggcgctggggccgctgtgtttgcagagggtcctcttactgctgagctggctggtgcagtgagaaggaaggccgacacccctgatcctcatcaagttcagacgggggtcactgcgggtgaggggcctggggccttttacatgtcccgggagctgctgagcaggccactcttctccaggccaccagaacttggccctgcgcatggtgaatcttccctgagtcagctgagtgagggggttcaggcagccccccgggacatggcagtggcggggagtggactggggtggtgcttgccatgactcacgccggttctcctcaggcaaccggatggtcagatgcgctgactcagtggcctgagctcgtccaaaagcgaatcagagaacacagggcctgggctcacccgctgccctcttctggagtcatctgtcactcatcctcatgaaggaagcgcctgggagcctggaatgcacatcgcactgccccagctcccctcttgtttctgtgtttttccattttggattctttcccccaacgccttctgtactgggcattttgtggtctcttctttttctccgagaactctgagggctaccattgcatttgctaatgatgccacagacggtgttgacgttatgaggcttctattactgtattgatttttaccatttttagggggacgggaatcaatatttcatgagggaatgtgaagccagacagtgaagtagaagctggcttttattttgtgccaggctttgtccagaggcgggtggggacgtggctcctaagctcttgattgcagctccttctggcttgggaaacgtttcagttccccaaactctcagaactggatcccctgtgtgttctctggcccggattcaagaacttagttgattgtcaaggaaattctttggctatatttttctcttaatatggtaatgccttttttcactctggcactctcttttcagggaattggattaagactattatttatgggtctgacaaagcagttcccaagttgttgggactggatttgtttaggaatgtctcctgtcctcttcattgaggggggaatacaaattgcttccatttgacagtttatcaagtgtgtgacagagtatcagagtccagggttggccaactacagccagtagtccaaagctggccctctgttgttgtaaataaagttttattgggacatggtcatgctcacttatttaggtagagtgtatggctgcattcagtctacaccagcagagttaaatagttgtgatgaagaccacgtggcccgtgaagccaaaaatatttgcttcctggccctttacaggaaaaaaattcccagccccagtggcaggcaattaacaccttgtcctcgaggagctgaaagtggctggaggcaggaatgcttataagaaccaagcgaggtgaagcactaggtggccgcggcgagcaggaagagaagctgattttgtttgccctttcgtttgccagagattgtgggttctttttttttttttttttttttttttttttttgcagagatgaagctttgatcttgtcacaatagcagagggaggccttatttttgtctatttctctgtgacattggtagaaaggactttgtcagaattccaagctatttggcaattatccaattttgagatcctaatggatctttcgaggtctagtttgttcattcttttagtgattccttgttaattccctgattttataaatgtgtgttgaacatctgtcttggccaaatacttcttaggtgctgaggatgcagcaatagtgggcaaagccatggggcttaagatctagtgtgggaaatgggtgatgtaaagtaaatatggcgataagtacagtgcacgaagcaaacaagtgaaggggtagaaggtatcaggctgcaaagacagcagatagtgtaggcagggaatcttatctgagggggtgacatctaagctgagatggaaaggacagtgagagccagccaaggaaacaagttgggtgacaagagttgcaggtggagttgcttaatttcccacttctgctcagcctgcagatcctggatcttggactaattgcaaactgtcatttcctcgtgagtttattagaaccctccagaacaagtttctggttagctagtttctctgtgtgttgtctcatttcttgttggttctggttctttggggttcctactcatactctggaaagctccagtgtcttaagtagtcagtctcccaagagtctgaaagcacaaagattcacaatgatacgatcacctctcaatcatagcagcattgatgcagttccgtagctggtttcctaaagccatccagatctctttctgtggcaagagagaaataagaccttctggtgaattgaggactaattatcctaataaacatgcgaattaacagttcctttggttaaacaaagcaccagaatctgataatgggaacatgtgactcatggtatttccttctttgctttatctaccaggcagctcacagaaaccactggccttccctgtgttcccattttatgtcataaatatatatttaattaacttattataaaaggccctttgttcattgaccatatcaaattattcttatatagaagaggttatacatgttttaaacattttaaaataaatctgaaaagaatgctacatcctgggcaacttccctgcatttggggctcaaagaagctctatgtggttatgggtaatgaggagccagagtgccttcagggcagttcagcagatgctgaaaggctgctgtgtgctgttcgctgggcccaccaaatagagtaggactgagcccctgtccaccatgacagccgggagatacaagctgttccctttgcctccctgagccctgagctttatagcctatagacagctgaaaagcaggctgcatccgttacccagtcagttacccagacccaaatgccaggccttggctaaccccagttattacctaattttaatatcccaatggatgttttaagacctggctggttcattctttcatttatttacttattcattgattttgtaaatatttctggagcatctgccatggccacatgctgttgtagcagcatcagccactctgaagttggtggatgaaaggggatgcatcaaaggcgctgatgtatggaggagacgcaagttagacttgaccaagacaatattattcctcctctggatgccccgaatatatacagtcattagctgtcgggcccccatgtggcactgttgacattttgtggtttaaacactgaagagtaagggaatattggaaatggcaaacatctgatatagtgtaaaggagactaaatattttgatggtgttcataaacaccgaggaggaaagtcttttcatttttttcatttgtgtgctctctctttctctgtttttgcacactgtcctctgttctccttctccttctctttttccttttttctcccttcatctccccatttatctgatctctcccacctgaaccccttctaccctgctgccctcctgtccattctaccttctctactcccctccctagacagtagtaatcacatgtcagttggagaaacatgatggcaacttggtcacaccgttcttctcagtctgtatatgtcggtgatctcagtgcccatctggcagatccttcctgccctggctcttctgctcactgcgaccacccttgactttgtgatcactgataaccttcaccttctctaatctaaatcccaagcttctcactcttggtccaccacctcccagccttgtccgttctgaaccctgaacggaagctgaatggaaccctgaacggaagggttctgaagctgttcagaaccctgaatggaagctgaaatatcaatgggccattgcttttcacagtcctctgtgaaagattactggccaagccagcatctggagaattcctggtccaccacctccctgtctggagaagctggaacagccagctgcatgagcatgtgacccgtgtactcacaggccctgtgccctgagctcgctgttttaattttatctttgaatttgtatttttgtgaataaagccctatgagctaatggagcatgctcagggaacttggggctttagctcaggctggattcctcctgctgcctccccagtccctggtcccctgagaactccagccccatctgaccttcccttccctgtctctatgcaggggtcattgctaccctctatccctggaaaggatgtaggcacagggcagttctaggttccagcttgggcaccgcttaacatcttggtggtgcagggatcaggctgatgataccgtggttgttctgtgggctactgggcagggtcaagccactcccaccctgatccaggtacctaatgcacccgacacagaagcggcagtgtccttggggtcatccattatccatgtgttggaggagtgggaccctagggaagatgcttggctcgacttccccacccctagccagggcacaatcagaggtccaggggctggtgggcacaatgccaagtcgtgaggcctccagtgtctgcgctcactgtcccataaataaccacagtaataactagcaaatcaaaaacattgtgataggtcgagagagacagcatgtggaagaaaggaaaaagctttctattttagtacctttaacagtgctttctgtatgctttatgaacaaggagcctgcatttttattttgcactgggctctgctaattttgtagctggtcctgccccctagtagctcaagtcagcaaatctttggttcatctgagtccacagtccgctgacccgccctttttcacagttcctcccctgcccatgtgctcacttccctccttacccagcttggcgcactccctcaagcaagtctttggatgctgacatcccccgtaaacaacccttctgcggcctggtttgattttccttaggagacatgcaagttctatagcactgtttcttgctgggtatggaggatgtgctattttgtccattgcatattttttaaagaaaatgaaaggttagcataactgtttccagaaggcacattgaatcactcagttgagtcccagccagttgctgcaatgttagcctttgaagcaaacttgaaccaacacaggaccagcctagaagtcccagcctccagaaatgatgcagtggattctgcagattcagcaacaacaatatttttgtaactcaagagcacttagtaattttcaaaggagagaaagaagtaattgacttggcttattaggttgaaaaagagttgccaactttttctttggttttgatgttattggtttttttttatttttcttttctccaagcttcagggaatgagattgaatgagcactcaagtgctactaggcagaaccctgaatggaaggaagctgaaataccgatgggtcattgcttttcacagtcctctatgaaagattactggccaagccagcatctggagaattctaggaacgccccctcctcttgcagcagtataagtttgcggggatcatctgaccccattggggagttgtatgaaaaaggggatttattggggaccctgttgcctgtttggatcttacttacatttaactattgtctgctaatggattttttggaaagcaaccaggttttccgtaaagaatagctaattgtcagagctgagatgaccattggagatcactgggctcaactccctaattttagaggtgctaaaaccgcaatccagagaagctaatcaagtggttcaaggttgtagactgagttcatataggaccaagacccagcccagatgtcctactgtctgggacagtgttctctcagcatacgtggagcctgagggggtaatgtgtgtgcgtgtgtgtgcatgtatgcatatacacataggtgttttgcctaagttttcacttctgccccaccttggttgatcttggagaatgagcctgaggcgcgctgtcaacctgggggcctcattcagcacaggcccaacttttctgccctgggggagttccagcagttatggttcatctgtggttcagttatggaactcacaccacacatagtgcccccaaaaccgaggctgcgtgcacagacctcccctcccttcccgtggtgggcccctgcttgggttcttcctaaacttcccctttgccctgctctgtgttataccctctctggtcccctgtccctgtggagtgatccggggcacaagggcagctgtttccccgctgacctctgtgtgccctgagcatctgggaggtggggagcaggctggtgagaagaacacctggagtggaggttggggtcagggagggtcccagtcccggtaccacccccacctgctgtgggacctgcagtcccctcatcagcagaacggctatgaagccatcctgcccatccacagggtggtgggtcgtgaaggctgcatacctggcagagcgggagaagctctgggaagatgccggacacgcgccgtgggagtgatttccctgccttgcccagattctgctcccatcacctgaacctgcctgtcaccaccatggaactgctgtgaccattgctttccttttaagcagattagcagacatctcctgctccaccctgccaaacaaacaaacaaacaagcaaacaaacaaacaaaaatgtgcatgagggagtatggacttgtagagtcttttctaaacattgttaggtgcttgtattgggatcctctcttaaaatgaaccatattccccaggctttggatgacactcatggttgcccaccctccaacttccttccctgctggcagagccctgggtttgttttagttccaaccctgaccccaccgcattcctgactcaggcaaattcgcagggtccaatgcagtcaggggagccacgttccctcctccaacgagtgctgaggtcgctgcttgattggatactgccgatgacctacgaggaggagggtgccagggcgcttttgggactttgcttttctggagagatgcttccacagcatggtcatggacacagtcacgtcttgatgtgatgtctggaatggtggtggccgtcttgtggctgtgagaacaggctgaggttgattggatggagggaaggaaggagccttgttcttgatgctgtctgtgagcctttgagttatcagcctggtaccacccagcccttggacagatatctactctacatactccatttggagtttttttttttttttttttttttttttttttttgtcacttgcagttgaaaacaccctaattgatacacacaaactatttttagtgctggtctgtgtttggcccttatggaagactctgggctgagctgcccatggtgagggaggtggactttgtgttttcttactgctctgtgtcctggtggcttgtttgtgtctctgcccatgagacaaaagccgagagggcaagggcagattttcttaatcatatgttccctgcaccaagctcataggagacactcactgaatggttgttgagagagttctctttcacggaggcaatgttttgtgaaacgatgctgcttgttgttgtctgttggttgtaatatgcatgaacactaagagccatctttaatcatgctgtgggccgcctcttccaaggtgttagcattactcccactacctggtcagcatcctgcctatggctaggactttgcaatttacatagatatggtggggagacctggagcccatggccaggactctgacaccctcactggatctgtttctacatctacctggatggccgtctaggacattagaggatttgtgtcttcctaaagtccctctgttgagagacttctggctctgttaagaggacactatttagcattgtgagtccctgcaggctgggggccagtgggcgtttttcttctagatgccccctctcttcttctggcctcccaggcttcctgctcctgagattgtgagaactggcctgtgctgggctcactgcagaaagactgtcgtccccaaaggttttgcaccaaacttgagctacaagatcttttagggggacctgagatctccgcctgggctctatgagagcaggcatgggttgtttttgccccgtcactgcagtcatgcccacacttgcattttcttttccccccagcagtgtgaggatctggcatgaggagtgggactcgcgtgccctctttcttctcctcttccctctggccttttcatccgtcagtgggggacagatgtttgccctgtttacttctaggcttactgtggggctccagggagatggtgaagtggccaaggagaggagctgccaccttcaagacggcctgtggccggtgccgctttaaagggagactcagaggtgctttgctgtgggtggcgcgggaaccagcctggggacagcagtgcagaggccttggactcagagtgcgtgggccccgcggggcttcacggcgcctgtggctgtgcacttccagccatatctgtgctgcatctcttccacattcccccatggagctgatgtctagacagctatggaattaaatgctcaattaccgagtaggaatttggccagcagaggtatagctgctgagtagacagactcgaggtgaggctcacggctgagaacaggccccatctggctttggaatgagctgaggtgcccgatgctcctgcagccagtggctcctgtggggagctggggccgtgacccccaaaaggcagcttgacctcatggaccaccataaatctggcctggtcaacatctctgccagacatcattcccttgcaaagatttctgcctgtgattggaattctggatgaacatgtactgggcgtgtgggtctgacagctgggaagcttgttctcttgtttagccaggctgcccatcatctgtaagcctcagtatccacatctttaaaatggggggaaaatatagctcaactcctaatggtgccatgagaatactttgtcacctgccaggcaaaagcttattcctttcacagaaatccagggtttacaatgtgagacccctccccactccgccgcatgtgtctgcttgcttttttctgtcttagggttgcccttcatgagctaggaaatgtctgagtggatgaaaacctaaacgagatgatcactggtggtgcccattggtgcagcctttgcctaaatggctacttacgtagccacatttcctcgtctgtgttcaggtgaggactggttcctgggcagactgcctgggtttgcatcacgggtgtccatcttgtcgaagcccatgtggtcacccaagtgtgactgagccaggcttgcccacggggtgctctgggccccattttcggcagcaggcagcgtcccctggaggcctggccctccccgggagcatggggagtagcgcctatgggcaagcagcctgcagcctccatccctgcctgggggctcccccgccccagcctcacagcttctccaaaagtgtttgtctccttgccgcatcctctaggcctgagctcagacggtggaaaagaagagctggaaggagagttgcctttcagtctctctgccttctgaggtctcctgagacatagagcctgggcctgcctccctttctaggaggcgccaaggggtggtaagaataggggatgagtgagatgtgaattaggatccccacagcaagccctgcctcgtaactttctgatgggttttcaatgtgtggtgaagcagacgcctgctgggcccccttcctgagttgagtttgacctcctgcctcctgtctatctccttgggcagccaggccaccccgctccattaacctgtgccaccccatccctttacctgtcgcaagcccagccctgaaggcctcaaaggcctggtcttccagccagtccagggcctgaagggatggcagtgtccctggtggacctcccctggtgtggcctagtgcacatcccagccctgcctcctgccccgcctgcacgccatgagtgctgaagtcatgcctggcaggggctgctggcccaggcccagagtaaacacactgcgctgagctcgctggtgtgctgctggatgctgatgagcttgaggagtgtgggaagtgagcatggggctgagtagagatgcggcaggcctgcacctccccgcagctgccctgcatgctccagcctcaggcagccacacagggaaagggtcacccactgtcagggcagacctttaccatggctgggtgacacgggctggctgtggaaaggtgtttggtggttcccgctgttggatttgcacaggcccagatgctcacagcaaaaccaacacctagatggtgcttacaggagccagcgggtattcaaagagctgttcagatcttaagttgcttcattctcacagtggaccattgaggtagctgtacgttagtcccattttccagatgagaaaactgaggacctgagtggtcataagctcaggccctcatctaaatcacgcagcctggccccaggtgtgtgctcttgaccatggacagtgctctcctggtcctcttggtatctgtgatctgagggaccttcctcctcctcagtctcgtatagtcagttttaggtcttggactctgtcttcatatccctttctcccttcgtgagctttctcacccagcaccttccttatttggtgtgtgttgggggatatttgtggtgtggcgtggcactgtgtagtggatgagagagtctgtttttccgatcccagtcccaggtttcaaaccctgctctgtctcgagtcacccagaatcttggaccctcagtttcctcatctgttaaatgggcatggtggtcaccccacctcatcagctagtgtctgctccatccctggtggaggagatgactcaagtaacccctgggttccacctgccccaccccactggtcccctggctctttctttgttgagatagacgaatgtgaggctctggagttgcagttcccacgagggctggggtggctgtctgatttctgggcctggtccatgttgttcagggcagctgctcgttctaagtgaataaaggctgaaggaactcgggaggtctgctcggctccgaggaaggcagagagggaaagggccccgatgccttccctgatagagctagggaggcccttctgtggttccccccagctccttggcctgggtgaccctggagctggcttctgttccattttgttgtgcagagttgtttgagactcctggctttgcctggcctttgtgggacgctggagatcagggcttctggagttggccaattagcctgcccagaccaggaagcacaggtggctgacagagggccgtttcaggagaggagagacagcctacctattcggtcttgctgtccccatgctccatccctgcccctgaccagtgtggccctgtactcagcataggcgtgcacctgagtcagtacagttccctgcccgcagagcaccccaaatattccaggcctcaggacggatgtgcacatgatgagtcggggcaggtttcactgcctgtagcttgggatccttccctggggcttggttctctagggccatccccagcagtctcaccccaaaccctaaattcatgttgtcttcctctgtctcttggcctcaaggtttcagagtgagtctgtgctgatagcttcaagatgtgatgagaccccgacttggcctccagttacctccccacggtttccttggtgtgtgtgtggcttcagtgttcactggctcccgcacggcttgcaatgtgtggattacgggtgggagggaaatccagtcctgcccgcagcaaagggatgttagttgtgagctcagttccccaccgggcctggtgtttccaaatagcccgtcactgtccctgcttggttttccatgatatctgtgcctttacctatttggttaaattaaaccaactcagcaacgccagccattgtggtttcagggcaagctgcctgtcctgctgcttggccgctcctcagagctgcggccgggagagttcgtggtcgccatcggaagcccgttttcccttcaaaacacagtcaccaccgggatcgtgagcaccacccagcgaggcggcaaagagctggggctccgcaactcagacatggactacatccagaccgacgccatcatcaacgtgagcctctgtccctctgcgggtggggattggggcagagttttgccagggggagaggagtcagcataggtcttagcccctgactttgttgtagtctgcgtgaagggatggaactagaccaagccatgtggattctagtgccagcagcatggcaggggtcacatggcggggacggtgacaccggagcaggtggacagccagcctcctcccaggaggaagaagttgtattgggtgctttagggtgattgcagttggcttctgggcttcagagagaaaatctccctgtttacggcacctctaaaactttctgaaaattgttaaggtcatttttttccggcaaaatattaggttaatgggaatgaatctcagagaagaatcgtgccccccactctaggcaccgtgctcaggaaacgaccaggcagggacatagattgaaccatgttatgacacgatttgtaaccttttcatttctgtttaattgcagtatggaaactcgggaggcccgttagtaaacctggtaaggtcttttaaacctatgttaggtcatttgtttttatctatgtatacgctgttttttgtttgtttgtttgttgtttgtttgtttttgaggcagggggtcttttcaaacataaggttgccaaagtgtattataaattcctttaaaatggctctgtaaatgtactgcgtgcttgcaaatgaccctacggatcttttctggaaagagtaaggcaggccggaggtgagggttggaaatgttatgccagagaacacacttgtgtctcagagttacaggtaaacaccgtgaaattcagggccaatgcaggagtaaggtgaaggtcactaaaaatgctggccagtcaccgaaagcacctcctccaaattaaatctcctgggctgctgaaggagctggctgggctcatacacattttctcttggccaggaatcctcccttaaggcctggctggaatgaggaggagttacccacccacaaagatatcacttaagtcttcccttaaatacttgagcagaaaaagtgaagccttagaacacagaccagcagagctagagggcagctctggggccatttatagagggcagctctggggccatttatagagggcagctctggggccatttataggggctgtctttagcaaggcccagtgtgatggcacctcctagatggtgccttggcatcaggtactgacatctcagcactcctgggaagtgtgcacttggcagctttctcttcccagcagaggggcagctgtgctcccagctctgtcctctgcctccccgcgcagcacttggggatggagtggagatggctttgctggtaatgaagcatgacagccctaagctctagggttgtttccccctgaagtcagcagagtcatcttaagatcattagacatgggagaagcaggaaggtgtgggcagccacctaaaggagtttgagcctttggaaacgtattccttgtgaaacaggagcaaatcatatcgtgcattttgaaactatctgtgcttaccgtgaggtgagcacccagtgccgacctggagtatgtgcgattcttccacagctgcgcgtggctcgcgctgcctgggtgtcctgatgcctctctccctgctgccacggggatcccctccttgcatctccccacttcgatctctgaaatagctcagggacttctttcaggcatattctctctgggtgtgtacctgccggtaaagcttcacgattcagtaagccgtgtccttcttgcttttcaggacggtgaagtgattggaattaacactttgaaagtgacagctggaatctcctttgcaatcccatctgataagattaaaaagttcctcacggagtcccatgaccgacaggccaaaggtaggcaaggcccacacagccctggggactccggagatggggcctgaagctcagctgccctttgggacttggggaagggaaaagcggcagcccctaggactagccaagccgtctctgatccagaagtgaacgggaatgcacattactaaatccctcgcagaaggtcacagacatttcaccatttttgtcctctgatcatggcaatgtcacttgagtcagtctaatatgtaccaggcatgatcctaggtgacttgtgtacattatttcactttctttatgtatgtcacttaattcttttgccctatcagttaggaattactagtcccattttgctgatgagaaaacggttcagggagatcattctgcaaacgtttattgccccatctgctctaagtcaagcagggagcttggcagtggacagctcaactggggcctggggctcaacaggggcctttgccggtgtgacttttatgttctgttgggggatgggaaggctgacagtaaataatcaaacacataagatactattagtgctcccaagaaaacggatcagggtggccgtcaagggagcgactggaggggcagctggtggagatggtgtggccaggaaatgccttccaagctgaggtctgagtgaggaggaaccagcgggcagggatgtggggggaacactccagaaggaaagacagaggactcagcatagttgagtgagcacaaggcccctgaagtggcctgagggccggagcacagtgacagcatggagttccccggggtggaaagaggccaaggccgggcgagcaggctcacagcaggccgtggtgagggacctgggttgcatcctaacgacatttaagaacagggaagtttatgatctgattgatgtcactgaaaggacactctgatggctgcggggagtctgctggaggggttgctggaagttggggaccggttaaggggctctcccagccatctggatgagacatgctggggtctcagacaagggtggtggcagtggaggtgggacagaggggtcacattccagatatatatggggggtagagcaagcttggggaagggccagctgtcaggatgaggccatgaggaattaagggtcatgcccaggtacctgaccattaattgaaacaatgggactttcccaaggtcccccagaggggaggggtccagaccaggatttgagccgcaacctcagtgtacccttctgtggcccttcctgcaacctgggggattgggcccccggcccctggtgtccccagcacccccaccaactgggctgaccttctgctgtccctttgttgtctcaccaggaaaagccatcaccaagaagaagtatattggtatccgaatgatgtcactcacgtccaggtgggtaaacaggatgcgtgtctgtgtcttaaattttaataaacctgaacttcagaaggtgctcacgggcacccctgaaagagaaaccttatgctgccttaagacgtctcagtttctgcttataatgaagtagcatcgggaaagaggacaggtcattagccttggcccctttgtttggttttaacctgtgtttttgcattctgagctggttttcttcactggcagcaggccctccggtgtagaaggttctgccctcctctttgaaggcaggcctgaacagtgtgtgcgtggtggggctgttgattcactctggctcacgtcttccttaccccacattctgttgaaacccacattccaggagggccccaagcccctcccgcagctctaggcactctgctttcgttgctctgcagctcgtgggccgcggctccaggaatgccagggcaggtccagcgcagggaagtgaatgactgatgtgcttgttttccccgagctggtggaattgcggcctgtggttggcaggctcatggcatcctggtgttctaaactggatgaaaaattctggtgtaatctcatgagtcctggtagtagactcacctggcatggctaaaactgtcagaggtaaagtaggtaaagactagaatatagtaacagatagattaatgtgttcattactatgatgaattaatgattcactcactgtgaaagtattaatatattttgatacatgttatgaatggtggtccctttcttagcactccagaagatggagccatttgtcaaggttaaagtgtcccctcagttgtttgcctttggaactacgaggtgtagggaaagatggtaagcccttggtgcccagcttcctgggttcctgtccctgctctgatatgtcctgccttgtgaccttgggaacgatatgacccctgagtgcctcagtttcctcctcttcaggatagggatgacagcgcaggtgcttctgatgtgtggccaggctcagatcagggagtggtggcaggggtcaccagccacagtgatgccagccactatgtatcacacgtactgggccaggtgccttactgggatgatctcatctgatcctcacaactcatgttgtagggtactgttattatccccattttgcaggtgaggaaatgaaggcacagagaagttaagcaactgtccgaggtcacacagctagcaaatggccgagctagggctgcaaaccaggccaaccactgtactttactgactccttagtaatagctactattaattaagaaataataacaatgatgatggctgggtgcggtggctcacatctgtaatcccagcactttgggaggccaaggcgggcagatcacttgaggccaggagttcgagaccagcctggccaatttgtgaaaccctgtttctactaaaaatataaaaaattagccgggcttggtggcaggcacctgtaatcccagctactcgggtggctgaggcaggagaattgcttgaacccgggatatgtaggttgcagtgaactgagatcgtaccactgcactccagcctgggcgacagagcaagactctgtctcaaaaaaaaaaaaataaataaaaaaaataaataaataataaagcactttccttgctgttaccaagtaaatctttgactctggtagacaggcaattttaattttaaaataggatcagaattcctggaggaattttaccttagacctaaggagaagacgggaactggtgagagctgagttttgcgtgaggaaggcctggtgtttcttcacactaacacgggtgctttttctctggagcagcaaagccaaagagctgaaggaccggcaccgggacttcccagacgtgatctcaggagcgtatataattgaagtaattcctgataccccagcagaagcgtgagttggagtcgttttctcttttcccaatattcttgttgttcctgtgggggtagcaggaagagggagcgctgttccttttctactggctcagatgattatgttgatccttgacagacgtggtcggacgttgcttgtcattcctgctggccaggccttccgacctggctcggctcgggactcatccataggagggtgccttctgtcttcaaaagtccttgctccacgaggaccctccagatggacagagcaatagcagactcgtaatgagtctctgagatggcccggctggccagagagagggtttcaggaacagtgtccccaagccctcacttggtggtccttttctaggcttcaggacccttctcttcctggagtcttccagaatgtctctgacaattaggcccatacctgtcaacacctccagaaaaataacccaagtgatatcaaagtaacatgacaagaagtagctcaaccatccatcagggtttgttacctgtattggcggaatatccagagaaaagtgcgagaccagggaccagcaaatgtgccttgggggctggatctggcccactgcctgcttttatatggagctgtgggctaagaatagtttttgcattttatttttatttttacttattttttattttcataggtttttgggggaacaggtggtatttggttacatgagtaagttctttggtggtgatttgtgaggttttggtgcacccatcacccaagcagtgtacactgaacccaatttgtagtcttttatccctcatccctgtcccagcctttccccttgagtccccagagtccattgtatcattcttatgcctttgtgtcctcgtagcttagttcccacttatgagaacatttaaatggttgaaaaaatcctgaaataagaatagtattttgtgacatgttaaatttgtatgaaattcaaatttcagtgtccactgtaatttggtttatgacatctatggtggcttttgtgctggaacagcagagttgagtagcttcaacagagaccatatgtactgcaaagcctaaaatatttcctatggagccctttacagaaaaagtttgcagacccttgtgctagcccatgaaggaccatgacagcgttttgacgctgagctatataagagctacagttatagtggcaaccacacaaaggaagtgcctcttaacagaaacattccgcccacccctataggaactgcattctgagttgcaatacccattataagcaagttggccagatagtggccaactatctggcagatatctggccaactacgtggcagatagtacctggtacatccttccccactttggggtcaatcttgacctttgatctccttggggtcataaagccacacaagtgttagtaggcatttctacagtggacacaatggatgatttagcctaaaaatctcaaaaggagcccagcatcctggcacatgcatgtaatcccagctactcaggaggctgaagcagaaggatcccttgagcccaggagttcgagactagcttgggcaacaattgagaccccatctcaaaaaaaaaaaaaaaaaaaaaaaaagagtggggaaaaaagaacattattaaaaaaaaaaaccttaaaaagtaatccaatctaccgatggtttattttttattttattttattttttttgagatggaatcccactctgtcacccaggctggagtgcagtggcacaatcttggctcactgcaacctccacctcctgggttcaagtgaatctcttgcctcagcctctgagtagctgggattacaggtgcccaccaccaaacctggctctttttttttttttttttgtaattttagtagagacggggcttcaccatgttggccaggctggtcttgaactcctgacctcaggtgatccacctgcctcagcctcccaaagtgctgggattacaggcatgagccaccgtgcctgacccactgatggtttgaattattctaagttcgccaccgtccaatcctgtttgctctgggcttttaggttctaagctgtgcctctgtccatgtaaagtcagaccaggaggaatggaaacacgaaacattgccattgtgtttccctttgtgttgcagtggtggtctcaaggaaaacgacgtcataatcagcatcaatggacagtccgtggtctccgccaatgatgtcagcgacgtcattaaaagggaaagcaccctgaacatggtggtccgcaggggtaatgaagatatcatgatcacagtgattcccgaagaaattgacccataggcagaggcatgagctggacttcatgtttccctcaaagactctcccgtggatgacggatgaggactctgggctgctggaataggacactcaagacttttgactgccattttgtttgttcagtggagactccctggccaacagaatccttcttgatagtttgcaggcaaaacaaatgtaatgttgcagatccgcaggcagaagctctgcccttctgtatcctatgtatgcagtgtgctttttcttgccagcttgggccattcttgcttagacagtcagcatttgtctcctcctttaactgagtcatcatcttagtccaactaatgcagtcgatacaatgcgtagatagaagaagccccacgggagccaggatgggactggtcgtgtttgtgcttttctccaagtcagcacccaaaggtcaatgcacagagaccccgggtgggtgagcgctggcttctcaaacggccgaagttgcctcttttaggaatctctttggaattgggagcacgatgactctgagtttgagctattaaagtacttcttacacattgc

SEQ ID NO: 76 - DNA, 88904 bp, Homo sapiens
atctaacggccaaagtggttttggaaaaaaaatgcacagaagacacctactcccaccagcggagttccggagccctcgcagcctcctgttgaccgctcccgcctaatgcagccgctgaccgcccactccccgacggccaggactccccagggacagggacgtgtccccagggcaggcccctggatggacgcggcgactgaccccacttcgctggacgctgtgctgggaaggacacagagaggtggctggggcagcctgcggtcacaaagcgaggcccaaaggggcgctctcctcacccccacgtctcctgggtgccgacctgcaccctcccttcgccaccggactggggccatctgggatgtctcgggggtatccggagggctaagcaccgccgagggacggctccgtgggaagagttttctggacccagaaggcagacgccagtagtactgtcctaggagtcggaggtcggggtgggggagttctcagctctttgggtcgcacggagcttttcttgggtaaggcagtaagtacttaggtttaaaggacttacttacagctaccatttattgagtactgtctgcttgtcagacacgatgcagagaatttcgcggcgtggggcgggtctcattgaatctcccgtcccactccgcggggtgggcctgtgattagctcatttcaccattgagaggtcggaagtacaaaggctacattcgcttttactgagagccgccggcgccttctgctttgtttgtacaggcgaggaaactgaggctcggctggtggcgccgtgggcttggagtccgagccacgctgactgcaaagacgggtctcattcccgcagatcgagctctgccggcggctgcgccgcaagccgggcaggtggcgagcttgagcccccacgcacagaaagcaggaccccctcggctgccttgggccgccaccgccagcaggccctccgcccgggactaacttgtttgcttttcattggttctcattcagttcccgccatcgaaaggccccgtcccgcagctttccacgcgcgccccactttacgcctaaggtcctcagtctctccagtggggccctgtcacagggacaataagcggccctccagccggcgtcgctcaggctgcggacctcactgcagaccgggccagcggtgcggggcccagcggagcctgagaaggtcaaaggccggagcgcactgcgcctcgggagcacagagggagcggaggaggggcgaaggggatgggtggggggtgccgccgagggagtcgcgcgtcagagaccccggccacggccagcactcggctccgggcccgcccctcaccgcgcgccccgccccgccccgcctggctctcccctctaaagcgcccggcgcgcgcctcccaccgccgcactttcactctccgtcagccgcattgcccgctcggcgtccggcccccgacccgcgctcgtccgcccgcccgcccgcccgcccgcgccatgaacgccaaggtcgtggtcgtgctggtcctcgtgctgaccgcgctctgcctcagcgacggtaagtgcgctcggcggggaggccctggcgaggctctgggcttcggctcccgcccggcgcagagccgcggctcctctgcctgcgcccgcagtttgcgccgcccgacacagtgggggtggaggcagctcgcttagctgggcgctctggtgcggtgtcgcgttcaaagccctacttttgcgccgagggtttgtgacctgcagagagcgaccgcctgacctcaagctggctgcagagcgaggtcagccgggacaactgggcaggaacgccccaagagagcgttcgggactggcgcgggaaggcgcgagggtggggagccgcggaccccagacccctgcctgcccaccctccacccactgccttcccgctgcgggctcggtttccacaggcgaatgggctccgaggtcctgctgcgcacagtgctggaggtcgggcggtgcatggcgagagcgcgctttgcaaagttcgcctcatgccgcgacttgaggctgtgaggtccgatgcagccgcgcagcctccgctccctgcgaagccgatcctctccccacaccctcgcggggctcttggccaggcgcgggcgggctgcgcggcgcagctgtcgggcttgtgccacccgccaggccgcgcttctgcacagctccgcggtccgcagcgacgcggacctgggcgcgcgtccagccgctgtcttcctgtctcttctcgggttcacctgagagaggcccagggaccctccgagcctcacacgccccctccccagctccccaaacacacctgcagacaggctcttttgtcaccagctggccaagcgctttgccccagaatgagagctgcagcaaagttcaatctccaaggccctgggccactgggaaccgtggtgtcccgtttcactgggagagggcttttttcttttctttcgctgaagagaaactcgctgcgctgtcacaggacaccgatgcaaaccaaaataaactgttgcctctgaacacacaaaacaaaaccctgtggctcaggccgctgagcttccttggctgtgaagtttcctgcaaagagttgaaggacactctgagtgctcttgcagccgcgggctgtgcaggcccagcgcgcctcgagcccttggctgggttggtgcagacgtggccccggcgtcctagctggcttggactgtgcgctggtgtgagcaggaccagcgcagctgagtcgggctggagaagctgggcagcctggggtcgtggcggactgcctaagtgttaaggacacagactgaaggcaattgggaatgttcgtcgttgatgaaaagtccctgaggctgtgtctgcacactgacccccccccccccccgcaagtcatggggcatgtttctagtttttattgctggatattcttctgttcctgtaaggtctctggtttgggcagttattgactgattggtgggatgagcgcggaggtgtcacagtgcgccgctctgggaaatggtgctgccccctccccggagggctggagagaggattggaatgaggaacctcggtctttgagttatgggtgcaactgacctgggggaagcacagagacgtggggttcatcccagactcctcctggcctgggaagggtgacatggccctcagagttgccccattggcagccaagtaaccagggcaggagcctgggctccaggcagatctgctccttacacacatcgccagaatgttttgttttgttttgttttcccctcacctcacagtgcctatgtgccccctatccccacacttagtcctcaagctgcactacagagagagcttggccaggggtcctgcccctcccccattggctgacttccgtcaggcagctgggcccttgggtttcccgggcttaaactcagggtgggcccccttcccaagcctgcttggaggggccagctgggctcctgtctctgcattagactggagggctttctgaaaactcctggagccaagctcacccggtcccaaatccggggtaccatcagagccagtcaggactcttgccggtacacggatttacatccagaacggttgggaaagttagtcttactgacaaaaagctggaggaaggagcacatgaggtacacacgagaccatgttcttttggtaagcacacctgggggctctgtcactttaaaaagacctgttgaaattcgctgcttgacaggcgggccttaggtcctgggagtagaagcaagaattgcttttgaaggaaatggataatcccagggggtggagggggagaggagagagagcctgtgtgttgagctctgaataggctctgatttctggcctcatcaccactgcttggttggggggccagaggagcttctctcctctgggcgctggagagtcacagccccacccatcccagcgggggcggctgcagcacttgcccttggctgcatatcttcaagctcactgttgccgggagggggcttgtgcctcactaccggcctcctattctcctgctccacccccaacccaccccctgcctcagcttggaagggcccaaaagaaatccagggaaacctggaggcacaacactcaggagcgtttagctcctcagttacccaggctgcaggccccggccctgggggtggctttcccaggtgatctggttacagtgcagtgctgacttcccctgcagggtcccagtgcagctgctggaagctggccccagaggtgcctttctggagttagatcaggtgtaactgtgaaggctgccttaggtctctccagtgccatgagtcaccagcaccctgatgcttggctttttcctggttttcagggagttgcatttggtcctggggacaaggaagtggggggacaagtggtccacttttcctgcaacttggtggctgaatacacaatgcaattcctagtccacatcatccctcaattgattgcagtctgtagaaaaaataaaataaaatgagccccttactcaagatttcctcctacttccccagcattctttcccaaaggtgcagaatttcagaaccacagaggtctctcagaactttgtaaacaggcaaacttaaaaaaaaagaaaaaagaaaaaaaatctctggaccaaatattcttagacatatatttaatctctgatgaaaggatccacaagttcaaataatttggggtattaagtggggcttggataaaatcttcaaggaaaaaagaaaaacaaaaagcacacacaaatcccagccctccagggcttgcaatcctatatttaaagggtgagcagtgggttctgcaggagccccttgctaatttacactaatgagtgtcaattatggcattttgtaaattggtgattttgcaaagatcttaatacaattcctgaggctacagcatccctgcctaggcaatgaaaaccacatttaactccagctccactaatctctaagccttggggaaagtgctgggcagaaggtgggtccttggcctgctctcaggggactcacaggtaggaagccagccaggattcttttgtgccttccagagctttaggtgaatgtgaggaggggtctctggggtgggggagggcagcattcctgagtactactgtgcttcctggctagaggcctgtgccagaggagagaggccagggagcctggagcctcttgtccccctttcttttccctgagtagggagatctttctcagttgtcccttgaggaattttttttacaaagagtaactggaaatttcagtaccttggactgaaaccgttatctactataattactacctttatcttgagacactgagcaggtggcttctaatttaaactcccgcctcatctaggctccggctctccccaggcctgttgggctccttgccctgtagaagctgagcctgagctcagccagcactcactgtgttgcctgaggagatggcctttcccaacatacaccagtaacctggaacttaccccagtgatgccgtctcttgatccttaatcgctgcaccaactgctgcagcccagacacacattaccaaaatctggcagggtagtaaagtgccttgttgtccttacctcttctagggaagcccgtcagcctgagctacagatgcccatgccgattcttcgaaagccatgttgccagagccaacgtcaagcatctcaaaattctcaacactccaaactgtgcccttcagattgtgtaagtcttgaaattgaacatcatctaacgaacatagttgcatctaacgaacatagtaacatctaacccgagtcttattaaaggtgtagaggtgacaagccaagtgtccaaccttgaacttggcataattagtggcagctattcttatcatgaggacctttagtatgccaccaggcattaattttaaaagccgctcttggcctgggcaccctgctgtgctcgtagtagttctctcttctttccaaacctgtgttcttcagcacagcacagctggatgctggagaaactatgggcttcaccaaggttttggctgaagcctagtaaattagccagcccttagctaataacagtgataactggcctgccagtttcggggatctgatgccctacattaactcacaagacccaaatgcagtttaagtcctctttaaccattgggtgaaacttcaacattttcagctcacttgcctgtattttctcaagtacaacatatgaggttttggtgttatttggtgtggatggcagccactaacatttgattttattcatttgggaaacaaagaccaaaatcacacatccacaagacaggaagatctcagctgggtacagaagaccgggagaaatgcgggaagaaagccatgtgcttgaaagccctctcatgctcaagaggtcctgtgtctgaacacggggaagcgagggctcagggagtctcctggagaggatttgattgctcagaagttctagtgctaaaaatggggtggggagacagcagttggaaccaaagctacaactttcccaagacttttccacccaacaccaaatgtttttacttttgattttagaaaactgtttttagttttgagttaaccctttactgccttgaatgtgtttgttatttacagtatgttttagggccctagaaaatgaatgttttttctgtactttgcctacaacatgatactttatctcttgtgaagagtattttaaagatgctcaatttagctaccttggacctgctttacagcactgatcatgctggtttactggcctggaaatgcaccttgaagttgaagatgccaaatacaattctcaggtctgagcagacactaaattaacaaagaataggccccagatttggaccccaatgtgggttgctccgagccacacccatctctgcacccctcttcacctaatggacaggctgcttgaagactccctgggtgcccctgaaccactgttctggggcttagctgtcctcaagacccttaagtacttgggctgcatgagattacctggcaccaaagggctttctggcaagagattcagagagatgaaatcaggccttccccaggagtttgcatgtagggaagcttttaagagtgtgaacttttaaaaaacaaatgagaccaagaaacattcagtgaacttgtaaaatctttctagaaactattttctggtaagccacctgcactgcccctcccctccctggctggtcaccctcccggtcagaccgcggtgacttctggcaggcctccttcctccaggcttcctcatgcccatccttaagtcggccctatatctatcaagatgacccatccaaataaacctctgctctgttgctctccattctcccctccccaggtacctagagcatcctgtcgtccccttcctcagtttcctctgtatgctttgatgacccccctggcgtatttgctcctgattttcccttcccgtttatttactctccaagctcctacttatccttcaaaggcagctcaaatgctcccttacatgaattcccctgcactgccccggaaagacttctgttcacatttccatgtctctgcaatggaacttcctgcactgccagcgctgagctttccccagcacaccgcgagcacctctggagcctgagcgtaccaagtggagcacggggtgccagcgagggccctagatgggtgttgggggagcggatgcacacgttgcagccgcgccttcctcctgtgcagccgcacactgttgccattctgttttcacagagcccggctgaagaacaacaacagacaagtgtgcattgacccgaagctaaagtggattcaggagtacctggagaaagctttaaacaagtaagcacaacagccaaaaaggactttccgctagacccactcgaggaaaactaaaaccttgtgagagatgaaagggcaaagacgtgggggagggggccttaaccatgaggaccaggtgtgtgtgtggggtgggcacattgatctgggatcgggcctgaggtttgccagcatttagaccctgcatttatagcatacggtatgatattgcagcttatattcatccatgccctgtacctgtgcacgttggaacttttattactggggtttttctaagaaagaaattgtattatcaacagcattttcaagcagttagttccttcatgatcatcacaatcatcatcattctcattctcattttttaaatcaacgagtacttcaagatctgaatttggcttgtttggagcatctcctctgctcccctggggagtctgggcacagtcaggtggtggcttaacagggagctggaaaaagtgtcctttcttcagacactgaggctcccgcagcagcgcccctcccaagaggaaggcctctgtggcactcagataccgactggggctgggcgccgccactgccttcacctcctctttcaacctcagtgattggctctgtgggctccatgtagaagccactattactgggactgtgctcagagacccctctcccagctattcctactctctccccgactccgagagcatgcttaatcttgcttctgcttctcatttctgtagcctgatcagcgccgcaccagccgggaagagggtgattgctggggctcgtgccctgcatccctctcctcccagggcctgccccacagctcgggccctctgtgagatccgtctttggcctcctccagaatggagctggccctctcctggggatgtgtaatggtccccctgcttacccgcaaaagacaagtctttacagaatcaaatgcaattttaaatctgagagctcgctttgagtgactgggttttgtgattgcctctgaagcctatgtatgccatggaggcactaacaaactctgaggtttccgaaatcagaagcgaaaaaatcagtgaataaaccatcatcttgccactaccccctcctgaagccacagcagggtttcaggttccaatcagaactgttggcaaggtgacatttccatgcataaatgcgatccacagaaggtcctggtggtatttgtaactttttgcaaggcatttttttatatatatttttgtgcacatttttttttacgtttctttagaaaacaaatgtatttcaaaatatatttatagtcgaacaattcatatatttgaagtggagccatatgaatgtcagtagtttatacttctctattatctcaaactactggcaatttgtaaagaaatatatatgatatataaatgtgattgcagcttttcaatgttagccacagtgtattttttcacttgtactaaaattgtatcaaatgtgacattatatgcactagcaataaaatgctaattgtttcatggtataaacgtcctactgtatgtgggaatttatttacctgaaataaaattcattagttgttagtgatggagcttatagacgtttctggtttatatagttaagcctgcctgcagtcaggtgtctgagaccccttctcacagcccatgtgtgacagtgtatgggcttttctcacgagcagattagatctgcagctcaagtttttggatcttttttttttttttttaacccgattgaaatagcagtgctggttttctgaagaataatatttgactcactaattcgtcttccctccctcctcctccttggttctcctaacttccccatgtaatccccagagactcaaccctagtaatatcaaccttttacattttcccatgtaaaaatcccatgactccaggccatggttaatatgaagctttcacagggacaggtggcctcaccccataaatcattaaataccattcagcttgaatcattttaatgtgacagtcacgagccagttgctctaataaaattctgctaaccagctctctcccttgctctccagaacaatcgcattcattcccaggagtgttcacaggcgtctagaaaggggaaggtgggaccactgccttttttctcctcttctgaatggcagtctgaacctggggcctgcagcctccaaaacgttattcaatttgaaatgcagacatttcttagagaaagctaagagttcagccctgcattgagaagaagaaaaagtcccatgagaacagggcagggtggggtgacaaggaccacgatggccagcctggccctgggtgtaccctgagatgtggattccttgtccccagtgggaatcaggttcaggttggcagattggcagtcgctgtaacccattcacaaaggtgttctaggagcccattgaacatttgtttgaatggaaggaaatgtccaatttattttaatgaattactgataaacagtgctttgaccaggggcctccaggcctgagactgaaggcacagtttaaccagtacacgggccagtgttaaatcttatgcagactgagacgaacttttgtttatttccacattattaatggttctactaattttatctaagggggcgcagagaagaaaaagtggggaaaaaagaaaagataggaaaaaagaagcgacagaagaagagaaaggctgcccagaaaaggaaaaactagttatctgccacctcgagatggaccacagttcacttgctctcggcgctttgtaaatttgctcgatcctcctccaggacagacccccatgcagactgggcaggggctcagacttccgtgggggagcagtgctttgctgccctgccagccacaccggcttctgtatttatgtgctttttaaggcccttgttggtctgctaagttatgaagaaagtagttgtgcagagactggggcgggggtctgtgacgcggagcctgtgtgctcaggactctgtccagaatagcctgggagctccaggaatgcccaggttgctgagccccccagcccgccctccacttcctctcttagaaggcctgcgctcactggggagctcaccagctccacacacttgcagtctgcattcctgtggagaccaggctgtggccacctggccagtgtgcagggcaacctgctagcagaggtggcctcgccaggaagggggtgtgccacccctctgtggccctcaggaaaggtgaaaactgactgacccttaggaatgggccctggctttttccaaatacccattgcctttccctccagcactctgccacctgggaaggggcttcttcagcccctccttcctgggttgtgggagtggctttatccccaagcccgggtgggtttctgcaaactgtgtggggtgagcccgagggaatgctgcattctcagagagcagatgtggaaacacttctcagggagctcctctttgggcaattctctttagagtctttaaacgggtcccccacgtggaggacagatgtgctatggaactttgcaagggtcctgaatccctggggatcccagcctgtcccctcccgcctcctgcgtgatggcgtgtgctccagctgcagggcacagctgcctctgtcctcattcatgggaaataccttatctgcctaaagcaaataccacttaagctctaggaactttcctgcaccctccttccctgcccatgtagatgtatgtgtgagattttttggcaagtttctctaatctggaccgggaggatggaagagcaaggaccccatttcagtagtgctcggaaaaaggatgcgttgaatttctcagcccttctccacctcacataaacacccgcccaccctgcacccggatcctgggtcataattttaataaatgcagaaagagaaagtggttggaggatggagcacatggaattcaggagaaaacccacaaagacccctgcatgtcagacacaccctgtcccggagcgtggtgtccccttgagctttaatgagctccctgtgatcacagccatgccttctcctcgttggggaggtgtcctaggatgcttcagccaaagacctttgtttcccgctgctatctcttttacctggacaactctcctggcccacgttcctcttgccagcactgggggtcacaggcctgagccctgggtacaggggtgccctagtcttctgccctccccacctcttaaggcacagagctgttgggtgggctgcctggggctgccatccttcccgtggaagccagtagccactctagtccatgggactcttgacaaaagcgccccgagagggcaaacctgtgcccccatactcgcctgcattcttcggactccacatgcagcagggctttgtgcctggggaggggtggccagtctgtcctggtcagtatgaaaagctgttggccccctagggacagagggcccagctaaggctgcctgaggatacaaactgcttgctatcccactcctggggagcagggtctgcagggactgagagtgggtcccaccttgagaacgcatgcaaggtccgtcctgtcttgatgtcttgatgtgactgtatgtgccctgggggctcactgtggtttacaagtggcttgtgaagctcctgggagcaggtggtacacccagtgctgaagacagggtcgccgtggaagagtgaagagcctgaccgggattcctggtgggttgaaactaggaagtgctcacaccagtcagagccaaatgaggggtgcgctatggtcactgctctgtccagcatgcgttcctcctgggaggtcctggccacctgtgcacccacccctgtgccacctccagcagtcccacctggggccacctacggtggcatggcccctggctgagaggccccgagggcgaagggttactggaagccacgaaagtgcctcttgggacagccgaggccaggatgcagggcagcagcatcctgagcctcagccccacgccggtgccgggtaagcagtgtgccctgtccccgtcgtatgaccactctgatgggcctctctgtgccttcgtgcgtctgccacgcccagtgcttgccacgtgtctgtcctctgctttctgccatccatgggtccctccgcttcagcctggctgcgtctcgcactcccctcccgtctgttgtcgcagggcctctgaagggagatgcatggccaaggtggcaacttggaagtagggattggccccagggcctccgcgcaggccgctgtccttctggagctggctgggtgtggggggaacctgccttaatggtgtttccctctgttcttgtcaacaggaggttcaagatgtgagagggtcagacgcctgaggaacccttacagtaggagcccagctctgaaaccagtgttagggaagggcctgccacagcctcccctgccagggcagggccccaggcattgccaagggctttgttttgcacactttgccatattttcaccatttgattatgtagcaaaatacatgacatttatttttcatttagtttgattattcagtgtcactggcgacacgtagcagcttagactaaggccattattgtacttgccttattagagtgtctttccacggagccactcctctgactcagggctcctgggttttgtattctctgagctgtgcaggtggggagactgggctgagggagcctggccccatggtcagccctagggtggagagccaccaagagggacgcctgggggtgccaggaccagtcaacctgggcaaagcctagtgaaggcttctctctgtgggatgggatggtggagggccacatgggaggctcacccccttctccatccacatgggagccgggtctgcctcttctgggagggcagcagggctaccctgagctgaggcagcagtgtgaggccagggcagagtgagacccagccctcatcccgagcacctccacatcctccacgttctgctcatcattctctgtctcatccatcatcatgtgtgtccacgactgtctccatggccctgcaaaaggactctcaggaccaaagctttcatgtaaactgtgcaccaagcaggaaatgaaaatgtcttgtgttacctgaaaacactgtgcacatctgtgtcttgtttggaatattgtccattgtccaatcctatgtttttgttcaaagccagcgtcctcctctgtgaccaatgtcttgatgcatgcactgttccccctgtgcagccgctgagcgaggagatgctccttgggccctttgagtgcagtcctgatcagagccgtggtcctttggggtgaactaccttggttcccccactgatcacaaaaacatggtgggtccatgggcagagcccaagggaattcggtgtgcaccagggttgaccccagaggattgctgccccatcagtgctccctcacatgtcagtaccttcaaactagggccaagcccagcactgcttgaggaaaacaagcattcacaacttgtttttggtttttaaaacccagtccacaaaataaccaatcctggacatgaagattctttcccaattcacatctaacctcatcttcttcaccatttggcaatgccatcatctcctgccttcctcctgggccctctctgctctgcgtgtcacctgtgcttcgggcccttcccacaggacatttctctaagagaacaatgtgctatgtgaagagtaagtcaacctgcctgacatttggagtgttccccttccactgagggcagtcgatagagctgtattaagccacttaaaatgttcacttttgacaaaggcaagcacttgtgggtttttgttttgtttttcattcagtcttacgaatacttttgccctttgattaaagactccagttaaaaaaaattttaatgaagaaagtggaaaacaaggaagtcaaagcaaggaaactatgtaacatgtaggaagtaggaagtaaattatagtgatgtaatcttgaattgtaactgttcttgaatttaataatctgtagggtaattagtaacatgtgttaagtattttcataagtatttcaaattggagcttcatggcagaaggcaaacccatcaacaaaaattgtcccttaaacaaaaattaaaatcctcaatccagctatgttatattgaaaaaatagagcctgagggatctttactagttataaagatacagaactctttcaaaaccttttgaaattaacctctcactataccagtataattgagttttcagtggggcagtcattatccaggtaatccaagatattttaaaatctgtcacgtagaacttggatgtacctgcccccaatccatgaaccaagaccattgaattcttggttgaggaaacaaacatgaccctaaatcttgactacagtcaggaaaggaatcatttctatttctcctccatgggagaaaatagataagagtagaaactgcagggaaaattatttgcataacaattcctctactaacaatcagctccttcctggagactgcccagctaaagcaatatgcatttaaatacagtcttccatttgcaagggaaaagtctcttgtaatccgaatctctttttgctttcgaactgctagtcaagtgcgtccacgagctgtttactagggatccctcatctgtccctccgggacctggtgctgcctctacctgacactcccttgggctccctgtaacctcttcagaggccctcgctgccagctctgtatcaggacccagaggaaggggccagaggctcgttgactggctgtgtgttgggattgagtctgtgccacgtgtttgtgctgtggtgtgtccccctctgtccaggcactgagataccagcgaggaggctccagagggcactctgcttgttattagagattacctcctgagaaaaaaggttccgcttggagcagaggggctgaatagcagaaggttgcacctcccccaaccttagatgttctaagtctttccattggatctcattggacccttccatggtgtgatcgtctgactggtgttatcaccgtgggctccctgactgggagttgatcgcctttcccaggtgctacacccttttccagctggatgagaatttgagtgctctgatccctctacagagcttccctgactcattctgaaggagccccattcctgggaaatattccctagaaacttccaaatcccctaagcagaccactgataaaaccatgtagaaaatttgttattttgcaacctcgctggactctcagtctctgagcagtgaatgattcagtgttaaatgtgatgaatactgtattttgtattgtttcaattgcatctcccagataatgtgaaaatggtccaggagaaggccaattcctatacgcagcgtgctttaaaaaataaataagaaacaactctttgagaaacaacaatttctactttgaagtcataccaatgaaaaaatgtatatgcacttataattttcctaataaagttctgtactcaaatgtagccaccaacagtttgaaattagtgttactacttggaattttctggacgtgctttttttccccacaaacccaaaactgagggttgtgtaatcctggctacagtggttcatggaaaacagggcattgtaatcatgctaatcacagctgagaattctggaggcatacttgcctcttctggacagctgatccttagcagggaaaggtgctcccttttctctgagtgtctttgattttgctagaattgcttctgaaaggccagcctgtcctccactccacaagggatggttttgtgcaagggtctcaggtatttcttgacagctgtgaggagggaagcttccactctgcccttctcagtcctgggagaatgcaacagaggtctggccctgatggtaattgctgaggaccagcactctgtgtgtttcctgcactgcacagagaccttgctggaagccagacacgattctctcacctagcaatggctagccagcactgtcctggacatggggcataggagatgagcccagcagacaggttctggtcctcacagaggtcagcccttaacactctctagcacattctctgtcatccacagtcaactttgttagaaaggagagtcagcacaaaagttccgaatgtctgagtcagattgtccggtcctccaagccctcttccccattggtccagatgtgatcacatcatcccatgccaaatcttcccatgacttaatgggatggccgtcatgtgggtgctaagctgcagatggactggggaaggaagaagggttagagcaggccgggaagggcagcgtggtgtcaggggacctgtgcaggtgtgaagatcagtagactggggcttgcgtcccattcactctctgctccctctgtgatttgagatgcatcccttgatctctctgagttccagtctcccagctgcaacactgaagcttattactgccaacggtcaagaggattagactgggagagtgtgtggaagaagctagcttttgagggacaggacaaagcccgcccctccaccctgaaagttccccattttgctccctctctccacctcctgtttcctgaggtccacagagctagaataagacccacatctgcctctgctgagccccttaacaaagctcagagaccaagggagcaggaagtgacctggaagctgagcctgcccctcagctaaaggatggggagaagtcactgggtcgcatcccctgtatctccggcacaccacactgctatcctagcactgggaatcgacaatgggccaacccttcaaaatgacctggcatcagaaagaaaacctgagccctggcatgcttgcattctcccctcatttacttggccaacaacagctgtgatgcctctcctgcaccgcaggagtgtggggagcaagacacactcactctaattccatgaagcctgcagtctggcggctgccgtgtgagaagtgggtattttcatagattgtggtgcattcaggcatcagggaagcgtaaaacagaaaagacccctaacttaggcatcagtaaggatttgcttaaaaagcgctggtgaaggtgagacctgagaaaagtggattctttggggaggtggtctactgagcccatgagggctggcatggagagcccaggtggtatcctcctgtgaattggaaagggggcttattctagaagccggaggtgtagctcacacagggagtctggcatggggggcacagggcactgggtttcagcttccttattcccatcacttgtgggaggcacaaacacagctgagaaagctggacccccacggtgatggggtcccctcagcacggctgattgcatggagtggacactggatgcatattgcaggccgatctgattttctgtcacaggagtacaaggctgtgattcaacagcatcgggctttgctccctttctctgtgcctgcagctgaggactcggcactctggagtgtgggctgccgggagacagaagcagagggagcccccactgcttgaaacagattcagagagagaagtggggatgcaagaccagggaagcaacctgtggctgcccatggagggcctggagaacctcagagggcattggtcactggtgaagtctggccacactccccgccttgggttctgtgtgttccaagtaaatcctcttggaggtaaaatgaggatttctgctatttacactcaaacaatcatcaccagggtcaacttgcaagctccaaagaaagaccatttagatcagcgttccccaacctttttgacaccagggatcggtttcttggaagacaatttttccacgggcagtgcagggtggggtgggtgtggtttcaggatgaaacttccacctcagaggatcaggcgtgagttagattctcataagcagcacgcaacctaggtccctcgcacgcgcagttcacaatagcgttctcctaggagaatcgaatgctgttgctgattatcatgacagcaggtgagctcaggtggtaatgctccctcacccaccattcatgtcctgctgtgcagtccagttcctaacaggccatggacccctactggtctgcagcctgggggttggggacccctgatttagaccacacagattccttagctgtgcctgctacccattaggattgatcaaagaccctgaggcattccccgagcctctctccacataaggcacacaggacccgtgtagcacccaccctgcctgcccagcatcagctgtgaagagacgggtgaacatccgtcagcctgggagagctctggcccagccaccaggtgtgtgcagagaaggcttgggcctactgcacagcctgtgtatccgctgagcagagcaaactggagatagctaagtcctcagctgtcctcaggtagagtctgctcctagacatcccccactaggaggaagctccacaatgccttttcagggtttcctgccagtgcctcatcatggatgtttcacagacttaatgagtaagctgactcttcaggctgcaaggcagcaccaggccctgggcagcagcctctggtcaagtcacagcccaaccctggggttcccgtcttagctgctgtcagatttcaaggccattgccctgctacaagtaagagcataaggaattgtgtccaccccttggcccaagaaactaaaaagaaacaaagctgaatgaagccatagatgaaggctctgaactccccaatcctcctattcttgctgtgaatggaggggcctggggtggcaagtggggcttgtggacttggcagctgagtggaaagagccccaggcttagaataaaggacccagctgtcaatggctgtttaaccttctccagctaagtctaacttagtccaccctgcacctgcacctccaaagctgatcggagcttagaaaaaattcttccctgctgtccactctcaaaattcatactcagccacctgatcctactcagcccttctgtttgcccttcctactcctgggggcttgttccatgctttcttctctttcgttaagctttcttcctcctctcctttgtcaacttgcagctcatgatctggcttcctctgtcacagaatcaaagggagcattatggaggggggtttcccaaacaccacatgttctcacttataagtgggacctagatgataagaagacatggacacatagaggggaacaacacacactggggcctgttggaaggtggagagtaggaggagggagaggatcagaaaaaatgactaatgggtactgggcttcatatctgtggatgaaataatctgcacagcaaacccccatgacatgagttcacctatacaacaaatctgcacatgtactcctgaacttaaaagttaaaaaaaaaaagaagaagggggttttcacaagcttcacctctcgtccacccactcatccaatatgtatgcactgtagctgctttcacccacctccctgccacccagcacctgggacatggagatcagcattcctcacctgcacaaggatgcctcttctgacttcccctttctgctacaccataattttttcactgcttacattaacctgccaacatgttataatatctcctatcaaaaacaaagcaaagcaacattgaaaacgatctctaacctatatcccactgcatcttctggagtatctctgcttcttatcacacacaagccctcaaaagggttgtctgtgttccccatgcccactgtctctccgcctctcccttcgttgagcccacttccatgagcattcctttggctcatgtgctggagctgctcgggcgctaggctgccagtcagccccatgctgggaaatccaaaggccagttatcaatgctaagcttccttggtcccttggcatcacctgacattgttgatcgccctccttgaagcacattttctggttggcctttaggaggccaatctggcctgtttctttgcttcacaccctctcattccacttcactgcttcctctttctcctctagacagcttaccatgagagcgtccagggttcagtgctcctagcttgtcttattttcttatttttttgttgtttttgtttttcttttcttttttctttcttttttttttttttttttttttttgagacagagtctcattctgtcaccctggctggagtgcagtggcatgatcttggctcactgcaacctctgcctcccgggttcaagcgattctcctgcctcagtctcctgagtagctgggattacaggcatgcaccaccatgcctggctaatttttgtatttttagtagagatggggtttcaccatgttggccagcctggtctcgagctcctgacctcaggtaatccgcccgcctcagcctcccaaagtgctgggattacaggcgggagccactgcacccggcccctagctcttcttgagcaccagttgtactcacttgttcttttggccttgaacaccatggaaacatgaaggaattccagagtgctgtctccagcccaaacctgtacacccagctcctcctctgaaatgcaccatatgcagaatgaaactctgaatttccacctgcttatccccatttctgcaaatggcaactccatcctttcagtggctcaggccaaagcccttatatttatctttgattgattttattctcacacaaccccaagctaaaccattaacaaacccaattagttatcatgaaaatatttccagaatccaatcacttctcactgttactgtcttggtccaagtcacaggggtctcctgcctaaatcactgtgctagcccctgactgtccaccctcaggctctttcagaagcagctgaagtggcctgtgatgatggctggctgcagcccacctcctcaagccttcctgtggcttcccatcccatgtggtgtaacagcctacaaaggtttgccccaccagcctggcatgtctctgaactcagccctctctgctccagccacactggcctcctcttacttcaacaggtcaggcccacccctggcagaggacttttgcagtagttggtctcttggcccgcatatcatcccatggttcacccctcccttcctgcagcctctgctcaccatggccttatcagaaaagcctttgcagaggccccctcctcccacgctgctgcgccccggcctcctcttgctgctgctcctctccattgcattgcctgaccacatctgtttgtttcttgcctgctttcctgcgctgcacagcaaggggggacttggtctgttgtgtttgcctatcagttgctgtggctggcacatagaaggtacgacagtaattttggaatgatggcacaatagctaaatgggatgttaacatgttggacgctttctccactcatctctgcaatgaaggcagcaactcacctccagggttgtgcattcatttgcacacccaaggtcacactggtacccaaatccatctcactccaatgtttgtacatcagtggttacccgcactgctccttctgcagactcccctgtgtctggcccttccccctggaatcccagcacatgagaaacactatagtgtttattccctgtgagcctaaattaaagaaccatcccttccctagaggcacccccttccaaggcttccctgcttccagtggggcctgaacatgctgcctgtgcaaaccacaggccagcattgggacaggcacagctggtctgggctttgcagctggtggccccaggggacaaccacagtggctgcaggtcccattcctgagccttggaacagatttctgctgctggtgcttcaggacaggcctgacatggggcagtgggtggctggccagacctcaggacatagccagggccctagagggcagagacaccaccaagtggagttttccacgaaatcagtactggaagccgaggctgagtctttccaaaaatggacacagctgggaagtgacaaagtgaggattcggacatgagtctgtatggctccaaacctaagcctgtaaccataggacccccctgcctcccctctaggttctctataccttccccactgccctaccaggtggaggccttaggctaccctggctgctgctggcttggcctaaaggctgatgctcccagccagacctgagcaagatggccaacctccggggaggagctgaggcaagggccaagagctcaggactgtggctggcagcggtggctgtgctcagctttcccaggcagtggccaaactcaatgctgcagccagagaagctgatggggaggaggagcgaccaggcttggtcagtctggaaggtcccagatgcagccacgggctacccttgtcctttccccttcccaggcacttccccaaacgtgggaccctcagcctgggtcacatgggcttgtaggccgtgaggaaacaaccattctgggcattcctgagccttgggggaggcggctttccttccgcccactatgggaaccctccagggccctgtcggtgccttcgctggggaaggaggcctgccagggaccagctcgttccagttcctcctctgagagagcacctgcccttcaggctgtgtgggcctccccctgctcaggaggccaagggaaactggagcctaatgcattcactgcgtgtttcctttgttcaggacagagctcctgctggggacagaccaacacctaggtcatgtgccttccagggcagcctgtgcctgccaggcccacacaggactttcaggtaccatctcttccagttgtcctgataatcccatgagctaccagccctctccatgtgatggacacagacaaggagcttcagagtagccgtgagccccacgtctcagagctgagatatggcaggcaggagcccctccttgggctgtttggggccaatgcactaaataaccttctcttgtggtttgcagtctccggccttgttctccggccttggtcagtctggaaggccccagatgcggccacatctggggccttccagatgtgccagcacaggggctgccaggctcaggtccatggtttgccttggatggcacagggatatttctggggtttaagtgagaatccatgtatgggaaatgctggacaaagtcaggctgtgaaattaacataaactagtagaagcagcaattttaaaaaacaaaatagaaaagaaagaagaatgtgttttcaaatagaaaagaaggaagagaataaaatgagaaattttggcaagtgtcacatctactgtggggaagaataagtcttgagtgtgtgtgtgggggttggtgaacacctgatgatgatgatgatgatgatcatgatgtaaaatacaacgtttatcataggttgtggtcaaaaaagtgtactgctctagtgtacacaaacccagcgatgagtgtggctcatcttgaaccccaacacagaaccttctcagggagcctggtccagtggggcaaggctcatggagccccctgctgacttctcaggaagccacaggggcagaaaccaaagcatggcttcctggaaatgtggggactcaaactccaaaattcccaagaggggacttgagggggtcattgccctggacaatcagtggtctccaagatgctattcagatccctttcaaagtcctggaggaacaaagtgaccatactgtcccagtatttgcctgttgttccaggaaaatgaaggacagagccctcttctctgtcagaatgtcctggtttcaatgataaactgtatggccagtctgtcaaagagtgagggagtttgtgggatctgctgcgctcatggctggaaatacaaagcctcctgttcctccagccctcttccatcaccctccccttctcctccaggaaagcctggagaagccccaggttcttgctgtacttcctccctggatgtctcttctcttcacccaaacttggagctgctttctggagcatctgaatccctggcctggcctggggctcctcatactccctgtaaaccaggtacaggcagggaaaccagcccaggaagagagaagttagagttccacagggtttgaggtggaatgccagtcatgtagtcaatgcgatcagtgttcacccatcacaaaccacagtggagatctgagaagggaagtctcagaggctctacaagccctggtctccttgtctgtggttcctcatccatttcaccctgagcagggagaagggacagccctggactgcctggaggtgagcagagctggagcctgagtgcaagtaagaataccaacctagtgttcattccacccttctacatgccaggcacttagcacattctgaataatgctccctgctccctgcaggggagatgatatttctgttttgcagatgagaaaatgggcaaggttagcactttcctaagccatgtatggaaaagtagctgaagcttgagtctccacattttttattgagctgtctgcatcaccaggcagttcctccttcctgtgtgtctgagccgcagccatggagggataaatgaaggtatcagggggtagggagggattgtgatgatgagagggggtcaccttgagccaaaagggcatcagacacttctttgacttctgctgggctgtgagctgcccccgagtggagggtgacatgacttggactctcaaggggtccagcacacgcagggccacgcaatgtggcaatgttggctgacacttggcctgggccctgagcagccctgaactcagaagagaggagctagaaatgcattctggaattggaaaaaggaatggttagactctgccttgaccagttagcatgaacacaggagccaggagactggtaaaaaataagggggataataacaataaaaattatgccagctaagtcttcccaagtgccaattttgtgccacgctcagggctggctgctctggaggcaagagaaagagaatgacttgcacagggccacctacagttgcctatcatatctgggtccctccccagcatctctacctgtgttggcttgagcaagtattggggccttgaggctggatatgctgcctggccagggtatgcagtgttaaggtaagattcccctccccggctttgtccctggaatccttcaaacatgcatgttcttccctcaatttttggggtacttctatgtccgttgtcatcactcatctcttagtgagtgacaggtgctcttggtgacatctctttggctgcctgtgttaaagacattccttagctgcaggtcaggcagggattcaagattgcagttgccttacttttccccagtgtgcgctgtgggagtcagggctctttgaaatgcccaagggtgggacattactaggaagttggggttcaggaatcatcctaaatgcatgtgctctagggtctggcctcggtcttgggtacaccaggggccacctaattcctagctcagcctcctccagaatgtgccccacatccagggctttaagttccatccattcctcaatttatcagccagagtcatcacctcttcccaatttcatggaaatttccagctcctaaaattctaccctaaaccatcatgagctcattgcaagacattttaattacttgttgaacagactatttaaacaaacaacctgaggatatgtaaattgccacccattgcagctctctgacctacagcttcaaatgggatggggcagcctcagtgtctacttaaagacgcctgtctctgtaagagacaagggcacgtccacattgtaattcagctgccaaggacagagtttgaaattatttttgctttttcacctgtgaatagaaaatctttcctctcgattctaccctttcttacttgtgctgatggttcacaaaccacagatttccacatacatgtttggatgtccatgttcttgggagttcagattcccagctttgtcttttactcccaatggttccacagcaaattcaccccaccagctgtcctgccagggggtccagcaccagctcatgccagtgtgacaaagacggatcccttctcagaaaagccagatggtctcccacccaaaaaaaaaaaaaaaaaaaaaaaaggtttccaagtaaaataagacaaacagccagggccaagagctgtccaccaggatcccccatgcccacctctcaacctggctccccactagaggttgtttacaaggataaattgaaatgtccagtgcagcttggaagtaagattttcatctccatctcctttcaacccacaccatgagctgttttacaggaatcgaatcaaagcacagcacacgttttaggttcccagcactgatatgtccttcctcgtcattttcattcacatattcacaccactcaacatgaaggtgaaacaaaataagacaggaaaaaagtatctttggcaagtttgggcttggaatctaggcaggaagtaaagaagctaggagagaccccatgccaagcccacaatctagtctgaacactcatgtaaaccagagggagctgcccgctctggagatagctccagcctcagatggtgatgctctgggcacgccccaaagtccaggcacctttgcacttcccagtgtcctgaaacagaaatgaggaggctgcccgactcacagtgcatggcagcgggggtcatccgtggtattaaaaaatatgcagagactagggaaagtctggggagcgggggacaaataaagttgaaatgagtaaaaaatagaatttataaaatcatatgaaacatttaattttaaacgatgtgaggagagcctttatcactgtcttgaactatttaggattgtggatccaaccaatttctttcctctaaggaaactgaaaagtgctttaaaggcagcaatgtgttagattctggagcaaaaagatcatctccctcagcttttaggttccccacccatgcctgatacagtagaagcttactgcaggagctaagtaaaaatgctctgcatggatctttccagtctaaaggagtgcaaatacagtttgaaaccctttaagaacgcccagcagcagccctctccagcttcccttcccctcggtcacacaggctcactcctgcctccccgctgtcttcaaatgatcctcccctgcccaggacctcttttcagcctggcagccccatgacaccactgaggctgcagcagggcccttccctataatgagtgagatgcctcctgggtcatcttttctgcaccacgccactgccttcccagcctgagctctctgtatcatctgatttccttgctcctgtgcccatggttcatcctccccactggatatgagctccaccaggcccacaccttcctccctgccatccctgccatgcctgctgctgggccctgtcagggcagctggctgttccacatctcgcctctctgaaagtcttttcccataatgcagccaagttcaagtttgtttaccttctccccggttaaagcctgatttactatcccaagaaggaaggcagcaaaactgtcacacattagatatttacaaagcagtgccccgtttttctcggtgttgcccatatgccctgaggattttgcattggccacattatcataatttgaatatgtcaagctaatatttctcttaagactttcttatagttacatttccaagggaaatatgttagcataaaatatgttcattttatttaacaaacaaataatatgccttagccagtttaatacgaacactgaaactcccggggatgacagacagaagcattcagaaaaatggaatctactattttttctatccaagtgcaaaaccccagacaaaggacttgctcataagcatcttgtttagtactttttctccacgaatatttggaaaggagactatcaccgtaacctactttcagtgaagtggatgaaagaaaagagaagtagacaaatctgaaaaaaaaaatctagtaaaagaaatacagcaaaggaaagagatgagaaaagcgagtctaggaaaacaggggcctcctgggggaaggtctgggcctgggctctcagcccaggctgcccatttggctcgtgaaatccacactgggtgaccagtggaatcagagccccgggtgggaccgggggcagtggtttttaaagctctgtgggcgatctcggtgcccagccatggtgggaagtcactgctctagaccagtggctcttaaactcgaggaagccttggagttagctgagacacagggttcttgattgcccccagaggttctggctcggcaggttggggtggaacctaggcatatgcatttctgacaggtccagggccacagggtgagagggagcctgtgctccggaccgcgggcatgcggccttgttgtgctgggctggtcagtgtgccggtggtgactgtgtactgtccagggccacagggccagagaaacatgagacttcaagattgaaagagatgcccaactccggggtgttaatcctgcctcttgttcacccactcaatgagcacccctccctcccaggggagtccgggacatttcttccaggtttgattactgtgagatcatccattagactggtctgagcttgcctggcagatcttcctcactgaactcagtgcccctgggagtagaggttccattgtccagctgacgagaggactggggagttacagtctgggtttcttattcaaacatctccccaagacgtcttgcaaaaaggcatgggtactcttccctggttcctggcctccgccggctcacactcaggcatgtttccctccccaaggggaagtccctgcggctgctccctttctaaccagcccccacaaatacaaagaggactgctggggtgaggggtggcaccagagggcatgtaaaactcggtatcgtttctgtcactggagatcctaaaaaagcccctccttgttcctgagcccagtgacttcccagggccttttcggctgcctggaatctacagcagccacctgtaaatcagaggaaacccatgctgctgtgcctgggatccttgaagcgttttctctctctctagggggtgctgagccagccctttctggatgctgggcctgagagtcccaggagagccctgctttgcttgccctcgcccagggtttggcaggaagcgctcatcctgagctctggctctgaggctgctcctggtcttctttctctctgatttcttcccactccctttgctctgcctcgatgcccagagggaaggcatgcagggcccattccacaggtgcatcctcccgtccccgacttcccacctgtcctgggatggtgagagacagagaaagaggtagagagagacagaaagagacagaaacatgcacatgcacatgtgcacgcacacacacacgtgtacacacacacacaggtccccacccagtgctgaagcaggtaagcctacacgcctcctagccacagaagcgctcggagtggggcatcttctggagtccacgtgctacgtccagatactgaaaatcttacatcttgggtcctcacttctcagctgagcttccaactcattttttattcagttacctacttggatgtcaaaggcatttcaacctttgcagagaccaagagaaagcttgattctcacatcccccttatcacttaagcacattcaactcccagcttccttgtcttgcggtatcaccagccaaaaacctggagctgccatgattccaccccacccctagcgtgcacacacacacacacacacacacatacacaccccttcccatcatcaaagccattgtggctttcaatcaaactcaaactccaatagcttcctagagctctctgggcctccatgtgtgatcacacctgccctctcctgccacctcccctggctgcacagggagctttctatgcactttgtgtgtgtgtgtgtgtgtgtgtgtgtacacatgtgtgtatggagccagcagggagccagttagtggaggtgagcgtttccagaagcagcatgtggggacccagccctgcagcctgggtggggatgctggcttatcttcctctccgcttctcagcccatctctggggacccagcctctgtgctgccacctccctgcccctctttcacgtttccattactctcattggattcatggtattctctgtgtatgcaacaaagactgtgttctactctctcaattccttgccatactagagggcagccaactgcaggggcttccgtggggagaacaatccagatgggcaagtgacctttggactcagtccctaggagtgtgtttagagacatcactacccacagaggttactttatgaggtaaaattctgagggatgtgaggaataccttctggcccctctgaatctaaaccctactgtctcagcccagacctctgtcctgggaccactcacgggcactgctgtctgcaccaccagaaaatatggagacaacaggaagagctgaggtcaggatgtttcttccctggagccctgcagccaggttactcccggtttctgctgatggaggctggttgctctgtccaggggagccatctacctagagcaccctgcctttgcattggatgaccacttccccaccctgtgacctgcttgcacctttgcaagtagtgcctttactaaactcctctgaaatgaccctattttgagtgtgccatctgttttctgctgggacgctgattaacatacagactgttacactttcagatgatattttcccatgatgtttgcatttcttgaaacaagcctgcactacttttatagtacatgtaaacagtaaaaataaaacaagaagaggcagcattcagcactctgcaaggggagctgcttcctaactcggctcactctggtcccaggtttcaactccaaaggggacacaagctgacccagttccagcactgtgtgtaaaaattccccaaggggattttagcttaatgagttacaacaatgcccaaaggacttgttgagaatgaatcaattcacactctggaataggaactttacaactttagtctgaattaagtttaggtgttacaagcctagtttttggagttaggaagacctgagctatagtccagacttagcctgtgtgagtgtgacctcagacaagtcacttaatttctctgagctccaaccttgtcatctcaaaatatttctaaatttaggggagaactaattgagaaaatatatgaaaaatggttaacataataagcacttaatacatactcaaagcgtgaagatgattctcattatcgttattctaaatactactccatgtgtagagcacagcatgggaggtgaagatacgtcagcttccagcttctttctaacagggcgagcatggcaagaaggtgctctcttctcaatctggcctgggctcctctcatcattttcagagcctattctgcctgccctctgcgatatgaccctgaagcctagggtggcaaagccttttatcaatgtctttatcactgatgagggaaatcttcagtcttgccacatgcaacccccacagttcccatatgcccagaggctggatcacctgatgccaaggaaggacatgtcctctgataaggtccccagaatgctgactgcccactgaggtggctggcttgggacaagtgtcttgcggcaggtcatctgagggctccatgactggctcggtggggtcacaaggccattttaaacatttgctgttcaggaagaggctttttccaagtgaggattcaaggggagccctgccatgggcagccatggggacacagggataatcctctaagatggcacccctgtccttgctgcctacccatctccatcaagccactctgtgcccacggtgaaagggccccacttcccgtgtgagtcaatacaacacattccacgccagcaatatggagccatcgggtgtggaggtagaaagggttggcctgaagctgtgcgtgccctcaacctgcaaggggaagttgctttctcctccaacccagatgggcctggagcaaacactcacaagaggttttaggggtggcacttgagggacaattggtgtttcattgactatgccacactcgctgctttctacccctagctgtctctctctgttcatgggtagccgtttccgggagtattgaggagcttgtgtgtgtgatatccaggcccctcagggcctagttcatggtcatcactgatacagcgaccagacccctgctggatggtgcaggtcatacaacagggtcctctgtggagacagaccctctagcagctcctgccagccagtttgggctttaaatcataaatttggtgctgcctttcctctggagggaaattttccaatggcttttccatgccactggaatcaaatccagactcttttccagggcctgcaggtccagcgaggtgtgcctctggctaccttccagggttcctcgagcccctctccaaactacccaggcttccgtgccatcaagcctgggccccctcaggaccttggcctggagcgaccccatctgcttatggctgtctcctcttcactcttcaggtctcaattccacaaatccctgctcccctggtcaggtcgggcagaccgccctctgcaccccagccctgcctctgtccccgttgagctgccccacagcagtgtcaccattgacagtcccttgtttccttgcccactgcctatgtcctcttcagcatgtgaacttcaggagagcatagggccaacggagatccttgcctttctccatctgtgtcaccagggccctagaaggagcaggagaacagttcgatatttcacacctgaatggtatttaatcagtatgtgagggctggacagatgcatgaattcccaggtggctttccagtttagagacacggggctcctgcctttaagacagagggtcagaggcattccaccaaccaagcccctctgtgcactgcaggggtaagggtggacacaccagcatcttcctcctaaaaagtgcgcactcccaggaccccctgatagaggaagactgggagatgcaagggagtgtgcagaggaagccagcagcaggtgtgaggaaccccaggacttctcaatgagcctggggccaagggtaagaggccgggcctgacacaagttcagtgggatcctgagccttggagccggcagcttgcccaagccacagctggccaggctcagctgagcctcccaggaggaggagggctgtataaacaggaagtctaccgccccgacactgatgggcctttgataactgctaaaccctcctcagtctttctcccaaacagttcctcccttggtttgaagtcacagttctgggggcaggaaaacagattccacaccttcctgactcaatcaccaggcaccagaaagagggagaggatggaagcaagaggtgacagagagaaccagagagacggatgagggaggagggaaggaaaaaacagaaacacgagggagacaaagagtgaggaggggaagaaaataagaagagaagcaaagagagtgtggcaccaggagagaggtgaagagtgagctgaatgaccctgtagtttctctaatgcaaagtttctctaatgcaaagcagctagcccaaaaggagctgatgaatgccagagctactctggggggatcaacccatgaccgacctcttctgttcactccctgcttttaaagcacggaagtcagagacatcatccttcagaagcgggtctcaccaggaaccccatgctctcacctgggctctcagggcctgggatgtggcccttgttcccttggggatcagtacctggtggtcctggcacccacagaggcctccttgttgctctctagcgtggtgacccctaaaaacagaggaacttgggtagagagttgctgccactttgggactggtcatgctgaagttcaagtgaatcctggtgactgtgctcttcaaatgaaaaagatagcgtgaaagaggggaaagggctgggcgcagtggctcagtcctgtaatcccagcactttgggaggcctaggctggcagatcacctgaagtccggagttcgagacaagcttgaccaacatgcagaaaccctgtttctactaaaatacaaaaaaaattagccgggcatggtggtgcatgcctgtaatcccagctactcaggaggttaaggcagaagaaacgcttgaatccgggaggtggaggttgcagtgagccgagatggcgccactgcactccagcctgggcgagagagggagactttgtctccaaagaaagaaagagagagagagaaagaaagaaaggaaagaaacaccttttggatactttgtctagaaaagaaagaaagaaagaaagaaggaaagaaagagaaagaaagaaaaagaaagaaagaaagaaagaaagaaagaaagagaaagagagagaaagagagaaagagaaagaaaaagagaaagaaagagagagagagaaagaaaggaaagaaacaccttttggaggtgagaccacaccgctagtagctacctgctcctagtgacccacagggaatccttcaccaacttgatccttagtttcttcatttgtaaaatagggagaatgagagtgtctacctttcagggttactgttaaagttcagaaggaataagcaagggcaagttatctgcaaccaaagtgtgccatgcccacagggaaatcagatagcaaagttgcctgtaggtcacacatgtctatcttttggggtgcatgcaagcaggcaggtggctaggtcacatgctgaaaaggccttagataaagtgtgtgctccctacaaaaaagggggatctggcagactttccatctgttccaagtgcccagcacaaagcaaaggtatatctcctaggttttcaagactaatttgcctaactgggcacatactacacccaggcttggtgttgtgtgaagaggctgcttgctttacagatctgccttctttactcctcccatagtcctgtatgacgggtatttgctatgctttgaatgtatccccaacaattcatgtgttggaaacttgaaccccaatgcaacagtgttgggagtgaggcctagcaagaggtgattagtttatgagaaccctgccctcaatgtcattgtcatgggaatgaattagttatcaagagagtgggcttgttattaaagcacgttcagccccctcttgctctcttgctctgtgtatacttgcttgctgtttcaccctctaccttgggatggtacagcacaaaggcccttcccagatgctggcaccatgctcttggatatcccagcctccggaatcatgagccaaataaacttctattgtttataaattacccggtctgtggtattctgttatagcagcagaaaacagactacaacagtattattcccattttccagagagaggacctgaggctccattaggttgagttaaagccaaacgtcattaaatcattaggagacagagcctactagcggctgctagttcccacgtattcacccataactactgcacaaagatgcctcagaataagaagaggacatgttcttgactttgaggacattgaggagcaggaagaaaatagatacaaaaatgagcaagatgttgtgtacatgatgctgtaggagtgggacaggagtgcagtgtcgaacctgttcaactgtccatgctatatagtagtcccacaaggtgaaggacatattatacttgagagagagaggtgggaggaatatgacaagccatgctgagatcatgtgcttatccctggatggttggggcagttgaaccttgagtgccaatgtcctgaaggccacagggggaatggagaaggagcaattactcaaaggaaaagtgagagttccattaccagaagaaaagggtgaatgatggctaggctgaaccaaccaacgtattctccccgttttcagctgactaattcaggcctcgtcccctggtgcctttcttgtatacccggctctcttagcatctgccagttccataacacttagctaatgccttgtgcatattgtctgttatcactagactatgaattccctgagggcaagaattaggattttcatctttgaatctccaggaccatagttcaataaacgtttaatatggcaagatgaactttgtcttatgaaaaatgacaattttcagagcagggcaatggcaggatctgatttgtgctctggaaagatttatctgatcacaatatgggggctaaattagtggggaaagcaaattgagacaggaagacaaatatggagactataggagccaccatcataagagatgaggaaccatgacaatggtagggtggaaatatgtaaatatcagtatcttcctatgttggcccagccaacataggaacattaattaacattaattgattattaaggaggaatgtctttgctaagcacgatactgtatggacatggtaacaactcagtgtcacagcagagcttacaataaaaagcagccacctcagccccactgtccacacacaggctcacttctgcaggcagcctctttctatcatttgtctctacttcttctgctgtttatttcaccctttattttctctttttgttgtttgatggttcatctatatgtgctgggcttcctcattcaggtggccgcttctccctgcccgcactgtgagtcctgcactcagattcccaaataaatcctggggcctgatgtaggcactgaggatgcaggatgcagcaatgaacgaatgggccaggcatcatgaagtctacatccaagcggtgcatgcagaaaggaaacagtgactacgtaggatcatgccaggacgtgatgcatgtatcgaatgaagggtaagtagtgaatgtcagcttggtcttccatggtgtgctggagggcctttctgggtttgagaacagcacagcctcttgtcccctagacctgtcttcttgatggggaaagttctgagactggacaaggtgagcagagaggacggcctggtggagtgtgaggaggggagagcattcaccacagcccctgggccagcctcacccacccttcctagaggacagcacaatgaggggacagaggccagcagctggccatggcaggctgagtccaaggctgattgattctgggtgcctcgtcttctctgataagtggtagcttgggaccagaattaaatttatttgaaacacgtaaaggaaaatgatgctttcccactgcaatctggacaggcagattcacacctgatacctatacctgcttctctatgaaggcagcagcaagtattgccaaacagaggtaaggagcatgatacatgctctccctccctttccacagaccccggtgaggaaagctggtcacgtctactgtcaggcaaatagcccagaagcttttgagtgagctgagggctgacactcacccaacagtaacacagacaccctcaggcaaggcgtccagggcagggtgatggccgtctcatcagtcaggctccccgggaggaccacagaacaccttctccactctgaggccacacagcctatgtccaggttcagtgcctttccctccctcacagaggcctttctccagggcatggagctctcagggagtgcaggtgagggcccagaccccagcagcacacctggggcaatggtatcttaagctgcatttctgtggctgactctaagtttgacagaatggtttcaaggtattcagaataggggagttacaaggagacccagtgaatgaggccgtgatgtttgtcaaatactccctggcacacaacgcagaaagcaaatgtagaaactgctccaaagtgatgcctcccaggggttgaggcttttctgggctctctgtggtgctcagtgctgatgctgcttcccaaaagctctgagcgcttcagtgccccccgcaggcctctgggtacctgggacactgaaggcctctggtacttgattatgcccagggtcctggtgtcataaagagctccctgagcatggttgcttctctgatttcccagcacccattccccctccctaacagcacgactctgttttgcagaatcttctttccctctccctgctcccatccagcaggtctttgacttccaagctgggccaagggatgagctgctgggagatacgaccctcagtccagagagtcaaggtgagacagtacctggatggcgttccttctggtgctggtttctgagagggaaggcaggggactcccagccccccaggcaaccctggtcctcatcctgccttttttctggttctcagtctggttctccactgttcttcccatctaagaatctaacacacacccctcagtaaaagtactattgcctgagagggcagtaggtggtgggaggagactggcacttctagctggtatctgaaccctgtgtgacttggactatggatgccaacaggatagtctaaatcaaccgatttataggctctgatgcctacatccatttaaatgtacacggatgttttgtttttaaaactttggtagctgtcaagtaggcaaacatatgcaaaacatggcgggatgggtcgtttaagctcctgaggctgaggacctgctctgtcttctgctgccatcaagtctagggtgctgggggacacaggatagtgaggtgtcgcctcagggagcttcatgctgacctgggagggggaataaaagggtctagccccacaccgatgatactcccctgctctcttctcctccctacacttcccctcttgccgacctcaaatattccaattgtttcatgtcaatcactcccaattctccaccttgttcccactttcacttctaaaatccagtctcacattttctattgccaccaccatgaaatcccaaggatgcctcaaacttattaaatctaacctttgagcatcaagcgatgtacagggatagaggggaatagggcaaaaagcaagaaatgggaggacaatggttttggaggagcagcattttggtccgcagcgtccccaactccacacacatcacttggcactgggcatgcagtgggcacttcatagctgctccctgagtgaatgccttcatgaagggctccagcatcccctcagcggtgaaacctgcggagtcccaccacgccttccttcctactccgctcaggccaccctagctcaggccctcaccgccttgtctctgagctacaggatcttaattggtctcccctcttcagcttccccactccaatccattttgctgattaagtctttctcaagccaagttgtcctagtatttgtcacgtaaacatgtgtaccgactgtgtgcctggccctgggctgagggcctcacacacagcagcatgcctgctcttcaaagtcaccgtgtgaggccaggactcactgtcccctcgctacaggggagaaagctgagtggagaggcagcacagctccctagccatgcaggtggagcattcactggccccatacctgggcacctggtcatagcactgttctgttgggctctacattgtatatatttttaattttctgcatattgccatgttttgacatctaaaaaatcctttctagctgaggagaaactgcagctcctgggccagttattagaaagaggaaagggcccagtggtgagcatgcctttgaggtgcaaactgacccatcagagctctccctcctttacctgggccttgcaccccaggaggcaatacccgctgccctaaccatcccagggacagttctgtggtctggatgttcctatccccccaaaatgtgtatgtcaaaaccctaactccccgaggtgatggtattaggaggtggggcatctggaaggtgatcaggtcatgggggctctgggattagtgcccttataaaagaggcctgagggagatcatttgcccctctcactgtgtgaggacacagcaagaaggcaccctctgtgacccaggaagaggccctcatcagacaccacatctgccagcaccttgatcttggacttcccaacctctagaactgtgagaaataaatggctgttgcttatcagtcccccagcccatggcattttttacagtagcctgcatgaactgagacagccaggcaccagacaactaggcaccatctacgtccaaagcccatcacagtgactctgacactcctcgccctgctctgccttgcctttcccacagaaaccccagtagaggtcttagcccagccttcccctgtccctgccttctgctcctgactgccctggtgtccttcccacatttgcccagcacagcaccctcctggctctaggacccatgagtgtaatggactcttcccaagcctctcctgtgtctccttctgtggctgcacccgacgaccatcatgtaaaaaaataagagcttctcattcaaacatttttaattgctccccaaagtgtacagagaaataataataggtccttcaatctgacattccagaactttctgtctcttcccagcctctttccaggtggatctctccattagcgtccgacttggcaacttggggctcttccctcatgctggcttttctcctccccttgcttaaaggagggtcatttctccccatgttcaactcccacctcttgtggagggctaaggtcatgcaatacctggaacctccttgtgaaaatatgtctgcataaccttaccgtgggccctgtagtagcgctcctgtgctgaccatggcctcctgaggtgtgtcgtgatggcaccatcgcctctcccaggctctggagcagggagaaatggcctctcatgccctcacctgcagggggcctcccagccacccctgcattctcggcagcattcaatgagtgaccagaagggaagttcttcctcagagccctcatgaatcttccttaaagagaggccatctgcctcaacatctctaggaaggagatctccatctcgccagcctgtggccaaggagatcagaatgtccaaacctcttcataagaaccccagggcagaaataatggatcactctttcatgacacacagtaaccctcttcccagctgagcaatttggtgttttaaaacaccaaattcattactccaggtcattaaaaataatcatgagttaaaaataaatattcagtatacgaattaagagttagcaggcaagtttcttctatttctttttaagcccctgaaatcccaagttctctctttccccagtttattgaaattcgaaagcacgcctgtgttctgccaggttccaagtgaccctacgttaaaaagacacccttgaggcagagcaggtggttggtacggacctgactgtaaaaacacattgattaatttttaaaagtgcagggtatgtggggtttttttgtttgtttgtctgttttttaaccactgagaatcccttctttctgttctcccagccaaaatagtctcaagatttttccccaaaagagtttccaggggcaacttaacaagtgcagaaaattcagaggaatctgtgctagcctgatgtttccaagccctaccctggaagaaagtacacaagttaaatgcagggaaagttatgctgggaagctgtgctagtaactgggaaaaaagagtaggttcttttgggcagcatggttcccagatccggatccacaggtgcttggcgccctcctcagccctgtctgccctccaggaagtgaaagagcacttaactgccctgtggggctgccctatccccagacactgggggattctaccctttcagagctgtagtccttggaaccaggggttggaagggcttatgccctgagtagtagagagaactgcctatgcattcgaagaactgcagctgattttcaggccccaggaaacttcctggtgatctagttgctttgtaagctttcaaatgcttacctgtcttcctctgcagtagggcttgggaggcacattcaagcccaaagatttcctctttggactttcattttgtaaaattttgtccatttctctaggttggtcaagtaaattttggatcttagttctgtcacccaggatctcctcccagctttgtgtgctcaaaagcctccagctactcaggaggctgaggcaggagaattgcctgaacccgggaggcggaggttgcagtgagccaagatcatgcctctgcactccagcctgggcgatagagcaagactctgtctcaaaaaaaaagaaaaagaaaaagaaaaaaaaggaggctcaagttggcgaatgtcccaagtgccttttcagcagccaggcttcctccccccatcagcaggagatgagagacctggcagacaggttgtgcctcggactcactgctttctgtcccttcattcccttaagacctgtctgaatttcaccattgccatggctttcttctgtgccgttcagatttttcagctttcttatagaattgagtttggactgagaacacggggctctgagatctccccaggagagaggtggaatcaggatcccccttcatttacccacctgatcatcatcccttcctgtcttagctggaccaagactggcttatgccccatgtggaaaccaagcctgcctttgcctgctgtgtcccgcctttcagtccgtggatgtttctacatgttagaggtgtgccaaggttctcatttcccaaatattcgttcccagagaaggacgcaggtgaaccacgagttcttctgcattcaggatgtggcgagaaagccaggttttcctgccctatcctccctcccctcaacaaaagtgagccttcctcttttataccagtctgggcagtgcagagtaggaaacaaacagctctgtttctccctctccttcctcaacaaatgtgtttccctgcaaagcaacttcactatttgtgtgtgggttctcagtgccctccatggcagctggctgcaggccatcccagggctaacccataacattcacaagacagccccatggacagagagaatcactcatgaactccagcaattatgacgtttctttcttttattctaatagagtaactctcaatgtatctccagctaagttatttatcaaataaaaagttcatattccatacctaattagatttctttgtaagcttcgactgatccatcctatagatctggtttgttgagaatgcaatgacatatgagaagatgaaatgaaagcaagttcattgggggagttaatgctttaaagttgagacttcttgggactggttcagagaaggcttcatttctgggaaagaaaaacaaagaaagatgagatgggaagaagcgagaggtcatataatttggtttaatgaggactgtttggggagctgtggcttttagccatgcctgtaaaattctcctttgactacatatgagggctacatgagaatttttctgctaaagatttagtattccagttatgtattactgtgtattgaaccatcccaacatgtagtgccataaacccacccccatttcattgtgcttgtgaattcagtgggtcatgagtctgaacaggatgaaagggggtggcctcccctcctcagtctctaaggcctcagctggaaagacttgagtggtcaggcgtgatgctgagggctggggctgagcagggccttctgcaggtgctgtcactcaatgcctgggcttgacagctgggaggctgggtcctgttggagtgctgaccacagttcctcctcctcacctttttgcctggttaggcggctcatagcatggtcgctggattctaaaagagagggcctgtgatggaatattttatgtgtcaccttgggtaggccatagcagatatttggtcaaacaccagcctagctgtcactgtgatggcatttttagatgatatgagcatttaaatcagtatactcagagtaaagtcaatcatgctttatcatgtggggggcctcgcccagtcagttgaaggtcatatagcaaaaagactgaggtaccctgaggaagagggaattctgcctcccgactgtgtttgggttcaagttgcagcaccagctgtttcctagatctgcagcctgacagcctgttttgcagatgttgtacttgctggtatccacaattgtgggagtggattccttaaggtagatctctctgtacacacacacacacacacacacacacacacacacacacacacaccctattagttcagtttaagaaacagtaatcgataggggcccaggagagagtctcaagagagattattagaggagatgaaggctgaagtgtccaggtcacgtccctaggctctttggtggagcccagattcggggggaggggacatagcctacctctccaggggaggaatgtcaaggaatgtggaaccattgttttcagcctccacaccatgaaactgcagtggccctttgacagccaggaccatacagagggcaagggttcccagtaattgtctagggagctgggtgaagagcagagaggaagagcacacctgtgctaagagccccagcaccattgcacagcctctgaacacatcctcttaggaggagcccatttgcacctacatctccttaggaccaagtcatcaaggtgaactactgcctctgagctttgggagaaacctgtggcacaggccatgggatctgaatatctggatgacacagtaggcaacttggaagagggtgtagaggcaaaacctaacattttgtggattaggttgttgggcggctgaacacatgggcgacaaggtcctccctctactcccagtgcaccaggtagtacaataaattctttcatggtctcatttaacctttgaaataagcatgtagagtagtgtctcaggaatctattgtagaacaaatcactctaacagtcatttcatcatgtaccctcgtggtcctggggtagaataggctcgtctgggctctccctcagctgtggtcagagggcaatgagggcagaagttctctccaggctcacccactcactgtggatgtgccatctgctgggacctcagctgggactgtcagctggaaaggctgtgtggggtctccaggtggctgcttggctccaagcaagaacatcccaagagggtctagcagaagctgtgtagcctcttatgacttcacctcagaaacacagagtgtcacttccacggcattccattttttaccagtgagtctcaaaggccagccctcatttgggggaaggagtatcaaagaatttgcagatgtgtcttaaaaccatcacaggcagcatgaatttctctcactatatagatgaggaaaccaaaacctgggagcctgagttgaccgtgatggtgcacacagctagcaagcagcagaagtgagacatgaaaacagctcagccagggtccgaagcctgtgcatacaaccaccctgccaccctgcgtctctgtagccaatattttagcagggcatatactacatagatacataggaacagaatttgagattgaaaggcacgagaaagaactaataaactattccaagagcaggcaaggaatgggcttgtaccactaacagaggtcagaaaaggcttcccatggcaggtggacttggcagagtgggtaagataaggatgcgcagagaagctggagggggacaggaaaatgtggcagggtggacggggagcaggtattttaggcagagacactgcacatgtggaggcaggaacatacctggtaaccctaataacagcccagtgtgcatacagtgattcacaaaagaagaaaatgaaggagatgtggactggcacctggtataaaagtgcttaaatgccaggtcgaggccttttgctttcatttaaagctatgcttctccaagtggtccctggaccggcagcatcagcatcacctgggaacttgcaagaaatgcacattcttagccccaccctagacctatgttttaacaagtgctctaggggattctgatacagcctttagtttgagaccgtctgctcctaggtatggggggcaggagaggtggggacccagcagttttgagcgagagagtgcaataatctgagttgctcttcagcagatcaccctggctggggtgtgctgggcagactgaagtaagagagcaaacctttgccccaaggaagggtaatgcagggctgaactagcacaggaagagaggaggaaggcaggaaggaagggcccagcactggggccctgcagccttgggacttggtgatggtgaggagagcaagttctccctcacagcgtcccatgtggacctcacaggtacagccagctacttagaatttctctaaatatttgaaccacatggcccaggaatctaggtataaactcaggacgcaggggttgggttacaggctcagtttcctattacacaatcaagcaactctctgcattttgcctccgggaaagcattgcttggtcaagcattttctttcagcccttcatgcttcattgcaaggccttttggctagactcaaggaccactgaattttctaaaccacctttgcaaaatgggtttaaaaatatgatctaccacatatggttgaaaattaaatgagataattcttcacactcaatacttattaaccacttttattatcaccctcatgatcattatcattattactcactcattcattcatccaagctatatttgctgtgcacccactatgtgcaatgctctggaaacatagtggtgaattatcatggccactcctctgggtctctctctccttcattgccagtttacctgtgagatggacaagaacatgggtcttagaacctcataaattgggtttgagctctaaattttttaaaacattaactttataatcttagaaaattacatctctagggctcttaattcacttgcaaatgggattgaaagacttgtcttgtgtcacacaattgtgtgaggatgaaatgagaaaagagatgtggaggcatttggaggatggtacaggctgtgcaccctcaggaagtgccaggattcctgcttctcacttcccctccctcaatcccatgtcctccccttggcccgttcactcccaaagtttcccactctctctggtctctaggcccaattccacactgtagtgttgcacatttccctgtctctgcttctgtgctgctcccagatgctcttccaattcagtgaaagccaattaagtaagcgatcaatttgccaaacgactaattcagtgaacacaccaaatatacagatttgtcaacaacttgcttcttttgactctctagagtatgtggcagttcttactgaatgtgatgatggtcacggatatttaaggagtatttcatttgtgctgctgtggggatcatggaggtaccagagcatagaggacttttctgatggaggaaaattcagcaacagaggcctgtctggaggctgactcagagcgggagggacagagggagcaggaaaccatggaggccacagagcctcgagcccccagctcctataggcctcttaggctctgccagttcatccaatataaatcactggagactttaataaatacattttttaaagatctattcactgatcagtgtgtggtccacgggtcttgagggacttgtggaggctcagacaagcccttccaagtggattttcagccacttatgagcacacgtggctgagccctgatcttaacggcacagggattagctttgtctctgatggtcgcctgcccttcaacttgaatctataactcagtgcacttaccaaggtcccagcagaggccacagaggtgaaggaagaggggtcattctctagaatcccggatgtggaatttggggccacctggaagggtctggcccttgaatgttttaggtaacatcttgctgtattttctctgtctgaaccttcccctcaaagctaccactttccccacctgtttcaacaattttttcttttcccagccaagattgagggtcagaagattttccgcattcacaaatgtcctctgcatttctcagcttccgggctgggctctgagcgtcatggctcagagcgccttcattcccctttccttctctgctttgcatctgtgattgtgttagttgtcccgggcctgtacctgtgagatatatcagctacagttccactgagcatgcatgtgctcactactgtagcttctcaccaccaggagtaaagtgggggttcccagagtggaggcagtcgggaggtctagctgggcacaccttagtgaggctgaaactgtcacaccttcccctcttgctcctgtatgaggaggaacagaaagccatgtctaacagaaagcttaactgctggggtccagtgatcacatcctgcaccatgagctctgagggaggacaccccctaccaaggtgggaggacagtgaaggtcacaccttagggttttaatttgcctctggggaaaaagagccataggccagaggaacttgcctaagacacacgccaggaaggacaaaggtgaaaggggccattctgtgcagctggtcctctccaaggcagggtcctgagtacactgggcccccaattcacccagcagagtcattggctaaattcaaacctggccacatctcacacctcaccaaacattccagcagcccgtcgtcctccaggacaatttccaagctccccgctctggcacatacagtctttagtatcagggtcctgtctatgtctccagcctaaccgcctatgttggtattttactaagccacaccctatctctatgtttttgctcatgctgagcccccgagtgaatgtctgcccataccctcttgtttcaggggtagctcttaccaagcgttttagtctgcttgggctgccatagctaagtatcacatactgggggcttacaccacaggatttattttctcatagttctgaaggtgggaggtccaagatcagggtgtcagcagggtttcccctgagcagatgctgtcttctccctgtgtcttcacgtggtcttccctctgtggatgcctatgtcctaatcttataagaacaccagtgatattaaattagttctcaccttaatgatcttattttaacacaattacctctttaaagaccctgtcttcaaatacagtcctatgctgaggtattgggggttagggctttaacactggaattttttcaggggacataattcagcctgtaataggaagtccagggtagggggactaattgatctgctttgaagggtcctaactacaaggggcagctgacctcagcactgtccctgcagccccgggctgggtccagacccccgtctgggcctccctctgtgtctccaccatacccttcaactcactggttcctctgagattctctgctgatgcagtaagaactctggagtgtaggggccacttcccactcacctttctaccccaacacctagcatatattaggtgctcatatgtgcaaagaaactaacacatgttccctgggtggtttctggtccttcttgtcttcatgccccttgctggaatgcctctcacccttcccactttaactcaaaggttttttatatcagacccatgataaaggcccagatgtaatgcagaaaaccattccagattcttccaccgaggtttgactggactggtgtctcttcctctgtgcacagagctctccccatccattgtcctctgccttgggtttggttatatgatgtaggttttgctatgaacacctctcatcctttccaaagatgggagagcaggaaccacctccaacccatcactaggatgaccacacccgctgggttttagccacggcagctcacaaagcccttcttggaatgctctcgtcctctcaagaacaaaggtggaaatcaaggcggaggaggaagtgaagcccagataagactcacagcctgggtgggtcacacagcatcataggtctgtgggtggagcttcaggttgcaaatctgccccaggctgccggacttgccccaggacgtggagcctgctgatgtctgccccaacctgtcttactcctgtcctacattttgcatcattgaaacccctcactagcctggggcttgctagggatgggagtctccaacttctctgtgctgatatagtggctggggcacagtccccatgagacacgtctccagaatttcctaactgattgtgatcaccagctctgtgcccatctgtgatgtgaaggcggttgcactcattttaggaacatgagaactgaaggctctctgtctgtaactggagactgccccggacaggtctaaatttaagttctgtgcatgcatcattttaataatagctaacatttatcctgtgccaggcaagagggctctccatgtattccaataaatatctcacaacccaatgaggcctgctctcttgttgcattatagacagggaaactgaggcatgggagattagattatgtcctcggaccagccctctcactaacaccagtaatacgcttgatgtttctgctccattctagaccagaacttaaatggaaaaccccaagcgaagagtttgcaaatgcacacgcctacattatggagcttcctaagctagcctggtgcaggtgaactgcatatctgctgggaactcacgcagatgcaatgctgaccatgcagctccatggccactctggcctctctgtagcctgtttctctaactgtttcactgcagctgtggggaccatggggtttagcaaggaattaacctaattgtatcctgtgagtcatggacatcgctcagctaataataacaacagctaacccctgtacaagcacaagacctcacaaatcacagagctcctttacccaggagagcccagttgatccttcttgttgcctgtccagggaagtgggtagttgtgatgtttcttgttttctaggtaatccaagggcaagacaaagggacagaaggtggtggtttcttggctgtgtgcctggaaacctgaggagcctcagcatgaggtggatcccatggaatctgagcactgagctgtctttatttggggtttcagagagaacacagatgggacagatgctgcccccgcattatgggttattgcaaaagggacagaacaggattcttgcaaaagtctccacaaagacagagcgaggaaaatgacaacacgcagcacagaaaggaggcagcacctgcaagtgattggggccttcagggatcatcttacgctggggtttgaaagtaattatccccagtttattattcagaacagcagcgtttatagctgagcaagtcagaagagagcaaatccaagccccaatggatgggtcaccccttctgatctttggccttctcaaccgcaccgatgtccagggtctgagctgtaaattacggtggtggcgacctctggattgggcagctgcacctgggagaaagacatccatgctaaaaggcaggatgcaatcttcagggctgcgagaccccaaaagaagagttcagtgtctgaatttttagggcatggaagaaacagaggagactccgtgggttaggtaaaagccctttgctctgtcacccagatgcaggggcagggctgggcatggaatcaggaggccttccttccactctggtgctgcaaaggactgggctggacactcctgggtatggggtcaacttagccttgagcttctgagcttggcctctgcagtgcaacttgtccttcatctttctctccagctcagccctgtgaccacctgcatagccagagtggaaggaggcgttactttccctttctgaaaaatgtcaggcttcactggtttgttttcttttctcccctttctctttctctgtttcttcatttagaacagatctgcatcaggcaattaactggtactcaacaaattgttgatacatgtactgcaatagtctcctcttatcccaggggcacgcgttcaaagaccccagtggatgcttgaaactgcagatagtgtggaactggatggacactgtgtttaagctccctgggcttctttcataagaacaccaacccctttctccagggctccacccgcatggcgtgctcactcctcatgggccccttttgccctttgccacgcgaggcctcctagacagcattgtctgtgaggaacacgtcctcgccaggcaccaaacatgctggcatcttcatcttgggcttctcaacctccagaactgtgagaaataaatgtccgttgcctataaattacccggtttaagatatctgtgataacagccttgaattgactgagacagcgtcgcttggctctgtggtgtcgtagtgccactcagattctcactcttcagggacaccagcatgtgcctccagggctgtctggtttcctgctttctgaacaaaagtttatttttctgagtggtatcacctctggacagagaagatagggggtagccatcatctttcagggaccctcagcagaaatagagttactatgattctttacatacataaagtgcttgcagagcactttccacccattatcacacccacttctccaacacttctttaggtccgggattatggaatgtcagaagcagcgaattaattccccagggacagttggaaagtgggactaatacaggatctgtgccaccactttttgtccagaaccatatatttttgcatccttcctcttcaaatttatttcaagagtaattttcctccatggttgatattagcattgggctgtgtcattttcccaccaattaccccctccccatttaccttttcttcaatgatctagttactttttgccttaattacttacctgttcctcctggacctagttatagtttctccctaacttttggaaaatatgaagtaaaagaacagacattagtagaggactgatcaatgctcaaagccaggtgcacctgggacggggagaagctcagtggagtcatcatgcatccctcagtagccactgctttctgggtggacgttttggggggtccctggctggctgtgtatgatggatctgcatagcttgtgagcacactttcagttgcactcccagatagtggttggctgttaccatcctggctcctaggtgctcccgagatttctgcaaaactctaagcaggcacatcagcctgagaacgtgaccgccaaagactgccctggtcccctctctgcctgaatagtccctttggcttttccctcggtagcatcccggaaggtcacttcaccccatcccccagtgcctagggctactgtgggtgcaacaataagattgagaaggagcacaggcttctgaatccaaacctctcgggatcttgggaccagcttccccatgtgcctgctgacacattgggtaaaccaattcctgtaaaactggaataatcataatacttacattgaaaaagagttgtgagaattaaaaaacatatatctacaaagaactgtgttgtgcacaaagttatcactaatgttaatgatataagactcaagaaatgttttcccctccaaatgttcaaaccttggatcattggggatgcctgccatgatccctgagaaaagaacagtaatgaaagaattccaagcagctgtttgctttgaggaaatgtattgaagagaaaataagacattgttcccatttttatgaacagttttgtgaataacatgggcaatccctccaaaccagtcccttctacatcctctaaaactaaccagattttattatttaaatatgtatggatatttaccgtatttgctggaatgttcatttgagaaaacaaatatgtgagatccaaggctgtgtgtttataaagcatttcccacataattttaaaagaattcaacacagtttatagccacattttaattccaattaacgatacagtgaggctggatttttacatggcatgagcatttaaaaaatacatgtggttctcatatgattaatacaggtgtgcaatcacagctaacattttcttgaaagacagcaaactaggtctactttacctgctgcctttcataagctgtgtgacttcaggtaaggcttactgttctgaagttcaatttcatcactgtaaaactaagagcccctgaaagagtgctgtcatgccagttatttctctaaaatattatgttaagaatgaaattcactagttcaaattattgcaaaaatttcaaattgctgtattcactctcttctcttgagaaatgctgttcttcatttctgcaatatatacacacatatgtgtgtgtatgcaggtggagcattccaaaactaaaatttttaaatccgaaatgtttcaaaatctgaaactttttgagtgcttacatgacactcaaaggaaatgctcattagagcatttcaaatttcagactttctgatttgagatgtttgaccactatagtacaactattccaaaatctgaaaaaatctgaaatctgaaacacttctggttccaagtatttcaaataagggatactcaacttatatcaatatctgtatctatctatatctatatgccatggtttgaatatgtccctaaaatttcatgtgttgaaaacttaattgccattgcaacagtattaagaggtggggtctttaaaaggtgattaggacctgatggctctgccctcatgaatgaattaatgctattatcataagagtgggctagttgtggcaggagtgggcttttgataaaaggatgagtttggcccagattttttcccttgtgtgtgctctctagtcatgtgaccccttccaccatgggatgacacaacatgaaggccctcatcagatgtggccccttgatcttggacttcctagccttcagaactatgaaccagataaacttttattatttatgaattaactactttgtagtattctgttatagcagtagaaaatggaccaagaaaatatatatgaatatacaaatataattggaaagacattgatcaagagcataattccagggtactctggtgtacatatctatgggttttccatcaaaagatatgattctcaattactggtaatgtgacattaagcaaatgacttagcctctctgagcctgtaatccaagtgctttatcttcatctttctctgtatctgtgtcctagtttacacttccttattttccaaggccagagcacaaagattgttcatttcctcctttgcacacctggataaggccagcacaacttgttttctgtggagaattttactttccttttttgtcaaatgcttttgcatttttgcatcaattgataggatcatgtggcttttcttatttagcctgctgatatatatggtggattacactgattgactttcaaatgttgaactagccttgcacaattaaaataaatcccacttagtcatggcttataattctttttatacattacagaattcactttgtgaatattttgtttatgatttttgcatcaaagttcatgagatgtattggtctgtagatttttattattattattattttggtactgtctttggttttgtatcaatacaataccagctttacaaaatgaattaggatgtgctccctcctctgaactaattgtgaaaaaatgatgttaatttgtctttaaatgtagggtagaattctcctgggaatctggctggttctggacatttctgggagcttttttttttttcaagacagagtctcgctttgtcctccaggatggagtgcagtgatgtgatcttggctcactgcaaacctctgcctgctgggttcaagcaattatcctgcctcagcctcccaagcagctgggattacaggtgcccaccaccacatctggctaatttttgtatttttagtaaagacggagtttcaccatgctggccaggctggtctcgaactcctgatcttgtgatctgcccgccttggcctcccaaagtgcccagattacaagtgtgagccacagcgcccagcctctgggagcttttaaattacaaattccactccttttatggttataggacaattgaggttgtctatttcatccttactgaatttttctagttgatgatctttgaggaataggtttagttttccaagttaaagaactcataagtattaagttgttcatagcattttcttattatcttttttaatgactgcagaatctgtatttatatcccctatttcattcctgatattatttgtgtgttttttctctctctgttttttaaattttttattttgtcagcctttgtattagtccattttcatactgctatgaagaaatacctgagactgggtaatttattaaaaaacaaaaagaagaaaagaggtttaatggactcacagttccacagggctgggaggcctcacaatcatggcagaaggtaaaggagaaacaaaggtacatcttacatggcagcaggcaagagagcatgtgcaggggagctacactttatacaaccatcagagctcgtgagacttattcactaagcacaggaaaaacccacccccatgattcaattgcctcccaccaggtctctgccatgacacgtggggactatgggagctacagtttaagatacgatttgggtggggacacagccaaaccatatcagccttgctagaggtctaattgtattaatattttttttttgaagaaccagctttttgcttcattgatttttttctattccttttctatttacaattttgtgaatttctgctgtttattattttcttctttctgcttgctttgggtttactttgttctttttttctcccagtttcttgacgtaggatcttaaagtattaatttgagattactctgattttctaaactaataaattagggctataaatcccccctcagcactacattaactgcatttcatgtattttgatgtgttgtattttcatttgttttttatttcttttaagacttcttcatcatcttatgggttatttacaattttgttgtttaatttgcaaatggttggagatttttctgttgttctgttattgatatctagtttagttacattatggtcaaagaacatattcagtatgattcttattattttgaatatattgaggcttgttttatgactcagaatatgctctatcttggtgaatgcttcatggatgcttgaaaagaatgtgtattctgttggcattgactagagtgctctataaatgccaggcagttcctgtttgttggtgttcttcagttcttctaattactgagagtggggggtgttgaagtgtgtaactataattgtggatttatctatttcttctttcagttccatcagttttttattcatgttttttaaggctttgttttttggtggatacatatttaggattatcatggcttcctagaggatcaatctttttatcattatgggatctcatttttatctctagttacttttttctttcttttcaggtctactttacctgatattaatgtatctacttctactttataaaaattatgtataatggtatatcttcttccatcctttcactttcaacctacctagatcactcactggctatgaaatctgtgtgtcatttcattttatgtgtcttgcaaacagaatactttttaccatgttttaaaattcactttgtcaatttcttttaattggtgtacttagatcatttacatttaaggtgtacttagatcattggtatacttagatcatttacattattggcacatcaggacttacatctgccattttgttgttttttgttggtttcttctttcttattcctgtatttctcttcttacttttctgtgagttacttgaacaattttttaggatctcatcttggcttatttgtagtaacttccttctttggaattgagagaagctccgatctaaatgttattatgttttactgtgggaaaggctcattacaggaactgcatgtgactcttacaaaaaacacagcacccaggacccaggcttctttggggtagagaacccataaccaagtacaggaccctctccacccttcacatgaggaagctttgacaaaactcagcacccaacagcagtggagcagtagatagcaatgtcaccaggaccaaccatctggctgtgagaaagcacatctcaaatttatcactggaaggaatcctgagagggaagatagaacttcccatggtttgcaggatgggtgctcaaaatttagccctataaacctggagtgggcttcctttgtacctcatgctggggaaaacatacatcaacggaaatgtcaacggtatctcttccttacccagaattatccatctaactgcagccctcctcacagtgacctattgaatccagattatctgccttacttggcagagaagaatggagacaaccttcaccatcctctatgtcccaagtgagatgcaagtatgtggccaaaagtcctgtagcaagcatttcccccaagacgtttagagctttcagacactcaacctcattggtccttgaggtaaagatcaaagtctttatctgtctgttataagtggaaagattaaggaatggatgcttgcccaaggtcacatgctaagccaatagctgaattagtaaactccctccttagatctatgagttaattggacatgctagctaatatctgcaatgctacatatttctgatgcttagtttataatctaactggacttctgccttctcagaaagaagtgtacagtctggttcagggagacctggttcagtcagggctcagttagcataatacataatgatgagggtgacatgtaataataatagctcacctcatcttgaggtttttaggactctcactggatttgatcattcattaattcctacattcattaagtaatctctgtcaaaagccactagagcccagcagtgctcagagtcaggtgctgcagaggggaaggtgtcaggttggtgagagaggcagccaagtaaacaaacaattacagatgcagggacaagtcctatgggaaagggagctacaaggagccaggagacaggaaaaagtgggctgaaggaaacttttcagaagtggctgccctttatttagaaatttggcaggcagccaaggggacaaaaactattctaagcagataatgttctagatagaagggagggacagcaagagcaaagacattgacttagcactaactaatggtacatccatgaaagacaaggaactcagtgtggctggagacctggaaggcaagcgtaggtttatgggaaattagatcaaggagagaatctggggccagattgagggaggccttcaacatctgccacctccacagcagtgcaccatgttgggaagagcatggggattggaatcagatgatctagttttaacagggatgctgccttgtttatgggattccttgctttcccccctcccagccacccaaggtggctaaggcattaggcaaagaatggatttacgaagccgtaaaaataccaactcaatatcttctaatggttggtatatgtgtctggatttaacatcagctgagtggagcttgaagccactttgctctggttataggatctagtgaagcttaagaaactggctggagaccaggcctgtggaataattgtttgccaacatctgctttcaaggtacgtggagctgctgctttcagcagtcagactttccactgctctcttacaagcatcttgggagtgtgttctccaggggcactgctcagtgtcagaaaagtagacacacagatcccaggacaggttaattgtgtccattcacagcaccgcattcacatactcttcctaaacccttccctgcaagagaagctccggggatcgtcgtcagtcaagattgatgtcttttctcttctccttctccttttttttttcctttttatttcctccagagaagatgatttattgagtacagtagccaaagttggaaaacatctaataccttgtctattaaaccagaaccaatggacctaccactccgtttagaaagctgtctacacctaggcctagtaacagctgtgttgacagtcctgggatgaatgaggaaaatgttacagagattgaaaatgtgtgactaagtgacttaattctttgatgctttactctcaaaggaagactgcttggaaaacttggatgtttctagagctaaactgcctagggtgtcatggtttttcccgtttatctaagtacagctgtttgatgaacacacttcacacctaaaaatacacacactgtaccaacacacacacacaccacaaaacacgtgcatgcaatttcatatttccagagagccactgtgagtgctaccattacttgcctcctgctggagaagaggagtgaggtaggtcagcattataacagctcagatcacatagcttggcatatgatatgccaagtgctctgacaactaattctctcagtaacccttccaggaaggcgtggtcctttcactcacaggtgagaaaacaaaggctcagtggagctcaggtaccagctcaaagtcccacagtgactcactgtatgtttgtctggctctcatgcctgtgtgttctctgtgactatggcaaaccagactgtcctccaaagacaacggtgtcaaggaaaaatatagtcttatttccgcagacaggtatagtcacctcctctgagttcattcatttatttaatgaatttacatatgctggtctactacatgccaagcacttctcatttagagaaggttatcacagcctaaaccaaacatactggaaagctactgcagctgcaggttttgtttcatttatgtctcacatattgagaagcagagagtactctacaagccaggtaatcaaaagaataggaaatgagtgatatctgcaggtgtcacttcaatgatttcaacggggacatcactcttggctcttcagcaggtttcttaggttctcatggctattctaacaaatcaccacaaacttggtggcttgaaatgacagaagtttatgctctcacacttctggaggtcagaaggcagaaatgaaggtgtcaggtgagctgcactccctccagtgcctctaggggaggatccttccttgcctcacccagctgctggtggctgtggcaaacctcagcctcctcagccttgtgggaacagaattcccatctccatctcacatagcctcttccccctgtatctgtctctcagttctctcttttcctttgcctttcctttcctttccctttcacttcccctttctttctttctttctttctttctttctttctttctttctttctttctttctttctttctttctttttctctttctttccttccttccttccttctttctttctttctttccttctttttctttctttcttttctttccttccttctttccttctttctttctttctttctttctttctttccttctttttctttctttccttctttttctttctttctttcttggcttctttctttctttctttctttctttctttctttctttctttctttcttttctttctttccttctttttcttcctttctttcttctttcttttcttatggggtctcaatctgttgcccaagttggagtacagtggtaggatcacagctcactgcagcctccacctccagggctcaagcaatcctcctgcctcaaccttctgagtggctgggaccacaggcctgtgccatcacgccctgctaattttatattttttatggaggtagagtctccctatgttgcccaagctggtctcaaactcctgagctcaagcagtgttcccgctttggcttcccaaagtgctgggaggtgtgagccactgtatctggccttttcttgtaaggacacaagtcattgaatttgctaggattaggatacctaatacagtatgacctcgttttaacttaactgattacactggaaagaccctatttccaagtacattctgaagttccaagtggacatgagttttggggggattactcaacccatacagtaggaaagcaacaggaaacacctaccttagcctctcaccaacctctttccttccaccaccactgtcatccaccttgtgccttactacccactgttctcaccctctacctcctatcccaacaaaaatctctgctagaaagtccctagaatcactctcttgccccatgaatcaaagccctcaggtaagtcctctttcttcagactgaatacccaagacaattgatccagtgctctgagaccgttcctcagctgggcgagaaagtaagcaggtgggcaagcctgagcagccagaccttcctgggactgatgttcagctacaccaccaagtaacccgatattgggaaagtcatttaagttcttcaaaccagaggttcctcatccatggaatgggttatgtgtaagttatagggttattgagaggattaagttaggcaataatttaatgttattaaatggtagctattagtagtagtaaactggaagaagtacaagaatttggggctacaccagggaaaggtatgacctggatgaaaagaagtggttgctgcagaaaattgtagggtcttctaccaactggacctaggagacccagtttgcctggaacaacagcttgagaaatagacctgaagaactctgaatgcttagcagcaccttccctgttcatgagtacaacttctccggcacttggcatggctttgcttccaactatctatgaactcttctctcactacccgcctcctttcctggagtaagtaaaacagtaagtaagaacagtaaaattaaatgactagcttaaggacaaggaaagcagataagagtcattataaagttataacagtaaaaacaatctggttgattcagtaaaagataagtaggtaagataacaagactgttagggtttgaatgtttgtcccctccaaaactcatgttgaaacttcatccccgatgtggcagtattgaaaggtgggaccttcaagaggtgacagggtcatgagggtgcccccataattggattaatcctttcatggattagtggattaatggattaataggttatcaggggaatggagctatggtggctttctaaaaagaggaagagagccctaagctagtgggctcagtcctggaatgtattagagcaagagtgaaccctaatgtaaactgtggactctggtgataatggcatgtaatgtaggctcatcagtggtaacagatgcaccactgtggtgggggatgttgataatgggggccggggggctgtgcctgtgtgaagcagaggatatatgaggaaatctctgtacctttctctcaattttgctgtgaacctaaaactgctctcagaaaatgaagtctaaaaaattccctgttatgtgtatgtaaatgctttattatgtattaactaatatgaatgatgcacctcatgactcataaaggcaccagggtttgaaggaggcaggattcttccttgaatatctgccttggggtatgatggaaattagtctagtaactgaaagcagtcttaataaagtggatttaaaccatggcaaaggtgccacgatggtgagggcagaggcaaactgaggtctgggcacatgatgggctatgctagaaggtgggcaggcagccctgtgacccctgctcttgattcagcaagagtggccctgcttttctctgcttggaagccccccagtgcttctgttggataaggctcaggggctgagtttctaggataatctatatccactcatgacaaagtttagcctctgaatctgaacaatttattctccatcatctgagtgaaactgaaagctagcatgaccacagaacctcttattgaaaatgtatttgattttagggttaccagcatcaaggtaacctgttcagggcctaggactccatatctcacttgtggtgacagaagggaagcatgccatccacaagagaaggtccacccagggacaactgtgtgatcctaatggtaacaacatccacactcctatggtggtagagtttaagtagactctaacattgtataaacgggagccctgctcacccacatgatgaactcacctgccatacatatggcatccagtcatcacattgaaatctgatttcttcccttccctcaggcaaccagaatcaaatccccttaggaaagggagcagaaatttcagcctttacacagggtagagtttagtgacactgacaaatactttatttttaatgacatcgatggaataacattccagaatattttcatctccccccacccaacaaaaagtaactatatgcattaacagtcactttccattaccaccccaaataccaccaccccttgcaaccagtgatctattttctgtctctacggatttctctattctggacgtcttatgtaaaatgaaccatatatatatatatatatatatatatatatatatatatatatgcccttttgtgtctggctttgtcacttctttcacatgtttttaagattcatctgtgctatagcacacatcagtacttcattcctttttattgccaagtaatattcaattgtatggatatataacattttgtttatccatttatcagttgatggaacacttaggttgtttccatttttgggtattatgaacaattctgctataaacattcatgtacaagtttttatgtggacatatttttaagttatcttgattacacatccagtggaattgctggatcatatggtaatcctactttaacttaatgagaaactgccaaattgttttccaaaatagctacaccattttacattcccaccaacagtgcatgaggatttcagtttctccacatccttgccaacacttgttcttatctctccttcttattatagttgtccttgtaggcataaagtggttttgatttgcacttacctaatgaagttgaagatcttctcgcgtgcttattggccatttgtttatctttggagtgacggctatttaaatccttcatctattttttaaatcaggttatttgtctggatactagactcttatcaaatatattatatacaaatgttttctcccatgtgagttgtcttttcattttcttgataatatcttgtgatacacgtttttaattttgatgaagttcaacttgtctgattgtgtgtgtgtgtgtgtgtttggtgtcatatcttaaaatgcaaggtcatgaagatataccctatttttttctatgagaattttatagtcttagttatttcatttaagtctttgatccattttgagctaattttttatatggtgtatgagacagaggtccaacttcattcttttgcatgtggatatccagttgtctcagcaccatttgttgagaagattttgtggttctcatttaatgatcttgacactctcataaaaaatcaattggtcataaatgtgagggtttatctatagattctcagttctagcccattgatctctttgactgtccttacccaagtatcacactgttgcaattgtcatagctttgtagtaagttttaaattaagaagtgtgagtcctccacattttgttcttttgcaagactgttttaactatttaggatctccttgcaattctatgtaaatatgagaaccagtgtgtctatttctgcaaaagaggaggttgggaatttgataggagctgcatttgagctgtagattaatgtaggaagtattgccgttttaacaatgttaacttattttatccatgaatgtgggatgtgcttccacctatttagttttttattttttatttttgagaaggagtcttgctctggcaccaaggctagagtgcaatgtcgtgatctcagctcactgcaaccttcacctcccgggttcaagcgattctcctgccttagcctcccaagtaactgggattacaggcacgtgtcaccacacccagctggtatttttagtagagacggggtttcaccgtgttgatgaggctggtctcaaactcctgacctcaggtggtctacctgccttggcctcccaaagtgctggaattactggtatgaaccaacatgcccggcccttacttaggttttattaaatgtatttcaatgatatcttgcagtttttggtgtaaaagtccgctacttcttttgttaaatttattcctaagtatgctattctttttgatgatgatgtaaatggaattgtttagtttcactttcaggttgttcattgttagtatacagaaataacacaatagacctctttatctgtgggggatactttccaagacccccagtgcacccctgaaaccacagatagtactgaagcctatgttttttcctttccatacatacctataattttgatttataaattaggcatagtaagagattagcataattaacataataaaatagaacaattataacaatatacagtaataaaagttatgtgaatgtagtctctctgtctctcaaaatatcttgttggattgtactcacttattttctgcctgcagttgaccttggataactgaaaccacagaaagcaaaactgtggataaggaagggctactatcataaatgtgagtagattgattttgtatccagaaacatttctgaactcatttgtaatagttttaatgctttcttactggactcctttggagtttttaaatacaagatcatggcatctgcaattgtagttcgaattctcccttccgatttggctcccttttgtttctttttcttgtctaattgccaccctgctagaatctcccgtacaatgtcaaatagaagtgacaagtacagacatcctggtattgttcctgatcttagagggaaagcatccattatttcaccagtaagatggtaccatgggttttctgtaagtgacatttattaagttgcatgattgactttttatgtgattctcactaccagtcagtttcatttgccagctctcacatacctcaagagctgtttgaagctatattggcatcttcaaagttgcagaggccaatttctccccatgatctctgtataatatatttaaacctaaatagtgatatcttagcatgtaatagactaacagacaagtatgttctctttgttacatcctggtatatctgaaatagtttaggctagatatcagaaaacctaccactttctttgtttgacaaaagcattttgcctgccttctctttaatttccccctctataacatggggggaaattacatctacttttactttctaactaaataggtgaatatcaaataagaaaaatggatgtgaaaattggcaactcgtagagtgctatgcatatcagagaatggatcatgttgatgaagatgcatcgggtagaaaatacagagatccattttgctttctgcagccaaatgggcgcagttgtactccagatctctgactttcacattctgggtgcaaaaaaagtgaatgggatcaatttctccatgaactgaaacaggactttgggcaagaaaatggatgcctagaatgggcaatgtgctctgggacagaagattgtataatacaatataagacaataatacaatagcaggagaagatggaggagagggacccacaggtctacatcccttctcaagtgcaaggagaaaagcaatattcctcacagcctcaagaagcctgtggccccgcgagcagggctaggcacagcaacttccactgctgcatgcagttaagccacatattgaaaatggaaacactttttctttgccacagagcaacacagggtgcctggctcagggcataaagaaagaggtgaggaaagtcaacagctagtccctcccagccagggtcacccgttgctgctcagcctggcaaggctgaagttcaccagaggctttattaaacacagtctttactagaataaaactctttcttcagagtgattatccatgatgacacccaaatgtaacattttctactcagtgatttgatgatgacatgataaactcgagttataactagaaaactattttaaagagaaaatctggaagttgctggggcacatcactgcaattacgatgctcacagctgcctcgtttaaaaaaaaaaatggagcccgagggcttccaaagatgataaccaaaagtaaagtaaccataggtcttggcacaaaacagccaaaagcttcagaaaatagagaaacagctcgcttttccttgcggccacaccaggctgcaccaggactgggccagcagtgtgccttgtgtcagaattagggatgagggcaccggtgggatgtatgatgggtcttggatgatattctcaccctgggcctagtcaaatacagcccgaaggaaaacactgctgtgtgtctgtgagtgtgcagcggagcagctccccaaatgtattctgttgacctctgcaactgacttggtggagcaatctcgctatagagtagatgtcgttgtttagcaaaataccttgaaatgttaaacatgaggcttctgaggtgatgtttggaaagagaaaagcgaagctataactaaaacacattgagaaataaaaagaaacgtgggtttggggaggccaaagatgagcatagaggtgtttgagagcaggggaggaggggagagctactcggcccacttagaaatgtgttcagtttgaaattcccagaggcatagcgtagctgactcctttgaaacggtagcccgtagagattcaagtttacttcctgactgcatgctgcaggcatttcaccgcctcccagcctcccaaacctttgagcagctagacctctacttcctttcgaggtggcgatcaaaaggtgggggactgtcgaggaaggggaggtctctacctccaccttgtaagggccatggttccgagaagcagggtccaaagaccaggttagaggtcctgaaggggaccgtgctcaccagcagcaaagtgagttgtgctggcacacagggaccagggctggtgggaggggctgagggtggtgggaggggctgagggtggtgggaggggctgagggtggtgggagggcccagggctggtgggaggggcagaggatcctgggaggagccaggggtagtgggaggagctagggttggtgggagggtctggggctggtgggaggggacaaggatggtgggcagagccacgggtggtgggaggggctgaggctggtggaggagacggggctggtaggaagggccgaggatggtgggaagggccaggggtggtgggaagggccgaggatggtgggaggattcatggctagtgggagggaccaaggcttgtgggaggagtcaggggtggtgggaaagacccagtgtctagggactggccaagagtggttgcttttgtttgtttttcctaaagagtagtttagaccagtcatgtttcaacactggaggaaagtgatggggaggaagtggatgggacggggaagacctacacaagtgtcttccattccttggtgtcattatagcaatgaagaggaaaaaagtgattcaaagtaagagtgggaagctgggaaaattagtagtgctggttgttcgtagctgaaggactcctggcagtgtttgatattgctgtaacttccaaggcagcaaaaattgaatgggaaccctactctgccacctgtgagctaggtgctatctctttacctgagaaatggagataagaataatgatcttgctggtaatcacaccactctttcactcctaagaggaagaagttgccttcctgcttcagcatggccactagacatgaagagatccgagggtctgaccagtgaggctcctgcctgagggagccccaggggtctctgcagttctttcttcctaaactgctgccctccccaaaggccaccagtgcctctgtcagcccacagctgccagagagccccttctcggctaggtacgtgcagaccaggatgtccagaaggcatccgtgctggactacagcaccaacggagggcaacatgtttggaaacataggaagctgatggtggagtagatacaggagccccatgcttgtaagaaaaagaacagagaagaaagattatatcctgaaaagagtgaaaggtggttctgggttataacctggactctcaccattccctgattttagggtgccaggattgagcaaaaccatccttgcactagaatgtaggaattgcactctcttttttttcttttttcttttctttctttttttttttttgagatggagtctcgctgtgtctccaggctagagtgcagtggagcgatctcggctcactgcaacctccacctcccggattcaagcaattctcctgcctcagcctcccaagtagctgggactataggcactctctaaatcagagtgcaaaaggaccacatgtctgggctgggcaagtcctcatggcaaaacccattagtgtttggaacccctacactttctagaacccaactctcctatctcttcttccctccttccactccaggcatcctgaggctggctcgggtttcctaaggggtcacaagctgaaacgcagctccctggggtgcccttcctgcctgcaagcctcagagtggcccttcgagactcgtctccaaagtcgcctcctctgtgtagcttctgggtctcctcccaacttttggaaatttcctcttctggctcccacaagccttatttcatgctattcactcctcctgctttatttttttttctgttctgcctccagactatgagctctttgagggtagtcactggctggaggcatctgggcatggaaacattttgttgaatgagtgactcttggttcttgctgttcattggctgttagcgttgcctgtatcctgtgccaggcactttgctgagtactttatgtgcatgttctcatttcagcctcataacaaatctatacatgtcctagtattactccccacttaaaaccaagaaacttgagtcctagagaaattaagtgattggcctcaagtcaaacagcaagtggctgggacatgactctgaccagattaatctatctttcccccagagttgttttaatgttgggaaaaaatctgaaatggttttaagcagactatgagatcgtgaggctatttgtctgagtttattcactgggtgactttgaacctgagcctccgtttcttctatctataaaatggggatagtaattctgcaccatgaagcttttatatggaataaataagctaaagtaagtagatccttaaatccctgcttagggctgcaactagggtacagccaggcagacaccaccctcccagggcccagcatttaagaggcacacattctcaggagctgaccttgcacccctactaccctaagcaggagcacttccttaagtgacatccctttcttggtcctggagctgctcctggcattggtaggtgaggaaattcattctttaccctgtcttccttacttctccctaatcaagctgagttgtctttctgtatgagtagttatttccacaaatcacctttctttccttgtagtgacacacacaccagcattattattgtttcaatcaggaagccaccctcccatgccagaactatctgcatgcagtttccacacagtaggcagcttttactggggctctagtcatctagttttccacagtaacccaaagggtgccctagtgtaaatgcagcctcaagcagagtctctccaggagagacatgtgccctcccacttctggaacatttgtcattttctccagacacagcactgggattgttgccaaggctttggcaggactctgtgcagggtcttagacattatacttgtgccctcagccctgtgctaagcaccctcaccccccaccaaggccttgactgttttctaattgttggatggcaagtaactcggcagccacttctgaactgtcagtcagccccagactgctataaaattgcttaatgatatttgggttctttgggagttgttgaagtgtggagctgtaatgaagcagccactggctgcctagtgaaggagagggtcaagaagtgggtcaaccatggaggccaaggacttggctcccagactgggggaggtggctcagagctccgcctccaggttcaagggattctcctgcctcaacctcctgagtagctgggattacagggatgcaccatcatgcccagctactttttgtatttttagtagagacaggatttcaccatgttggtcaggctggtctcgaactcctgacctcaggtaatccgcctgccttggcctcccaaagtgctgggattgcaggcatgagccaccgcgcccggactggatcccatattggacactgggctgcagagttctagattccgtatgtctcctcaggtagaatctccacactgcagcctctggccagaggatgtaaaagatccagacagacctggctttctggctgctgcataacagcatgttcatttgaacgagtggcttgagcatgccagacctgggtctttctcatctgtaaatagagtagtacatctatctcagagatatgttataagaactcagcaaattgctgaagcccaagtcacagatgcataatgagtgagtgtcaattactattctcattagtagcagtagtactcttacaaaagtcagttacaaatctcagagaccataggtctatattgtaagtgatgacttgcggatgttgtagaagagttgggagtgatgtttgggatcatcccatcccagccattcactaaactaggaagctgaggccagaaagcaggacagagcagactccccatacccaacctcctgctccccagcactcctccacctcaaggacacatctaggcctcagccatcactgcagtatagtttccagtgcaatgaaaatgctacatcttctctctccttaaaaatatatagtagtaaataatatgtcttatatatttaaaatactcattatctcctataggatccttgtcctacataccatacacatcacacacatattcaggcacagcctgaggaggtgggtgttcagctgtattaaaaacaaaagttgtaagaaagaataatagtgtgaaatcagtgcaggactatttatgattaatatcaggaagcccttgttaagaatgccatgtattcttagactaaaataccctctgcagggacatggggaaaccccatgacttgagacacttctgctgggacaaggcatggctaagcacaagagaggaacaaagcacccgccgcctcaggggaccatcagagacaaagcttgagtcccaggctcctttctgagtcaggagtgcatagagtggttgtttgagaactgagtgtgcctctgtgtgcagtcgtgggacctcagtgtccagcctgcccagcagaacaacaggcttagagaccaggagaggcaatgacaggtgttctgtcaaaaccgcccagcagggcagcaagacgctagtgcaattactgggctgcacatcagggaaatgtggtggacttagtgtctctggatttctgtaaggcatgtgacaaggtgacacgaggaagctttttgatcaatttaaagacaataggttaagatcttcatgggctcctcataaaagccttggtagtttgtcaagcaatctttcacaaaggggaaaggggctgtgcagcctctttaccggaatatgaagctggatttcggtattttaacagcactaggacatacgaaggctgcctgtcaaactcactaattagatggatctggaagccattacagatatattggatatttaaaaacatcaccatcccaaatgattaacataaatgagaattatggacgtggtaagccaggatgaactttagtgcagaaactgaagatacacccttagactgaacagcaataatagcagctgtctggcactcgttaggaattaaatgttcgctggatggattcagggatgggattacttagtagaacatatgaaaatgaataaaaattgaacctaaactcagagcgcatgagaagtgtgaagattctggcacatcgactgctgtgacctctgcctgtgtgtctgaaggccagcggttagagtcccgcaggcgacgtcccgtcctgtgcagtgggcagaccctacctgcaggctcaggtgtactcctgggcaccacagtggagaagggactctgtagatggtttgtgtcctaacgtgagtcatctgaatggtgacgctacatcataccacaatgattggagggcccggggaggtttgggcagagcagaagaactggggttaggtggtgctaatgctgtgttgaaatgctttaagtgctgtcatgagaagctaagccctttgcaggcgagacctggagggcagaggtaggacaaatggagtgagcgacaaagggctcaacataaggaagctgtttctaatggtcagcgttgacagcaatgcagtggactgcttgtgagctccccatcacgcaagtgtgcaggcagagaggctgaaccgctgctttctgcgatggcagaaggcgatatcacgtgggcgtgcggtcagcagggcgcgtgctccccctcctgtggtggagcctggaggcagccgcccgccggccgtggccggtccagcagagggcgcgctccgagccgcgcgggcagcgggtgatgcaggcaggggaagcgcgggccaggcaggaagcatacagcgcaggccgcgcaagggcagagacgtcctcacctggccaccgcagccgcgcagaccccgcaggtagccgcggcggagctgagcgaaggacatggcggtgcccacgggtgccggggccgcgccggagtgcactggaccagccggccccgcgcaccctccccttctccatgcagtcccccaggggcgtgcagcatcaccgccccgggttctcaccttcccctccgcctctggggctttcccttgcacctttctggcgggccgctcctggcctgcctgcctctcccacgctgggcctgcgcacacccgctcatcctcgacctaggatggagagatgggcacacaggcaggggcccgagggcctttctcgccctgccctggggaatccgccctcaggaatgggccgcgcggggctccgtgtgcatctgttggtgtgtgatgaagggaagcccaacctgccctggttacgaaaaacatatattttagtgccaaatctctctggtttcctgagtggcttttcaccttcacacgtcatagagcgaacactgctctacagggttttgtggagggagggatggcgctgttagactcaaatgcctacttcccctggggttagcaaattcagtaatcttgggcgatctccccacagtagaaaaaggttaaaaagtggaaaaaagaaaaagaccaccacacttgaccttccagggccaaatctccggtctctcagtcacaccaggcagccaacctttcacagagataccgggacattgcttgggcacacttcagctttatgaaacaaggacattcccctctatcctcctgctaaagtccgccccgcccctcagccccctcacttctgccaccgccatatccccgctagacagcttccgctgacaagccagcctagggccaccctgcttcggaagcgtgtgggccctccaggcttccatctgcggactgcacatcacagggagggagtgttccgcaccaggcagggtgagtccacagtggctgcacctggggccagaggccgaatgggagggtggagtgcttacggtgcgcaccttctcctggtcagggggcggggagccggctgatgctgcccccgcgtccccagccaccttttggctttctgagatggttaattttaggtgtcaacgtgactgcggtgaggatgcccagatggctggtaaaacattatttgtgagtgtgtctgtaagggcgtttctggaagagatgagcatttgaatcagtggactgagtaagaaggtccaccctcaccaatgtaggtggcactggtcaacctgttgggggcccagagagaacaatggggcagaggaaaggtgaattgtctctctcttctggagctaggacatccaccttctcctgccctcagacatcagagctcctggttctgaggcctttggattctgggacttacaccagtccccttcctccctggattttaggcctttggactggcctggacctgcttccagcttgtagatggcgtggcctggaatttctcagcatccataattgagtgagccaattctcacaacagctctcctcatccaactatatctgtatatcctatcgtttctgtttctgtggagaaatctggcttgctctctctccctctctctctctctccctccccccgccacctccttccctccctccccctctttaatataaaaccacgtggattactcttccaaagtcactctgattatttgggccatatgatcttttcagtggataaactgtctgtttatgattgaaagaggccacaattcacaggactttgcttgttacaaactcactttatttcatttttctaggcagccagcagccccagatgagcagcaacacaactcttatttgtacctggctgagcagcacggccgcatatgctttgccattccacttcccaatggcagagccatgtaaactggagcctggaccaggggaggggagatgcagtcagtgagagggatccaggacaggcctccaaagccagctgcctgccagcagggtggggacacccatgaaaatccaaactgcccgcacggcttccatcataacaagctatccctgattgtaacacttgattcttggagggaaaaagagcaaacaaatcacccagctgcaaaactatacttttaaacaaattgtcaagtagacagtttggaagatttctgccaaccattcactggaaaaatgagaagaaagctgatgggccccagattttttttttaatagcagagtgttcttgtatgtgtttgtgttatgaaaatttagccaagctaggtaggttcacagagaaggctgccactctgcttccctgtcccaggttgacacctttactgtcttttcctgtttctaggctttatctaattaccatattgccagctggttgactgaaactattattaacattgaagtgatagcaaccaaatatcagccaggatgctaagcttaaccctgccagttgcttagagatccaaaatgttggcgtgggaattagcttgtgataatgaaaaacacaaagttgatatgtaaccaaagcatcaattgttaatgagctctgagatgtcccatgctcccatggaaaggattggcatattccctttttctgcagtggccaagtgcaagccagaaggttgctcgccgtgcaaggacttaggtccaggagagctactcaccttgaggacgcactgcccactggatgaactatgcatgttgttctggttcagaggcagataaggggacaatgggaaaggctgaaaggacagcagagatagaaacagaagattctgttaacaaccatccatgagggttcaggggctaatggtctttgtgaccactacctagggtggcaatatctagcaatcagtgctttctttttaatattgtttttgcagttgcaagaaatagacactgggtgctttttgactaaactatttcaaaaggtgtagaaatctcggtgccttgctgggcctggagggactgcccctcccaggctggccagtccctagagatggtaaatgacttcagcaagcacagctttccaatgcaaaccaaccactccagagccctcccaaccacctcctccgttgggctctcaccctctgggccacggccacctgccctaatcaccccagggccaggcaccaggcaactcatgacacccctgtgtccagagcccactaaaattattcaaagtagtccattctaagtctacttgtactgccttgctggttccttctcacaaaaaccacattaaaggctcttgctacagttccccccacacttctaaccaacactggagtttccccatgtggtcccccatggcacagcgtggcccccatggcaaggcatgtacctcctctccagatctgtgcatgacagactatctgttcaacagcagtcccctccttatctgttggccttgccacacctaaatgaataaaacctatgttttaaagcaaccatgtaccctgggagtcaggaatgacaagcatgttatttattatttctgtagggatttctctttaaaacgttctttatgaaaagacagcaactgtctctatgctggaaatacagaaaattgatcttgtgtcattttttaaattaaagtaatagacattcatagcaacaaatcaaatacaatattacaaagggtttataatacgaaagagcagcctctcaccagatgccaccccagcccagaaccacaatacagagattttttagtattcctcttagtaattgtcctgaggcctatcccacagttctaaataaaatgctttatctctgttgacctatttatccacatcgcgtcaagcatatagaagatttgcttgcctgacaaccaaacctttcccgcctctgttctttgaaatgtttgagaattagattatttctagcatctctcttgataatattgtaacttcaaataatacactcatccttttctttctatttccatttacttttgagttagcttggatgttggtcccctccaaatctcatgttgagatgtgaacccccagtgttggaggtgggcctctggtaggtgtttgggtcatgagatggatccctcatgaatggtttggtgccctcctgtgggcactcttctagttctcactcagttagttactatgagacctgattgttaaaaatggcttagcacctcctcccctcccttgcttcctttctcgccatgtgacacacctgctccaccttcactttctgccatgattgtaagcttcctgaggccctcatcagaagcaggtgctagcaccacacttcctgtacagcctgtagaacgatgagccaaataagcctcatttcttcataaattacccagccttaggtattccttcatagcaacacaaacggactacgacaacttttgacagactctcaacactccactttgtaaaagaggttattagtttcttagcattgtcttctacttttcttctcccttgccccactctccaattcttctcagcatcccaacttctgtgggctggccttttactagtgccaaacattgtgactcagctcataccctgctgctcaagtttcaagtccagcatcagtgtgtgctattgccaggctagaagatcttcataagggaactaaggtcaatttcactagtgactttctctgctctcttgggcaagtcacccaattccttgaaaccatggctgcctcattcaacttccttcatagctttaaaatgagtgggaacaaaagagcggctgtaaagtaatgcaacttgtaagttccacactgctatccacacggaaggcaggggaactttctgacctgtcctctgagaagcatggtgagtccttgagtgtgatctcttatccccggcattggatggcaccatcactatgggactgattgatgtcctccaggcccagtggttggggaaggaacattttatatggattcctttcacatcaaatcccatcacacaactctcataaatgctcctgctttttgatgtgtgcatttgaatccaagttaattatattttgtgatatttaaaggggcaaagggagcgatttcatccattttcagcctccctggagtaaattgttctaatttactaataatcaaatttaatcctttcttttccttaatattcttggtggttgcatttcagtccctttactggctttacagtaaaatcttgactaccctagaaattttttttatacatgcctcgatttatactgataaaccctagaaaagatcatgcttggcctggatctcttcctatatagaatacttttctaacttttttttcttgtgggaatagctatctcttttttttgtatttattttttgttatttttaaaaattaaattaatttttacatatataatttaccatctttaccattttaagtgtacattcaatggtaataaatgcatttatattctttttattttctttcatgtctccttccctcttccccttcctgcctctggtaaccactaaggtaccctaccttcatgagatttactttttagctcctacatatgagtgggaacatgtgatatttgtctttctgtgcttggtttatatcacttaaatggcctctagttccatccatatcaccccaaatgacagaatttcatttatttttatggctaaataatattccattgggtacgtagaccatattttaagaattcattcatccttgggcacttaggtttgttccaaatcttggtgattgtgaatagtgctgcaataaacttacaagtgaagatatctctttgatagattccctttcttttgagtatatacccagcagtggaattgctggattatatggtagttctatttttagtttttttgaggaatttccatactgttcttctttctggctgtactaatttacatttccaccaacagcacatgagggttcccctttctccatattctctccagcatctgttattgcttacctttttgacatgagccattttaactggggtgagataatatctgattgtggttctgacttgaatttctccaatcattagtgacattagtattttttatatatctgtcgatgatttgcgtgttttgagaaatgtctgatctgatttttgatcagattgtttttgtttttgttttgttttgtttgactttctctactctcctgagaagagtttgctattgagttgtttgagctccttatatattctggttattaatcccttgccaaatggatggcttgcaattatattctcctattctgtgggttgtcccttcactttttttattgtttcctttactgtgtagaaactttttagcttgatgtaatcccatttgtttatttttgcttttgtgcctgtgctttggaggtcttatacaaaaaatctttgccctagatcaatgttctagagcattttccctgtcatctttaagtagtttcatagtctctggtcttagatttaagtctttaattcatattgatttgatttgatttgattgcgtttcattcttctgcacatagttatccagttttctcagcaccatttattgaaaagactgttctttcttcattgtataatcttagtgtctttgtcaaagatgagtttgttgtaaatgtgtagatttatttctgggttctattggtctgtgtatctatttttatgccagtaccatgctgttttggttactagagctttgtactagattttgaagtcagctaatgtgatgcctcagccttgttctggcttaggattgctgtgttagtctgttcttatgctgctgtaaagagcttccctgagactgggtaatctacaaatgaaagaggtttaattgattcacagatccgcatgggtggggaggcctcaggaaacttacaatcatggcaaaaggagaagcaggcatgtcttacatggtggcaggcaaaagagagagagagaggagagagagagagggaggaactgtcaaacacaaaaccatcagatcctatgagaactcgctcactatcatgagaacagcatgggggaaatggcccccatgatccagtcacctcctacgaggtcccaccctcccacacgtggggattatggggattacaatatgagatgagatttggatggggacacagagcgaaaccatatcaattgctttagctattcagggtcttttgggttctatatacattttaggatttttttttgtttctgtgaagaatatcattgatgttttgacagggattacactgaatctgtaaattggtttgggtagtatggtcatttaaataatgttatttcttccaatccatgagcattaaatatctttctatcgtgcatgtgtgtcctcttctatttccttcatcagagttttatggttttccttgtagagatttttcacttcctttgttagattgattcctccttggttagattgattcttaggtattttatattttttgtagctattgtaaacaggattcctttcttgatttctttttcagattgttcactgctggcatatataaatgttaccaagtttgtattaatatattgattttgtatcttgcaatgttgttgaattcatttatcagttttaacagttttttggttgaatttttaggtttttctaagtacaagattatgccttctgtgaacaagactaatttgactccatcttttccaattttgatgccttttatttctttctcttgcctaattgctctgaccaagacctgcagtattatgttgaataatagtggtgaaaatagccatccttgtcttatttcagttcttacaggaaaggccttcaaattttcccccttcagtattatgttagctgtggctttgtcatatatggcctttattagtttgaggtatgttccttgattacccatttttataagggtttttatcataaagggacattgaattttatcaaatgctttttcagcatctgttggaataatcatatggtttttgttcttgattctgtgaatgtgatgtattatgtttgtttgtttgcatatgttgcatgtgtatgtttatttgcattgccccatctttgcatcactgggatgagtcccatttggtcatgatgaatgatctttttaatgtgttgttgaatttggctagctaagattttgttgaggatttttgcatctatattcattagtaatataggcctgaagtttgttgttgttgttgttgtgtccgtgtctagtgttgttatcagagtaatgctggcctcttagaatgagcttggaagtactccctcctcaccatttgttttgaagagtttgagtaagatcggtatttattctttaatgtctggtagaattcggcagtgattcaatctgttcctggggcttttctttgatgggatatctctctttttggctctaatcttcctaacaggggaaattttaacctaggaacatgatgctttctattgctactttgttcaaagcctaacagtttaatgtcagcggtagtaatgatgacaacagcagctgacctgactgagcacccccacatgtgacaagacaccatgctaagggatttacatctcttagctcctcgaaccctgacaactgccttgttttctcatttcacacatgatgaaacgagactcaggagattcaacaacttgaggttaacaatgtgcctaaggtcacatcataattctggtgggatgcagcttcctatctcctgtaagtgggccattttaaggcccacccgggcagagcccctcgactggcataacttaataatactcgatttcagataacttattaaaatcatttcaccacagtagagcaaataactgtggtcaatggtgatggcagtggaaacctttccagcaaccatgagctactctttgcaaatgatcactctggcggataatcccattagttctcttctaccacctcttcagaaatactctcacctcccagcacagaggcacctgggctgtggcttttccagaaatgaagagatggggatgggggcagggaaaataacacttgattatctaaaatatctctatttcttaatttttaatttatttggtgacagtaatacagaaagctggaataatgccaagcagccatgtgtcatacaacgaataacttgtcctgctgtgtgctgtattaaaaggactttttgaatgactacattatggacacattgagtgctctgatccagaagagtccatggtgccttcagacaagagccctgggcacctctgtagcaacgtgtcccctacttctcactgtccccaaaggttttcctgaaatcctgccttagatatcaaggaggccattgtcatggcctccttcagcacagaccttattatttccttattggagctgtcaaaaaatcttgggatggttcttttctcaagaatcatcctttgacacttgctagtctgtcctagagcctaggaacattcccagctttctgctcctttctctccttttgctgtctaggccttgcataccctgtgctggctcctggctcctggccctgcctggtgtgctgagctggcaccatcatcccctggagtcggctcagggccaacaaatttctgacacaaggagattaattaggtccagggaagcgagaagcaggtgctgtgagtcatgtggcgatcagctgtgctttctctatgatagaatgcaaatgatcccacacactcaaattcccagcatcatcatgaccatcatgactgatcagaccatggccacagggattttaactccagtgatgacgggcagtgaggtcagctacatctcaaatcaagaaagacagacaagtcggtaaaccagcttctgtgaatcagaaccattgaccacatctaattccagggagcagagccaaggctgcagcctgagggcatgtctgtcactaaggctggtgagatgctgagtcatttagtttccagcaattaggcatcttctgctcaagcaaaaagtagccagatgactatctggtgaggtaagctgtagtaataatatgaacaatcataattgatttgcattgtgatgcctacatctaaaagtacctccatttatttctttatgttgttgtgcatgtattcattcattcaatggacatctttttgagctcaaaagatgaggaaactactgtgctgggccttaatggcccttgccatcaagaaactcagggtctcttggggaatgatacaaacacaagactcacagcatccagttaaaatgccatgctttctgttataccaggcaccatggaaacaccgtgggaaggctggagaactctgcttctggacgtgttcattcaggcccatccttgtctccacctcacttactctcttcacttctggcagggctgaatgccctcattttacccaacaccaggaatctccaaggaaccccagaaagttgcaggaccctggactcctttcttgtagctaggggtcaggtcaggcacatgcacatcagctgccggggaggaagtggggtgcagggatgcagaccgggctgcaaaatagcctctcaacatcccagcctctctgcaggagagatgctgcccgtggccactccagagttggtggacctcattcatgtctccaggagagataaacgactttaacaaaacccagcaatattagcaaagcctgtggccagaacatttcagtgagtaattttaatgcccaggtgtgtagcatggcacagaaaaacatctttgaggatggattaacaacacattttgccatcccctgagagattttaccctgaacgcacacatctctaagagatggtgtggtccctatcattagattgttatgaagaatgctttaggaagtctctcccaggtgccaaggctcctctgggaaaaggttcaaagggtggtgggccagtcctctgggcacatgcattcctggtgcagaccaccagaattgtgccagtagtagctaagggtgttagcaagtcctggtgcatgccacggtgcaggcccaggcagccagcctgtgctcttcattctgggacagtgctgtcctggactgtcctttatgaccacccccagccttggttctgcagtggggcatggttgtgtgctggtggcaacaaggacacgccctgaccctctgctccctctcttgttctccttttgttttaacattttcctcagattatagaattaccacatgccaactattatgagctgaattgggccttcccacccacaaatccatgtgttaaagccctaacccctagcacctcagaatgtgactgtatttggagataggatctttaaagaagtaaataagttaaatgagatcattagggtgggctctcatcaaatttgactgatgtccttctaagaagatggggacacagacacacacagggggaagaccacgtgaagacacagggcatctgcaagccaaggagagagagaggcctcaggactctgccagcaccttgagctcagtcttccagcctccacaactgtgagagaataaattttcattgtttcagcccccagtctgtggtattttgttatggtagccctagcaaactaatacaccttccacagaaaattgaggagatatacacaaatttagattgtgaaaataatgactatttttctaaatctctctacccagagaaaatttcagttactatttcagtcatttttcttacagtttaaaaatccatattatatagagagacaaattgacagtggtggtagttagagattacattctgtatccaacttgccttctgaattgacattgcatgaatgagtaccgccttatgtcaataggttcgggccataatttaatcattggtaatattgggggtcatgctttattctagacagacagacccacacaccctactttttaattatattatccatactgttctttttccagatttccttatttagtagtcaatatggatagatttctatgttcataaacatggatttgtgtcatatgtaaatttttggataatattttatagaacagggttatgagttttctttaaacctatattgatggtcatttaaaatttttcatttctttttttttttttgttaaaaatgaaagcactgtgaggactgcctgatcgcatagctatgcaccctggaactctttctttagaaccagttctgaggctgcagtgcctacggtggagttgagggagtgtttgcttccaattcctgcctgttgtcctggaggttggctgcgactctatccccaacagcagtttatgggcaagggtgtccataatctttttgcacatttaacattctcaatctaggctggtttggggctataaattatacctcactggggcttttacaaatttattggtcatttgcatttcgttttatttgaattgcctgtttgtattctctttctgcttctaaaagttggtgtgtttgccttttcctaacagttttataagatctttttaggtaatagcaattttaattcttttatatgtatttggcaattcccttcctgctcgctattccccccagttttccttatctcttaattttgtacatggcaggtttttattttatttcagagcacattttaagtttttatgtattaacatctattagtcttttccttatattacttcagattttggttgcctgcttagaaagcactttcacacccagatattcatacaattttcactaaatgttttcttttactgcccttatgattttttttaaatattaaaaatatttagcccatctggaattcattttggtgtgaggtatgaggtaggactgtaacactattttcccctaagatggttagtaggttgtcacaacgcattccccactaatctgtccttttcctggagatttaaagagacacctttacatgtgtatgtgctcttgtgggccccgcacagcggaaggcatcctggcattgtgagagtgcaaaacctgccggggaagcccctcggtgtctctcttctgttatcagcatttgtattgctagttcagtcatttttccagatgacttttagaatgcatgctgttgcgatgttaattgacactttgctatatttatggattactttgcagagaattagaatagtcttgttatctaaatacagcaaacattttatttcttcctttccagtatttgcataattaacatatctctctttcctccttggagttgctagaatatggctgtacggcaatgctgagacatcacgctgagcgagagtggacatcctcattttattcctacccttaccgtggatctctcctgtgcttcaccactcagtataatgctggctgagctcttctgacaaataccttccaagatgtgaggaaaacacacgtaggtgcagttgttgaattgtatgatctgccactgaagtaattagtgtgataattacttggattttctcctttaacaaattattgttataaattatattaatatatgtcatgctaataaattatttccatattcctagg

SEQ ID NO: 77 - DNA, 119246 bp, Homo sapiens
tgctccgcgcgctagctggctgtgtggctcgctggctcgctagggacaagcaggaatcggagcagcactgccgcctctggcgcgaaggctcaggcgcctcctcccgccacagtcactgtggctcggcgcacgctgccggcggctgccctttccgcctctggggaagaaaaacccgcgggccgctttcgtgcttgaaccatggcctcgggccggaggggctgggacagctcccacgaagacgatctgcccgtgtacctggccaggccgggcaccacggaccaggtcccgcggcagaaatacggcggcatgttctgcaacgtggagggcgccttcgagagcaagacgctggatttcgatgccctcagcgtggggcagcggggcgcgaagactcctcggagcggccagggcagcgaccgaggatcggggagtcggcccgggatcgagggggacaccccgcgcaggggccaaggccgggaagagagcagggagcccgcgcccgcctcccccgcccccgccggggtagagatccggagcgccaccggcaaagaggtgttgcagaacctcggccccaaggacaaggtaagggggccccgggtcacttccctccttgccttcgttcctttctccagccctggccgccatggcccgggcacaactttctccagctcactttgcacggggctgggggacaaggaggaggaaagggtcatcctccactgagcgtagcgcgacttcctagcccagaccctggattcgcgcgtgtcgccacttgcagcatcttcgtgcaagcgcggaagggatgcccgggttcccctgcctggagccgcgtcctttgcccctgcctcctcgccgcactcctgggccatccggtctgggtgggtgtgtcagcccgggaaggcttagtgatttccagctcttctctctagtagccaacagcacaattgtcttgcccccctctggccctagattaaatctcaacccgggtcaccacggcagagggcaaagtgatgctgggaatatgggggtcatctccatagtgcccggatgaaagtactggaggggcggtctcccctctcagtcttcaaacatcagctctgtccctgaaacttttgggtgtggagcctctagactaaacacgcgaatctctctctatgcctcgcttgtgtcttagcacggcatttcacatctgtgtttgtaaagagtgtatttgtgtacatagcttggcacaagactgggtattacaggggtccagctgcctctgcaagaatagcattatattttagaaaatagacgagagtattaagagtgcacattaaactagcatgagatgcaaattccctgctgctcttaaatgtgccaaagccaatttcttctgtatgtgtatttttgagaaacttatgtcacactgaactgactgaagggatggcattgaaatctagcttgccctgatttatgtgtctatttcacagagactcagagatgtagttcagaaaatgcagggcctggcagggctggagacttcagagttcaaactgaagctttcagttggggaataataataatcagatgccctcacccttgtctaggtaatggccgcaaaatccatccgcatgtattattctgcactaatatggttaggaataacaacctgaaatggaaatgtctgcctcagagcaattacagttaatgcttattcaggttttagttgtttttccattaaaatgcaatgagctagtgaaagaacagcatctctgttcactgtttgatttttgaaagtttagacaaaccaaccaaccaacctttgactactaagaccaccagggaaaataagtgctgaagttagtgctgttcaagggtaccacttggaaaacaatgtcggcttcctctgaaatcattcatttagtttgtgattttcacatcatccttttagtgcgtgattcccctaagcccttgcttaccaacgttttagggaaaacttctgatattttgcaaatgttttggttgatatctaaactgaagaagaaccctatagaaaggttattcctttcttcatgtctgacttgtccatattgaaatgttcccttcctgactggaacgggcgggagtagtgatggaaaaggtcggtaacaattgctgtgagtcagtgctattccctttgctgaaacacccctgatgtaagccagataatatgctgggtttgcaagatttaagaatggtaactagagaaagggaaaatattcctcctttaaacctagcaattctcccgttttcctcccttttgcaaaccctatacttttggctactaattgagaaataataatacaacctaggcatcagcaggatttctagtgctacatagtcatttgtaagtttgggcttgccatctgcttcatccaggccatgttattatctctaatttggttgaatcacactgttagaagagaccacggaggttatcaagttctgaacttgttgtttatttccttgagggtagagattgtgtatttggatttatctatgtggctagaatgcttggcacattggaggtgctcaataaatgtttgatacactaaacctccttaattaaaccatctgttttgccacatagctggcaaaatgatcatctggcctctgcttaaatacaaccattgtcagggagctcactacctcatgaagcaactttttggacaactttacttaaaaaaaaaaaaaaattaagcccaaatctacctacctgtagtttctacaaattattcttagttctgacctttggaaatataagggtaaatatatttccttattatgagacattttaatgatttttaggtatgtgcactcttgtatctgtcagaaaaggctgggtgatgccatagtaacaaacaacccccaactctcagcagcttaataaaaaacataacaacatatttcttgctcctatttgtccagtgtgagtcaacagggaagctctattcattattgtgcctaacttgatggaggctccatctctacacatctgtgtatagtatgtggcaaattgtatacacacttaattccttgctgaagtaatgaacatgatgtgtgctcacatttcattggccgaaaaccatgtctatactcagcttcaaagcaactggtggaatacaatcttgccatgatcctgtaagactagaaatatttggcaaatagctctaatatctctcccagatctagagatgaattaatggagtgaaatctgtcccaacctttactagttatatgactgtaagcatgtaacttagcctctgggtacctcagttttctcctgtacaaaataaggataatggtgactactttgcacagtagtattcagtacatattagttattactattactcttcaattttaatgcccgttacatgtatgagggcaattatctcattctccctaaatttctttcttacccttattattcctagcttcttcagtcttctcttgtatgagcattttaccatcctgatttccttttcaggttatattatattacatattttgtaaatatttttctcaaaatacagtgcccagaactgaatatgttgcttcagatgggatatgaccatggcgaagtgcattatgttacttaattttttggacttttacggaacatatgcatctatgacttactattgtctccatggcaaacaccctgccattcaagctttcagaaacttttttcacgtaagctgctgttaggccaggatgttccccttctatgctggtacaatttaatttaaaacaaaccacccccaaaaaaatcttaactataggattttattttttcttccttctataatatttatcactatcttagctcatctttctattatatcataataatcttaaaccttaattctataatacagcactcctactgccagctttgtaccatttgttgatttgatagtatcaccttttgaacactttctgtgtgcctatactaaatagtgctcaaaaggtcgtttcctcacagaaaatggttataaccgataaggaaattgaaccccagagactaattgtttagtcccaaatcacataaataataagtggggggagccagaattcacaatctgatttttctgattccagagtctgtgttctttccaggtggggaggctgcttccttattttaatatgaccagcctggccgtcgtgtcagctcctgacatgtcaatattattcagagcaaggacagattttcctgccacacctctagaacccttcttctattgtgccaccagcccattacacaggaaactttgagaccagttgttcaaccttggagaacagttgctgcaaaatccttattctttcaagttgattgcagagctatcaaaagatattttaagtgtcttggtaaaatcaaaatatgctttgtatctagcatacctaattattaacttctatcttaacaaaatgagtttatttaataaattgtaatgaggttaaataacagaagtgtttacagaataaaaatataaaataataggctgggagtggtggctcacgcctgtaatctcagcactttgagaagccaagctgggcagatcacttgaggtcaggagtttgagaacagcctagccaacatggtgaaacccccgtctctactaaaaatacagagattagctgggcgtggtggtgggcacctgtaatcctagctacttgggaggctgaggcaggagaatcgcttgaacccgggaggtggaggttgcagtgagccaagatcacgccatggcactccagcctgggcaacacagtgagactccgtctcaaaaaaaaaaacgtctctgagtgtcaaattccaggtttgagttatcactagatgctaatatagtggttccaaacctatctataaacaccttcttaaattgtgtatttagagttttctcataataggcattcatgttactaaaatcctcggcattcatgttactaaaatcctctatggttggcttacacaacttttcatttataatttttgatactaagtgcatagaaaagcaattctaagtgaaaagtatttatttttcatcatttctcaagatgcttttccatgcacactgaattttcctagcagtaaaatagttactaagaggaagacaattatgatatggcctgccaagagcaaattatatcataaggactctgtcatccagcaaaaacaaagtaatgacattatgattacaggggtttttattgataactttctatcaggagtcttgggtcatttctagtttccttcttcccatgtgggcctcttttgtgcaagatgtttccttcatgaagttggcaagggctctgggtgcagagggaacaatctagaaacaaatgagatgtggccgttacctttttaccatttgtcatttgtcttgtttttcctgggctaaaagttttcaaagtgactcagagaaattgatgttctcctctttatcctgcacaatgtgagacagctggaaatagaattctaggcttataaaggcctcactagctatcagaatccaaaccctggtgtgtaaatgaattttataagtcttctctgacaaatgaaagtttgtaccaaagctaggaaaaaatgcctcctgcttacctggccttcaggccacacttgaatctgggagtaggtttccttccccaaacttggaagtgtttgtgacctttcagaactttggtttagtttgacagtaggcatttgaggaacataaaaaatacgccttctcaataatgctgcgattggcagagttccctcaaagtaatggtccctggagacagggttttgctgacagctcttgtaagtaatgtttaaggcagccagaacactgtctctgatgatttcagtcagtgactcttacagctgattctcctggtgatttatttccactgggcgttatcctgacaagtaatgtttctatgagacagggagtaaagcttacaaggaagaggaaatctgtctgaggaggatgcaatctgtgactgcaaatggaagaggcagaaggtccatttaggtgtgtgagcacttttaaaattaagcttctaggagtatgtaacattaaaatatgtttgtaacatagaatcacattgcattcaaaagacagttctactccatcaaagaacatattaggcaaaaacaaacagaaaatcaaagtggataaagtattagcagtctcagtttccagacctaacctttaacctgctgtacaacttgggcaagttacctcccttccctttgagctatagtttccttctttctaaaacaaatgggctagaccaaatggtccctatagtaatggtcttcttgtaaactttcttgattgtgcatctttaaacgaaaattttttgggcatgctccatattccttgtgtgtgtatatatgtttacacatatgtgcatatatataaattacatatggaaatatcacattaatatcttatgactggctgggcattgtggctcatgcctgtaatcccagcactttgggagccaaggcagaaggattgcttgagcccaggagtttgagaccagactgggcaacgtagaacacttggtctctaaaaataatttaaaaattaactaagcatggtggtgcacgactgtggtcccagctacccaggaggctgaggtaagaggtttgcttgagcctgaaaagtcgaggttgcagccagccatgactggaagaggcgacagtgagaccctgtctttaaaaagaaaacatcttatgatcatcataaaatgtaaataaaaaatctaaactaaaaaagaagagatacaaaaaatccaaatataaattatggttgttttcctttatcccagtggcttgtcttgtccaacaaattgggtgagtgcttggaagtctatggtccctagactaaatagataatagtcagtggttctaacaacttagtcattaatgagtccattgtcagagtacttcagtgatagatgcccttttattgaacaatttttgagagacagttcaaaactgttgaaggcttgtgatgaggctacagaccaggtgctggttagtgctcagcactctttacaaatatgcatgtggaggtgggccagtagcttgtgaataagaagggagtccccacgtctccctttacctgctgatttttgtctttactcatttttgcaaaaagcattattaaggccgggcacagtggctcacgcttgtaatcccagcactttgggagggcaaggcgggcggatgacgaggtcatgagatcgagatcatcctggctaacacggtgaaacctcgtctctactaaaaatacaaaaaattagctgggcatggtggcaggcgcctgtagtcccagctactcgggaggctgaggcaggagaatggcgggaacccgggaggcggaagttgcagtgagccgagactgcgccactgcactccagcctgggcgacagagcgagactccgtctcaaaaaaaaaaaaaaaaaaaaaaagcattattaagccacagctatgtaggtgcacaatgaaaaacaaatgttggaaaaattaagatgtaccaaagagatcagcagtaagaaaacataaacatcgtttcctcatcatcttctggagaaaactgccattaacctaggagtgtattttcttcccatctgtgtgtatatgtgtgtgtgtgtgtgtgtgtgtgtatctgtgacatgcatttttttcccaaaagtgaggagatgcagtatttctgtgtttaaattattttttatcatttagcgtggtctgaaggtttgtgtacccccaatttcataggttgaaatcctaagccccaaggtaatgatactgatttggtcatgagcgtggtgccctcatgaatggggttggtgcccttatgaaagcggccctagagagctgctttgctctttgcaccaggtgagaacacagctagaaggcagcgtctgagtcagaaagccggcctccaccagacactgaatctgccttatcttgggcatcccagtgtccagaattgtaagaaatacatttattatttataagccacacagattatggtattttgttatagcagcctgagcagactaagatatcacctttttaaaaaaacaaataagctcgtatttttagagcagttttggattcacagtgaagtcaagtggaaagtacagagagtacttcccatatacccctgtctccataaacacacagcctccttcactggcaacactccacacgagagtagtcgattttttacaattgatgaacctacatcgacacatcattggctggatgtggtggctcacgcctgtaatcccagcactttgggaggctaaggtgggtggatcacctcaggtcaggagttcgagaccagcctgtccaacatggcaaaacctcgtctctactaaaaatacaaatattagccaagtgtgatggcaggcacctgtaattccaattacttgggaggtgagagaattgcttgaacctgggaggcagaggttgcagtgagcccagatcgtgacactatactctagcctgggcaacagagcaagactctggtaaaaaaaaaaaaaaaaaaaaaaaaaatcattatcaccacaaatccatagtttacattaggcttcactctggtgttgcacattttatgggcttggacaaacatacaatgacaagtatctaccattgtaatatcttataggaattagttttactgccctaaaaatcttctgtgctctctctgttcatcattctcttctgccctcaactcctggcaaccactgatctttttactgcctccatagttttgtctttttcagagtgtcatatagtgggaatcacacagtatgtagacttttcagattggcttctttcacttggtgacatgcacatacattttccccacgtctctacatggcttgatagctcatttctttttcttgctgaatatttggatgtgcggccgtttatttattcacttacctactgaaggatgtcgtggttgcttccaggatttgttggttatgaataaagctgctataaacattcgtgggcacatacgttttgtatgaacataagtcttcagttcatttaggtaaataccaaggagcactgttgctggatcgcatggtgagagcacatttagttttctaagaaactgccaaattgtcttccaaagtggtgctaccaatctgcattcttagtagcaatgaatgagtattcttgttgctccacatcttcaccagcatttgatgttgtcagtgttctggattttggccattctactaggtgtgtagtggtatctcattgttgttttaatttgcaattttccaatggcatatgatatggaacatcttttcttatgtttagttgccatctgtgtctgttaagctctttggctcattttttaattgagtcatttatttgttttcattgagtttttttttttttttttgagatggagtctcactctgttgcccaggctggagtgtagtggtgccacctcggctcactgcaatctctatctcccaggttcaagtgattctcctgcctcagcctcccgggtagctgggattgcaggtgtgcacaaccacgcccggctaattcttgtatttttagtagatatgcgatttcaccatgttggctaggctggtctcaaactcctaacctcaggtgatccgcccacctcagcctcccaaagtactgggattacaggcgtgagccaccgcacctggccgttatcattgagttttaagagttctgcgtgtattcagataatagttgtttatcagatatgtattttgcaaatattttctcccagtctgtggattgccttctcattcttttgacaatatgttttgcagcacatatgtttttaattttaatatagtccagctcaccaattatttatttcatgaattgtgctattgatgttgtatctaaaaacgtcatcactatacccaaggtcatctgtgttattttctaggagttttatagtttgcatcttacatttaggtttatgatccatttggagttattttttgtgaatggcatagatccgtgttatgatttttttttgcacataggtgtccagttgttttaatactatttgttggaaatattatattttctccattgtattacctttgctccttcataaaaatcagttgattacttttatgtaggtctacttatgtgctattttgttccaagcttgtctgttcttttaccaagattgtactgtcttgattgctgtggctttcttgtaagttttaaagttggtactgtcagtcctctgattttgttattttccttcaacattggctattctgggtcttttgcctttccatatgacgtttagaatcagtttgttgatatcaacaaaacaacgtgctagaatcttgattggaactgtgtcgaatctaaagatcaagttgggaggaactgacatctagacagtattgagtcttcctgtccatgagcaaggaatatactccctttatttagttcttctttgacacctttcatcagagttttgtagctttccccatatggatctcacacttttttttagatttatacctaagttgcacatgtttctttagatttctacctcagttgcacagggttttctagatttatacctaagtatttcatttccagggtgctaatgtaaatggttatatgttttaatttcaaatttaacttgttcagtgctagtatataggaaagcaagtgacttttgcatattaactttgtatcctgcaaccttgctataatcacttactagttcctgagggcttttctttgctcaattcttttgtattttctacatagataatcatgtcatctgcaaagaaatacagtttgtttcttctctccacatctgtataacttttatttccttttcctgtctaattgtattagctaggacttccagaataatgttgaaaagcagtggtgcaccatataaaaaaattacctcaagatggattaaagagtgaaatgtaaaaccccaaactctaaaaaccctgggagacaacctaggcaataccatttaggtcataggcacgggcaaaaatttcataatgaagacaccaaaagcaattgcaatgaaagcaaaacttaataaatgggatctaattaaactaaggagcttctgcacagcaaaagaaactattatcagaggaaacagacaatctacagaatggaaaacaaaggtctaatatccagcatctataaggaacttaaacaaatgtacaagaaaaaacaaacaaccccattaaaaagtaggcaaaggacatgtgttcatgtctattacactttcaaaagaagacatacatgcagccaacaatcatatgaaaaaaagctcaacatcactggtcattagagaaatgcaaatcaaaaccacaatgagataccatctcacaccagtcagaatgactatttttaaaaagtcaaaaaataatagacattggtgaggttgtagagaaaaaggaatgcttatacactgttggtgggagtgtaaattagttcagccattgtggaagacggtgtggcaattcctcagagacttaatgacagaaataccatttggcccagcaatctcattactggctatacacccaaaggaatataaataattgtattataaagacacatgcacgtgtatgttcattgcagcactattcccaatagcaatgacatggaatcaacctaaatgcccttcactgatagactggataaagaaaacgtggtacatatacaccatggaatactatgcagccataaaaaaagaatgagatcatgtcctttggagaaatatgggtagagctggaggccattatctttagcaaactaatgcgggaatagaaaatgaaataccacatgttctcacttataagtgggagctaaatgatgagaacatatgggtacatagagggaaacaacacacactggggcctattggagggtggagggtgggaggagggagaggattgggaaaagataactaatgagtactaggcttagtggtgaaataatctgtgcaacaaactcccgtgacacaagtttacctatgtaacagacctgcacttgtacccctgaacttaaattaaaaagaaagaaagaaagagaaagagagagagagagaaagagagagagagagagagaagggaaggaaggatacaaagaaaagttgtggtgaaaaagtgtgtctttgccttgtttctaatcttagtaggaaagctttgagtttctcaccattaaatatgatgttagctgtaggtttttttgagcgtattctttatcaagctgaggaagttccccaatcttcctacttcgctaagtttttttttttttatcatgaatggatattggattttgccaaatgctttttcagtatctattgatatgaccatgtgatttttcttctttagcctgtttggattatattatgtgtaatgtaatgtgatggattctcaaatgttgaagcaaccttgcctagataaactcagccttgctgagataaaccttcatggctatggtgtgtaactttctgtatacatggttgaattcaacttgctaatattttgttgaggatttttgcatctttgttcattagagatactgatctgtagtttgcttttctttttttaattttattattattatactttaagttttagggtacgtgtgcatgacgtgcaggtttattacatatgtatacatgtgccatgctggtatgctgcacccattaactcgtcatttagcattaggtatatctcctaatgctaccccttccccctccccccaccccacaacagtccctggtgtgtgatgttccccttcctgtgtccatgtgttcttattgttcaattcccacctatgagtgagaacatgcagtgtttggttttttgtccttgtgatagtttgctgagaatgatggtttccagcttcatccatgtccctacaaaggacatgaactcatcattttttatggctgcatagtattccgtggtgtatatgtgccacattttcttaattcagtctatcgctgttggacatttaggttggttccaagtctttgctattgtgaatagtgccactataaacatacgtgtgcatgtgtctttatggcagcatgatttatagtcctttgggtatatacccagtaatgggatggctgggtcaaatggtatttctagttctagatccctgaggaattgccacactgacttccacaatggttgaactagtttacagtcccaccaacagtgtaaaagtgttcctatttctccacatcctctccagcacctgttgtttcctgactttttaatgatcgccattctaactggtgtgagatggtatctcattgtggttttgatttgcatttttctgatggccagtgatgatgagcattttttcatgtgttttttggctgcataaatgtcttcttttgagaaatgtctgttcatatccttcacccactttttgatggggttgtttgtttttttcttgtaaatttgtttgagttcattgtagattctggatattagccctttgtcagatgagtaggttgcaaaaattttctcccattttgtaggttgcctgttcactctgatggtagtttcttttgcagtgcagaagctctttagtttaattagatcccatttgtctattttgtcttttgttgccattgcttttggtgttttagacatgaagtccttgcccatgcgtatgtcctgaatggtattgtgtaggttttcttctagggcttttatggttttaggtctaacatgtaagtctttaatccatcttgaattaatttttgtataagatgtaaggaagggatccagtttcagctttctacatatggctagccagttttcccagcaccatttattaaatagggaatcctttccccattgcttgtttttgtcaggtttgtcaaagatcagatagttgtagatatgtggcattatttctgagggctctgttctgttccattggtctatatctctgttttggtaccagtaccatgctattttggttactgtagccttgtagtatagtttgaagtcaggtagcatgatgcctccagctttgttcttttgtcttcggattgacttggcaatgcgggctcttttttggttccatatgaacttgaaagtagttttttccaattctgtgaagaaagtcattgatagcttgatgaggatgccattgaatctataaattaccttgggcagtatggccattttcacaatattgattcttcctacacatgaacatggaatgttcttctatttgtttgtattctcttttatttcattgagcagtggtttgtagttctccttgaagaggcccttcacatcccttgtaagttggattcctaggtattttattctctttgaagcaattgtgaatgggagttcactcatgatttggctctctgtttgtctgttattggtgtataagagtgcttgtgatttttgtacattgattttgtatcctgagactttgctgaagttgcttatcagcttgaggagattttgggctgagacgatggggttttctagatatacaatcatgtcatctgcaaacagggacaatttgacttcctcttttcctaattgaatgccctttatttccttctcctgcctaattgccctggccagaacttccaacactatgttgaataggagtggtgagagagggcatccctgtcttgtgtcagttttcaaagggaatgcttccagtttttgcccattcagtatgatattggctgtgggtttgtcatagatagctctgcttttcttttggtgtctgtgttagattttaatgtgacagtaatgctggtctcagagaaggagctgggaagtatttcttctgcttctatctctgaaagagattgtagagaatcggcataatttactccctaaatatttggtagaattcgccaggaaatccatctgagtctggcattttctgatttggaaggtaattattgatttggtttctttaatagatacaggcttacctattcaaattttcaatttcttcttgtgggagttttggcaaattatgcctttcgaggaactggctcttttcatctagtttatcaaatctatgggtatacagttgtttgtaatattctattattattattattattattattattattttgagatggagtcttgctctgtcacccaggctggagtgcagtggcgcgatctcggctcactgcaagctctgcctcccgggttcatgccattctcctgcctcagcctcctgagtagctgggaatacaggcgcctatcaccatgcccggctaattttttttttttttttttttgtatttttcgtagagacggggtttcaccatgttagccaggatggtctctgtctcctgacctcgtgatctgcccgcctcggcctcccaaagtgctgggattacaggtgtgagccaccgggcccggcctcctttattattcttttgacatccataagctctatagtgatgtccctatttcatttctgatattagtaatttgtatcttttctctttttttctttgttagcctggctagagacatatctattttattgatctttttgaagagccagcttttggttttattgattttctgtactgatcgatactctaatttttgtttttagaaaagaaatgtatttatctatcatttaaaaagaaaagaaatcttttcttctgcttactttaatttgctcttctttttctagttttctaaagtggaagtttagattactgattttagatatttcttcttttttaatacatgtattcaatgtaatagatttccctctaagcactgctttagctacatcttacaagttttaataatttatattttcatttttatttggttgatttttttgtaatttcttcttagacacctccgcctcctgggttcaagcaattcttctgcctcagcctcccgagtagctgggattacaggcgcctgccaccacgccaggataatttttgtatttttagaagagatggggtttcaccatgttggccaggctggtcttgaactcctgagctcaagtgatccacctgcctcagcctcccaaagtgttgggcttacaggcatgagccactgcgcctggccagttatattgtttaatatccacgtatttggggatttttcagcattctctctgttatttatttctagtttaattccattgtggtccaagagcagcttgcatgattttattcttttaaatatgttaagatgtgttttataccccggaatgttacttctcttgttgaacagttcatctgtgcctcagaaaaatgtgtaatctgcttttgttggatgaagtagtctatagatgtccattttaactatgtctttattaatcttattaattttctgtctgctggatctgtccatttttccttctttctttatttctttcttccttcctttctttctttttttttagacagagtctcgctctgtcacccaggctggagtgcagtagcatgatcatggcttgcagctgtgacttcctaggcccaagtgatcttccctcccaccacagcctcctgagtagatgggaccacacgtgtgcaccagcacatccagctaattgttaaattttttgtagagatgctgtctccctatgtttctcaggctggtctcaaactctcaaactcaaatgattcccctgcttccacctcccaaattgctggaattacagacatgaaccaccacgtcctgcccatgatctgtccatttctgatagaaaagcgttaaaatttccaactatcataatggattcatctctttccccttgaagttcttttaggtttttgcctcatgtattttgatcctctgttgtttgacacatacacattgagggttgttatgccttctcagataattgattacccctttatcattatgtaatgtccctctttatttctgataacttcgcttgctccgaggtctattctggatgaaattaatatagttatttgcactttcttttgattagtgttagcatggtatttctttctccattccttttcttttaatatctctgtgcctttgtacttgaagtgggttttttgtagttaatataaagttaagccttgcttcttgatccattctgacaatctctgtcttttaactggtgtatttggatcattgacaagtaaggtgattattgttacagatggattatagatggatatataccgtatttgttgatgtattctatttgttgtccttgtttttgttcctacttttgtcttctataatttttctgttttttgtggttttaactgagaattttatatgattccattttctcttctttcttagcatatcatttatacttctttttctcaactttttaaatggttaacctacagtttgcaacatatatttacaaataatccaagtctactttcaaatagtgctgtattattttatgagtagtgcaagtactttataatgataatattcctaattattttctcctatctcttgtatcatcactttcatttatttcaattatacagaagcagatgtatgtacatcagcatatataacagaatacattgttgctattgttattttgaataaactgttatctgttagatacattaagaataggaaaaacaaagttttcatattacctttacttatttattctctggtggtcttcttttctttatgtagatccaagtttctgacctatatcattttccttttctctgaagaacttcttttgacatttcttggaaggccactctactggaaacaaattccctcaatttctttttgtagaagaatatatcttcttcatttttgaaggatgatctcacaaaattctaggttgatgttttttatttctctgaatatttaaaatatttgtattcactcttttctggtttctgaagacaagttgaatgaaattttcatgtttgctttgctatagggaaggtatttccccccctatggcttcttttagattttcaaaaatatttgattttctgaaatttgaatatatgtctatgtgtaagggttttttttgatgtttatcttgcttgctattctctgagcttcctggatctgtagtttagtgcctgatgttaatctggggaaaattgttagtcattattgcttcaaatattgcttttattcctttctctgtcttttccttttgatattttcattattcattttacacctttggtagttgtcccacagttcttggatattctgttttggtctttttttggtcttttttttttctccctgcatttcagttttggcagtttctattgtcgtatcctcaagctcagacattattttctcagctctgtctaatctactaatgagcctaccaaaagcattcgtcattaatgttgcagtattttttttatctctagcatttctttttgactgttttttagaatttctgtcttcttaccttatttatctgttcttccatgttgtctactttttctactaaagcccttagcatgttattcatagtgtgtctaaatgccttcttttgatcattccaacattcctgccatagctgactcttgttttgatgcttgttttagtctcttcacactcggttttctgccttttagtataccttgcaattttttgttgagcggtggatccatgtactgagtaaaaggaactctagtaaataggccattagtaatgtagtggcaaggtgtaggggaagagaaagggttttacagtcctatgattagttctaagtcttttggtgagcctgtgaccctggactgtgaatgtttcaagtgcttctcagtattgtgctggcaccttacatgagaaaggacagctggagggtgctggagttgcgtattttccttcccctactgaaggctgagctcgctggagttgggtattattttgttctccaagtaggttaggctctgacaaaactctagcagcttaggctctaataaaatagtttcttcagagagcatatcttgttcctatgaacagcatgctttaatgtatttcaaaatggttcctctctcctctccctgacagaagcaggagggaatttttctccagtattgactatgaggtcctggcagagttcttgaaggtaaaattcacatgctcctgccgcaccaccctgctgctgccatgactgcatctgaagtttttaactctctgagttgtctgtatctagcatccagcaattaaccaattgcagttcaagttttcctatcccaggctgcttcctgtggaagtttctgcttatgggtctctgtgtgggtatatgtgattctctgtatctgtctgtctgtctacccagttttgggggaaatggtttgctctgtgacctcacttctctgccaggtctaagaaaagctattgattttttttgtttgtttagcgttttacttgtttttaggatggaatgatgacttctaagcttcttaacatgctaagccagaaaccttaaactattttgtagatttcgatcattgtggcatcttcacagagcatcagagatgttctaaagcataactaacaatggctatctggtactctattttgatatgtcacatatttaattatacatttcttttaataggacatttatgtttgtattttcagttgtggttttatatgtaccttctcttcttttgttattataagcaagaaggtggtaaaccttcttctagataacctttgtgcacattcatttcattatcaatggaaaattcctataaaaggctgcatgtgatcatttttgtgctgcaggaacactaaacatgggatagatgctttctacttcaaactttaggggcaggactctggggtgtgcaaaatcaggagagcctttcatataaattctctaagaaagaggagtgcagcctgggatggaggcagttgaggcatcagaagtaacattacttgggccacattattcagtagatggggtgcaggggccataagagccatataagtgggatattgtaaaagacatggggaaaggaagaattttatttcattttattttttcttattagaatattttttcttttcttaaattttattttagattcaagaggtacatgtgcagtcctactacgttgtgcactagtatattgtataatggtaaggtttgcccattacccaaataatgaaaattgtatccatcggtaacttttcagccctcaccctcctttcaccctttccacttttggagtctccagtgtctattatttaagagaaagaattttaaatcttagctgcagagaaaaaaaaaaaacataaaaggaaagaacgctgaagtcgtaaacggagatctaactaacagaacagaattgttctatacctaagtacctccctcaataatctcttggaattttacatttctctgagtttgaggcacaaatatgaggttcaaggggtgtgtgctcatgaaatattacatttatggagtacttatttttgcaagacaataatgtctctgatcctcatgacaactctacaaaataggcattaatatccacataatccagaaaagaaaccgagtcatggaaagattactcaatttcctataatcatacaactagaaatggacaaagtcaggattaagcccaaggactctctgattgctttccatacgcccctgtgctgttctcttctggtatggtggcagctaagcatcagtgctgaatgggatccaacacctggagctggtgtggatactaagaggagtccaaaataaaatgtctaacagaggaaatttctgaagactgagaacatggggctcacagaatcaaaataggaaagcagaatccggtcaagtccaaaaggtgagcacagtagctaaagcagaaaacatcagaagctaggaggccctagaaagacaccaggagatagagcatggaaaggaagaagtggagagggactccaacagttaccatgatgtgccccaagtgcctaatgatatattttttcttttctttttctttttttttttttagatgaagtctcactcttgttgcccaggctggagtacagtggtgcgatctcagctcagtgcaacgtccccctcctgggttcaagcggttctcctgcctcagcctcccgagtagctgggattatcggtgcctaccaccacacctggctaatttttgtatttttagtagagacagggttttgccatgttgaccaggctggtctcgaactcctgacctcaggtgatccacacaccttggcctcccaaagtggtgggattacagggatgagccactgctcctggccaatatatttttttcttttgagaagggcctcactctgtcacccaggctgcagtacagtggcacaatcatgactcattgcagcctcaacttcctgggctcaagtgatcctctcacttcagcctcccaagtaaccaggaacaccagcatgcaccaccatgcaggctaatttttaaaatttttgtagagatggggtttccctatgttgcccaggctggtaatgataattttttattgactgctgtggcttgctggtgggccagcctgattttaaggcactggctaaaatcagggtagataatattcaaaggatggtggcagagataggactcacatccaggtccacatgaccctgtagcccattcatcgctattttagagggtctcctttgagggcagaattacttgacagcaatgcatgctgtcaacacgctgtccaaatccctcttcacttcttccttcccttgatctacctcctggtttctttctagagcctcctagcttctgatgttttctgctttagctactgtgttcaccttctggactaaagaggaaagatgtaaagcttatgttgggttggaagtgggctagggaggggctgttttctctttggatactattcccacatcctgccacttagatagaaataaataaaaccaatgaaatggaaagttgtgtgataaacggatattaagtgagaaggaaaaaaacagttagtgaataatggtttttcacacaattgatagggagagaagactatatccagagacacaattttatcctatataccacccagggagtgtcaggaagccagaccatcgtagtgcactaagggaactttttagtgagattccagggtgggatgtggggagttcaaaatgggcgtgagggatttgaaatgaaggcagtgtatctggaaatgcattctgtcagctaagagttttcaaatgaaggattagatagctctcaatgatctagaataggagtctgtaaactttttctgtatagaacaagataggaaatattttaggtttgtaaacaataaggtacctgttcaaattattcaactctatactgtaaaagcagccatagacaacatgtaaatgaatggttgtggctatatgccagtaaaactttatttaaaacaaacaaaaaaacaggtggtgggttggatttgacccatggacaatagtttgccaactcctggtcttgaataaaagaaaagtggcacaggtgtatgtgtgtttgtatgtgtgcaagagggagtagcaaagtcatagcaactttttgatatgaaaagattccaaaatttgaggtagttacgataactaagcaagacaatctgaaaggctcagaaacacttgttcccctttcaggatgcctgaaattggaggaggaaattaaaattaaatacatatctgacattgaaggaagaacaatgcaagatatttagagaatgcaaatttatgaaatggaggcaaggcttgttaaaaacaaagacaggagaaagggggaggttgaagaggataacctggaaatgacagtgggaaagaaacaaatacaggaaatccgagtgattaggaagaaggaggtcaagcttaaaataaagctttaccggagtgctagaaaaaaggagaggtggcaaggtagcaaacagcctgaagctgcaaaaagagaggtagtggtggaaaagaaggcctctcggagttaatagcatgtggcattgttaagcaaagggggagaatgctaaactcacttacccttaaaacatgtcaacaaattcagtagagtttgggggttgagataatgactagcccaataaaaatatgatcaagaatatgcagtaaaaggatataattgggagagtgaattgattacctcttggaagatgtatgcttaccattcaggaaatctgacttagaggtcagtaactcagccagggctaggtccacttgaagtattcactgatagtcagtggctctccatttactctttgactcatgtattctttcatccacttacggacccaacagatgtttactcagtgtccaccatgagtctcttcagggttaatagcagtcagaaatctattaggtacttgaagggatcatgttgaagaggtgatggcagctacagaaatgagtgctcagaagggcactgactggcccctttcagtccagaggagggagaaggcacggaatcgatattcatgaaaagatttctccatcataaggcattcatccaactagactatagatagaaactctgagctagaagcaatttcaagattattttgtcctacccttttcactctacaaataggaaaactgaggacttgagaggtgataaggatgaaaaataaaaatttttgagcatttattatatgccaggcattgctttttaaaagttgttgtaaaatactcataacataaacttacctttttaaccattttaagtacaattcagaagtataaagtacctttacaatattttactattatcacaacaatgtagttccagaattttctcatcacaccacaacctccagcctttggcattcactaatctgctttctttttctacttgtttacctattctggatattttatataaacgaaattatactatatgtagccttggtgtttgtcttctttcacttcgcatagttttcaaggtgcatccatgttgtggcatgtgtcagtacttctttcctttttatggctgcatagtattccattgtatgtatatatcagattgtatttatcttctcatcagctgatagacattgggttgtttccatttttggttattgtgaatagtgctgggccaggcactttttaaagcactttacattaattaattctgttcacaaatatccttggaagaagatactataattacatcatttttacagatgagaaaggaaaaattagatcttttgcccaagttacagttaatagaagaggattgcggaggaggagctgagactccaatttcttatttcccaggtcagtgctgtttccaacctaccatcctgctcagctctgtaagggcagggcctaccacttacttctcaccacagacacttgtgctcagcgtatttgatgtaaattagttgaattaaatttctctgctgcataatacataggaaacaaagggagagactggagattatttataagtcactctatgcattttaatagtaaagaatacataaaacgactgaaatatttagtaatagaatattgtaaataaataatgtcatattcatatgatggaaagtactctagagccattaaaaatgatgctatgggagagtattgctgtgaggaagtactcctggtttatttagtcgcttggccctttgaaggaaggcatgatcagctctttggcttaaaaatctgaggtttagagagattaagtaaactgcatgaactcagacagctcacaaagcaagaattttgtctaaatctccaaactcacgctctcagccacaatcaaaaaattaaatggaaattttacaaaatcttagcagtggtaagaggaataaataacgtgtgacgtgttttcttctgttccttcagctccattttctacattttctacgatgctgtgggttgcttttgcaatcgaataaaagcagtacagtttctgttacaaaaaagagatcttgcctaaatcaacctcaaaacatagttgaaaaaagagactaaaactctcatgggctgtaggaaaatatacaaatataaaaagtatggcccacagcaaaagtaaggaacgatgctggtgagaaactctaaatggaggggttttgtggttacttctttaccatctcaatctttggaaactattaatggatgctgaccactccttgtctctaaataagcatttctgtttcccaattccttgctgagttcttctgttgatgttagagagcagttaacaaaccacgtcaaatcatatgcagttgtagcctggtcttgtgtgacatggtggagatttgaagcattcggttatctgagttatatgcctcgattttttaacccctatccaaaattctaatttgctctgatgtctgaatattaccagtgagcacttgcttagggcctgattctgtctacactgtgtagcttgcacaaagaatttgagaaataacctttctttatattgctaatacaacaacactattggtttgttattgtttgttactgttgataggaaaagctccatgaaaaccagtcattgtctctaaggacgtaggttgttgatatttaattccaaatttcccctttcaagtcctgtctcctcattcagtcagcagtgatgtggctccacaatagctgtaatattgtcataatttccatagaaaccatctgtaaagctgcaaacacaggattacaccctccctgcaggctgaggcaggaaggccagatgggctatgaaggggaaaagccctcagcgagacataaatcatttggtgaaggggaggaggatgggggaggaaaccactttaggagaaaaattctgtttggtgcaatctttgcaaacaggatgaaattcccaaatgaagtggccagcagcacgggctcccttccaaggccagtgtctggaactggttacttgccgggaacctggttctaatgaggccagagacaaagatttcttattatgtgggctgctgatttcacaggtcattagccacagacagacagacagagagacagacctaagatcctggtcaactcttgtgtgttcaaagacagagatggaaagtgacgtgtaatgttcactcctcagtgccaggctggacttttcacatatgtagctcattgggccttcacagtatcccttgggggggagatattattcccattttacagatgagataatcgagttattctcattttacagatatgataactgagctattctaactccttcttgttcagatctcatcttcatcttaagttttctgagacctttctccgggtgaggtccacctatatgcttcagaatgcacctctatttaatactcattattctgtgtaataaatacttgttaacccctttcccactcacctgagattcctttgaaggctgtgtccttaccactgccacagggttgactcatagtaaatgctcattaccaatttttgaataaataaatgagaaagtctgagtaactcattcaaaatctatcttttccacagttgtgtagctgggagttagaacagtgcctggcatatacagacccttaataaacattggaatgaagtagtgaatgaatggacgtcaatcagctgattacacagtttatcaggaagtcacatcaagcttttctgatttcaaacacagtgttacattagccggggccattgtcatgtctggccaggcaattcaaagcacctggcttcctgttagtgtcttgctactgtttgcttttaaaagtacctcttattatataacagctctaactaaaaagcattcgctgaaagctcggaaagtgagggtgagacatggatctgttactcaccatgtaaatttgatcatatccctttacctttctgggccttaatttctccattgttgaaataattatagttgagttaaatgtgagattttctgtgagcaccgccatatggttttgctttgtgtccccacccagatctcatcttgaattgtaatcccaacgtgtcaagcgagagatctggtgggaagcgattggatcgtgggagcagttcccccatgctgctctcatgatagtgagttctcacgagatctgatggttttataagagtttgacagttcctccttcacacactttcttttttctgcctccttgtgaagaaggtaattgcttcttcttcagcttctgccacgattataagtttcctttggcttccccagccatgcagaactgtgagtcaattaagcctctttcctttataaattacccagtctaaggcagtatctttataccaatgtgaaaacagactaatacaacctccttcttttagaaaaaaaaatcagaagtaatcttatgcgtaagctcaatacaagtgaaactgctttgatagagactttctcaaccttccttttatgtgcccagcctctaccccttggtggcctctgaggaagctcagtggaaaaaacggtctctggtgaacacagttgggaaatcactagaatagattataagtagggccattctggctctaaaattcaagagttctagaaatattggcactgagctccacacattatgtggccaatctgagctgatggtgtgtgccacctatccttacaaatatagatctagatggagaagaatggccatgggatttggtgtcataatttctgatttttgaacactcagatccaccacttccacaaagggtattacccctgagcaaatcattttacttctctgagctgatttcctcaaatctatagattgtgaaaagggttctttcatgattgggttttatgagatccaaactgatagctattgtttatcgtgtaattactaagtccttggtaaattacattgggagaggcagggaaccatgggttttgggtatccttgcatgttgttgctggttataacaaaaatatgaggccctgactgctctttatctggatcatttctcatggttatgtttttagtgagcaatcttgagtgatgaggtaatgtttcccctagacaaagagtagttttgcttcctcttactgtaaaagtggcaaatcttcctacatcagtattattctcctgtaacacaacccactgtatgtgcaggcatctggcatctgtgttgaaccatgtcttagtccattttgtgctgctataacagaatacctgagactgggtaatttataatgaacataaatttatttagctcatgattctggaacctggaatgtctaagagcatggtgctggcatctagcaaggccctttgtgccatgtcatactatggtagaaggcagatgggcaagagaggcaaaaatgagcaagagttcaaactcacagcctcaagctcttttataattgccattaatccatgcataagggtggagccctcatgacctaaacatctcccatgaggccccaccttcaggcactgttgcattagggattacgtttgcaatacatactttctggtgaacatattcaaaccacagcaagccttttgcatcatccctgtgagacttgggaggtgtgggcaaccaaagaaagccaacataaaactctagctaatgctttttcatgagtaataaagtcatttgtctctgacccaggaacctcctgtcttctgccagcatccatgaaatagtaacaggctaatttgttagattgtaagtaatataaaacttcagaccctacacagttcttgacatattatgtgtaatatattacattgtagtgtattctatcatatgattttaaattattacagcagccctatgaggtaggtagattctagtaacagtatttcatagataacaaaaacagtttcaacaaggttcagtgacttgccaactgtcacacagctattatgtggcagaactgagattaaaccaaggactgtttaatcccaaaagttacacccttatctacatttcctctctgaattttatgaaataatgcgtatgaaattttttgtaaactttaaagcattatatacatatgttttatttttaataaaaatagatttatggccaggcgtggtggctcacacgtgtaattccagcactttgggaggccaaggtgggtggatcacctgaggtcgagaatttgagaccagcctgaccaacatggagaaaccctgtctctactaaaaatacaaaatgagccgggcgtagtggcacatgcctgtaatcccagctactcaggagtctaaggcagaagaatcgcttaaacccgggaggtggaggttgcagtgagctgagatcgcgccattgcactccagcatgggtaacaagagagaaactccttctcataataataataataataataataataataataatatatatatattcatgatgtgtgcactaagaaattggttcatttcaacaaatctgtattgattgtggtcctagcttcctacagcagataaagctgcccatttaaacttctgtggaaaacctgggtttagtaatggttatgctgcttaccagctgtgtgacattggacaagataattaacatagccatatcagtctaggttcagccaccataacagagaccctactaggtgcttcagacagaggggatttgatacagagagtcgattatacacatgttggaagttgaaagagcgaaaagagacatagacgttaatccagagaaaataactagaggaagtggcaaccacccaaggctgaatgaataaggaggggtgctgccctacaggttcattgcccagattttggaggagggatctctacctgactgctcctaagagggtgtggcaaaactgggagtgacagcgcaaaaagaagctggaggccggagatgactgccgctacaggagtgatgctggcaggaacaggcaaacgggaaagagattctgttgtcctttctttcgccttttattctctacgtgctgccttctgtttgcagaacttaataggaagctagctggttaagaattctgagtcatgtagtttgcagagtagtagccaagtagaaatcaaagagtataaagtggtgaaggctgggcttagagctgacaaacaggaggaaataacaggaataattgctgtgccttggtctcatcactgtacaatggggataatacctatatcattagattcttttggaggattaaatgaaacaccactcagttgcttgctgattgcaagtgcccaataaatgcaagcctttatattattcttattatgctaagcctgatttctgtgtagtctgctgcctgtgcctgttttacagtgggacttgggtgttatgcttgcttcagggattatcaggccatctgggaagctggccttgctaagctccatgtggagaacaggcttcaagactcagcattggcccttgtgagtcaagatgggaactttctccccagagatatttaattagctggttgtcagaatggtgttgatagataagatgcctgtcttagattggctctgtggttgctctgatgtgggattctcagtttatttcatttgtcaccctgcttcctctttttcccaaaataaaacccccattgtgtttcacctccttttttcattctctcttcagacaagataaaatgtccttcactgagttgacaagacttgcgctcctaaacagttgtcctgtgcactagggatttatgttgcagcatctcttagaatatacagccaaaggcgctgagacctgaatttcagcagcatagcccggcaattaaggattttgattgtggagtagacacaaccagggtttaaatccctgctcagtgttttattagctctatgacctagggcaaataacctctctgagcctcacttccctcatttcagtaattgtatgtgtatcatatgttgttggaaaagtaagataatccctgtagtgctctaaatccagaatgcttcacagtttgaaaaccctcaataagtagtagctactattactgcctgtctacactttttttttcctttaattaactcatgatgtactcaggtagaatttattaatgtatacattccacaaaaatttattgctcacctattagatgccagacactgtgcaaatacttgataaagaaaaatgagcaaaaggcaagtctgatctggtggaaatggaataaagtttttgtcttcagggtgctgacagtttggggagacagtgtcccgaggctgacactttccctgacacacttacagtacagtatgataggcagtacagtaggggtctcagagaaacaaagggccccaaggtcccacagacagatagagaaccaaccttgagggataagaaaggttccccacagcctcaatgtacatttgagatagcctggcaaaatatatgtgtatgatatggtagtggaaatgcatgctggtgtgtgtggggggcagaggatttccacacagaggatcaataaaggagagagcatggcatgctcaggaacctgaaacactgtagacagtggcataagttgagcaaaagtcaaaggcagagaggacagtcaaggccaaattacacagggtcatacggagtgcatgtaaggccacaaaacttaacaggcatcttggactctcttggctgccttcttctttccaaaggtaccatcttcttacaccatacttcttagatgttatgatgtgtgtctaaccaataatcagttgtctccttctttcttactgaggcaaccctgatttttttgttgacagaggcaatgtgcccagcttaaaaaactacatgttccagcctcccttacagatgtagttatgcagagctgaatgcaagttctagctgatattaatgtgtataagctggagacggagtaaaaattaaaatgtcagagtgtgtattaagaagacctatgaactccctctaacagaccaatgaatacaaagggaatgtgtgaagttctgtgagactgagagatatcttatgtagtgcataacttaggataaatcattaattgaaaaacatttttatgagagcaataatgaaaaagagagctcaaaatgtaagatacaagagacatgaattctggtcctggctgtaaaaagcaaaattgtgattctggacaagctctaagaaaggcagtcttccttttctctctgcttgcctttaacatcttttctttatcttcgcagttttgcaattttagtaaagatttagggccgggcgcggtggctcacgcctgtaatcccagcactttgggaggccgaggcgggtggatcatgaggtcaggagatcgagaccatcctggctaacaaggtgaaaccccgtctctactaaaaatacaaaaaattagccgggcgcggtggcgggcgcctgtagtcccagctactcgggaggctgaggcaggagaatggcgtgaacccgggaagcggagcttgcagtgagccgagattgcgccactgcagtccgcagtccggcctgggcgacagagcgagactccgtctcaaaaaaaaaaaaaaaaaaaaaaaaaaaaaaaagatttaggtgtttttatttttccttctctgcactcaatgtactttctgaatctgaggattcacatctttcaacaattctggaaatatcacagccataaattatctctgtgaatattgccgctcttcattttctttcctgtctggagctcctcttaactttattgtggatcatctttctaatgtcctggtctcttaatctctttgttgtgctttccatttcttttcattcagccagggctatctggtcatagttatatcctggctcacaaattctctcttcatatgtaaataatctgctgttaaaccactcattgagtgtttcatttcattggctatttttttcccacttccagacaatgtattccgtgccctattttaaatctgcattttctgttttgatcatgtcttgttcttttcctgtacttaaatattatctgaattgggaattttgtccgtttaaacatactgattttattttttctatgtaattgttttatttcatgaagttttgagggaactggggggtacttattgtgtcttaaatcttgctcagagtagattttttaaatgtgtctggtaatttttaattgtgaactcatgtgagttggtgctttttctgaaagaatctgatgaacctgattctaaagcatctaaagggtgtctctttctaatgcttttgttttttgccagataccccagtggtatctttgcaatgaacattgttcatgttaatatttcactttaggaattcctaaaataaaataaaataaatgcctaaaataaaattcaaacttacctgagggtcttctattgttacaaattctgaggagactcctcccacaatactccatcaagaacattggccaagaaaaataagctccatgtcatcactccatatacatgagaagatttcaccagtttgcatttttcactgagagaccaaaatttacatggaagtctctgtccaaattcctccccctttgatatggaccaaaggggttcatctcttttcctctttgaagcgttaaaactccaactcttggttaccaagatgggtaaatccccataaggcagccaaagtgtcagctctcctgcttatttttgtcttcatttcccttgtttttactcctaaatatgcattaacatattttgcattggaagaactaaatgatctaatctaccatatttctctactcatcattacgaatatcaattattttacagtcataaaaattatcctctgattggaccctggataactgaaattttatgttaattcaaacaaaattagtttatttcttcttttaactagatgatcatggaactaattagtattgggacttaatttttcattttaaaattataagttaattcactttttaaatttaattttgaatttcataatcgagtttgtgaccatttgtatctgtatcaagtccagctctagctctaccacttacttgctatatgagtttgatcaagttacataatcattatgcctcagttttctcatttgtgaaaatggccataataatagtatcaacctcagcaggttgttatgagaattaaataagtttgtacaagtaagatatttaataattttacttcccatcattattactattgttatctgcagaaacagaatcataataatacattcatttttgaggatatgttaattgatgctactttgtgatcatgatcttaatccaaataaattaacttcgggtgtttttcaggataactgtctgctcaaaaacctttacaaatattttcaagagtttgagtcatcttcttcattatagcatgttaagacaaccctttaaatgagattacttctatagtttgtaattactttgatctttgcaccttcctagggcatcttttatttattctgtaatttagtttctatttatacgttaactttgaggctctgctttcatctgttctttcaaggtattctttctattcctttgaataattttccattttgagcaatttgttttaggattttaatctttgtttcaaatcttttgctgtgatgaagttgtttcaattctaagaaccatctcaaaaaccatatagatgccagcattcggttctgggtatattcttcaacacttgacttagctttgcttttgaagtgctattattttaacgttttattttgaaatgattacagactcacaagaaataacaaaaatagttcagagatcccttgaacacttcactcatcttttgccaatggtcacatctcacataacagcaatatgatattaaaaccaagaaactaacatctgtacaatactgttaggtaggtggcagggccttattcagatatcaccaatttttgaaggatatttggggtgtttccaggttttagctattatgaatagacctgctatgaacattcccctacaggtttttgcggggatgtaagttttcatttctctggaataaatgcccaggagtgcaactggtaggttgtatggttactgcatgtttagtcttttgggaaactgccaagttattttcttgagtggttgtaccatgtttcattccaaccagtaatatgtgagaaaagtgccatttttcatacatactctcctttaagaaaacctaatctatgaaaatccagattccaaaaaataaaggattttttgagtgatgaaaatgttctacacttagattgtgatgatagttacacagctctaaatataccttaaaaaccacggaattgtatactttaaattggtgaattgtatggtattgttatatctcaacaaagtgttttaaaaaaggctattacatgagatgatctaattatattacaaaaaatcttatttattcaccaaatttctaatttattaagcatttaccatgtggcaggcattatgtacagtgctttctatgcattaccctatgtaatctccatacaatcattacctccaattcataataaacactgttgtaaaagaagatagtatagagtggctaacaagggtgaagttctggcacaagactgcttgagctcaaatcctgacccattcactaattagcttgtcatttaaccattgtcagcttccaaatccttttctgtaaatgggaatggtaaaagtacttccctttgtgaggaataaatgaaaaaaatgcagataaaagcacttaggattctgcctgcgtagtatcattatcattattattaaattcatgaaaagacattttcctcttagcagttcataattgcttgataacagtgttatgagaaagtgaactatgtgtattaataaaagatgacagattttgtcattatgtgtatgggaggacaaaggaagcagatgacatttactgttcccctatgatgcaccagacactgtacttactagccaccattgtgtacatgatatctgaacaacattgtgtgatgaaagtattattcatccccattttatagaaaaggaaacaaactcaaaaagattaagacagtatttccatttcataaagcaagtattttatgtagccaggatagaaaaccaggtgtttctgtgtccagaattcataatttgccttttcacctatgaaaataattgataaaaatgagactttgcctcaaacactgcatttaagttacagtattaagatacttgcagcttttctttcctctttattcaggaacaaaaatttagcatttctaagggtgtcacatttaaaatatatttaaaaaagaaaattggaagtccatgtagtaattcagaaaggtccccaaggtttaattccacctgaatttccaactgcttagaagttgaatcaccatttaactgcaaagggcaaacccattggtggaaaagtccattgccagaagagctcagcaagaagtgaagaaatacattctagaatttagaacaagatgaggcatcctgtgctgagctcaatcagaaacaaaacaaaacaaaacagaacccccaaatgaattccaaactaagaagaagaaaagaaaattgtttgtgataacatttcattcaccatttctcaagtttattcacctgtggattaatctttatattctttctctttcttcttcaaactcccttctctttagaagctgctaagtgttgtaatggaagcaaagatgggactttaatgtcagcttattgagaaaaccaacaaagttttttcttttgtagtgagtctcaaagattatgtatctcattcttcaggtttattactgaggaacttggctgttggtctccactgggaaagaaacacaaggatatggaattctacttggaaaactcaggtcttcctgtttgctggataaatacagagacaaaatcacaatgagccctctcacattgatgtgaaaaaagatctttggatagaaacctactcatttattctcaggactttaagtgccctgcttcatgttttggcatgttgcaactgactttattttatttattttattacaagcaagagaaacaaagtctggttcccgtatgatttaaaaaagaaaacaaaagaaaaagacttgggttgggttaggagtttctctgaaccatgaaaatgacctcaatattggctgaaaaatttgacaagaatgaaaaatggcatggtacaagctccaggaagatgttgcagagatgagcttcagatgcatttcattttgcgttgttattaatggcttggaaagaggccataaacctattatggtaattatgtctgcagatgagggtaaataggatggtgttataaacaccagtaagcaagagacgtagtacagagcaacctagggagattagaaatatggacaggaaatgaacaaacgagatcagcctggaaaagtgaaaacatgcatctggagaaatacataatttgaaaaacagagagatacttaaaggcagggtcatacttggaaagcagtaatggtaaataggcctttgagcagatatcagccctggataaatttgtaacatgatggaaaaataatactcagacctggtgttcatatagcctttcaaaatgcattttttcccaaacagaggcatttccattatctcatttgatcatcaacccaaagaggttggaagcaaagaattctccactgaagaaatgaaaagaggttaagtgaattgcttagggtcaatttgttaataaaatagacatggctaaaacttgggtgccttgacttttctttttcttctttcactataacacctcatcattatgtcttgcatctcagaatagtaattatttctggttcagcacttagccatctctttctgatgttatgaacaactttatttcatttgagactgagcatagcattactgaacatttgaacagggcataacctatgccccaaacctattttctaggatgaagtgaggcagtgtgtaatggatggtggatctctggattagaagtcggagctctatactagtagtatcactaactacagtgttggccatgggcaagccatcgctagtctcatgtgcttcagctgtaagatggaggaggttgattgctatggtctcacagaattgctctctttgaagagctaaaagaagaatgaagctcgtgtaaacagacaacccgagacagaaacctcgaagcctgagaggagtgggagaagaaagagagagcgggagagatgtaaacgcctggactaaaaacatgtattggcatatggcaggcaagcatatttaggcttttgaggataacttctgcaaaatttatctcaatctattctctcacgctcttgttatagagtttctatcctaaagttgacactgtcattttttcccccttggtaatgatgtatgagtttctatgtacccttatctgcctttgtaagaaccaatgcactagatgtctttttggattctgccaacatcataatggctcctttttctctgagaagtgcctttatgtccaaatgggtggataccttgcaccacgtttaggttatgtaattcctccatcccttctccataagtgattagattgtaatcactgacccaagcagagccaatcgaattctttccaattggaaattgggaccaagagaaaatcattttattctctcactgagattagaatgaagaagcatggagtggccaaatgtggagaggaaactaatgtaaatagaggattagagagaatcacaatatagcctcagagggtcaaagacagactgtagctgacatcctgattctagcctaggtggaggcttacatctgaatcattgctctttttttttctcaatagttttactgagattatttttcactttttaataagctgtttttactaatacagtggtcaatctagatgatatcctgttaatatgccagtgagtctacccagaactttcctcctccccattagtactttaggattctgccttcaacagtttgcctttggtttgagtttctttatgtatgtatgtatgcatgcatgtatgtagcatatatgcatgtttatatgtatttattcaaggcagtcactcagtgtgtatcccatgagtgtctgtctatattccaggcactatgttgggcactggggatacagtgatgagtaaacagagacccatcctcaaggagtccaagggaagtgttcagcaaaacagatcattataacatactttataggtggaggaccgaggtcagcaggggctctgagaagcaccaggggaaactgcatagatgtcagaaaaagctttctggaagagataatgcctgagctgagtgttaaaggattgtttggagtttcccaagtcaaaaagggttacagtcatttcaggcagagggtatgatttgggcaagtgcttgaggtaggaaacagcaggatgtgagaaaggaacgcctagttcctagggttactggaacataaaatgcaagttaggagtgaagagaagatgaagccacagagatgagcagaggtcaagtgtggagagtgtcaaacatcgtatcaagaatcttgagttttagtctgagaatactgaggaatgattggagactcacttacaggtaagtgggaaagtgacaatttaagatgagacctgaaagacaagaaggagataaactggttgaggttggtccagacagagggagcagacagtgggaaaggaccaagcactgagacccgggtttccagtgaagatgaccaggtgaagggaggtgtcaccagctgagctacagagcaccggaaaaggtaaagagaagtttccggaatctatgttagatttgtttagtgctctaggtgccctagaaagtagattataataccaagaataatatgcagaaggcttattagggagtgctctgaaggtcaacaccaaggaagggaagaaaaggaaggagatggaggcagaattgggtagagggagaaggctgcctcaatggacacctcagctgaccctgaagggagttacgaagagaggatgaaccttcagcttgctcctgagttgggataagggtcaggcctttacaactcctcatcagtatcattgcatgtgggtcacccctcaaggcagtgacgtctcagacaaaatggatgtctttagctgaagcaatgtccaaaggtggctgacaactgagagccttctgccagtagcttttgcagaagctggagtcataagccctttattcctgaaggatcaagatggtgcaccaaaggggccactgtattgtaactgaggcgcttgtggatcacctaggtggaaacatcctgtatgcagttagatgtatgatactgaggctaagaggagagggctggctagagctaaggattgggaagcaatattataccagtgagaatgggtgacctctttggggtcatacaccctttgagaatctgaagaaaactagagattcttcttcccagaaaaatgtgcaaaaaatatatatatccatggaatttttggaggttcaccttttggctatcttttgattgggttcactcaataacattctgtgccttgggcaacatcatgcaatattttaattaatctgattaaatagtccagtttattggagcattcccagaatatcaggacctctccaacattttacctaatcttcatgctatctaacttaaccatattatccctattttatagaggagaaaactgagtttaaaagaacttgtgtggggcaccacagttgctacagcagagctagaatttaaacactggtttgtgtgactagcagagttggattccatttctgagctccatgatatatcttctcacctgggccctatcagggcaacaagtggcctcttgccaagtagagaggaaagcaaggggacctaaagaacagtcaaggaggtgtattgatattgccctacagctgctatcagtgatgcggagtattactggagaaggggaaaattactgacatcaagcaaacagctccagagccagggactggccaaggctacaatgtgcttgagggtgccccagtggtcataagaattttggcagaggagtctgccattctgtccctggtggtggctgattggctgcctcggatattcttctgttttattggtgttgtcgtggaaaatagcgtacattgtattcgcaacttaattggctagttcttttctattttacttgaaaaaaatttaatatgaatatcattattgctgtccattggctcttatcatctttttatcctaaagaaaactcaacttgcaaggtcataataaaacaatcattatttacattaggtaatgggtgcagcacaccaacatggcacatgtatacatatgtaacaaacctgcacattgtgcacatgtaccccagaacttaaagtataataaaaatatatacatatatataagaaaaaaaattattaagttaatgagtcaaatcaactttctatggcaaaacatagtttctacctttacagagtaggttctttacaacaaactttctgataatctagtttcttgcgatagtcttttacagtcacagagagttaagtggggagagcttggacctgttaaaataggccttcaatattacaagaagttctctgcaggtttttagtcaggggacataaagagaagtttaactttgtggtgacaaaataaagactaactatagatttaaattaaattctgtagtagatgtataaacatccactgagctttcctcttatctttctaaacaaaggcaaattgcaaatccagtgcattgtagttgtgaaatcatttgtaatagtggtttcttaaagctagctctacaagtgatttccaggactcctgcttggaaaaagaaagtagtgcctgcttttaactttaattttaattaaggctgagtgagtcaaagatatgtgggtgttaaaaatcattgttttccatagtggcattagcttaaaaccctcattacaatagagccattgttctattaactagcacctttttatgcattataaaggatcactgctatggtccaaatgttggtgttggaaatttatatgttggaacttaatttgtattttggagcctaaaattcaatgtgacagttttaagaagtaggccttttgggaagtgattaatcaataaggctctgccctcacgaatgcagttagtgcccttataaaagaagttcaagggagctgtcttgcccattcagccaggtgaggacctagaaggcaccatccaggaggaataggccactcaccagacacagaatctgctgatgccttaatctcagacttttcagcctccagaactgtgagaaataaatttctgttgtttgtacattacgcagtctaagatattttgttatagcagcaggaatggactaagacaatccccatgaaaggtataatctaatgaagtgtcaataacacaaaattattcatctcttttgccagcaataccttgatgtttttggaggtccgtgtaaattgtttgtagctgtgaggtactgaaaagaagacttggttacttgttaaaatatgcattaattgtgtatgcctttttggaaggcgttctgtatatgtactctattaataaattcagtccagaaggtccttatctaatttggtgtacgattacagcagggaggcaagattagtatttgactaggggccaggttgggcaggtttccttcattttccatccactcacttctatggggacttcaaaatctattcttttaattatcctgtactataatgatatacaccagcaactcctttcaaatgaatcaacccatttttctgtttcataagacctgtttccccttttttgtgtcagcatatccactcagctattctaccagctactttaacaggtgaggcaagtaaggctaaggtttttcaggttgttaattccaaagtcaaataatttgaaacaaatttggaaaatctaacagctttctctatttctgttttttgcctcttatgtttatgtctccagtgaaaaaataagtgcctggccctttaaactatctaagtactccacttgaggccaggtgagctcaggtcactggaccccctgagctcagaaatctagggtcttatttgggatcagtgtgtagaggtggccaaatcaataaaaagtactcatttgttgacactccatttgctagaggtgcctgtttctcatcccagggctccttggataagttgctcggtgcaatctgtgtctagactctcaggcatgtgtctctgccatccctactttcccccgcaaaacggagccagaactaatgaggccaatggccctggaacatttgctatagctgagtacaggaaacaggagggaaaaacacaaacaacacagccaaagtcccttcctgaagatggaggggaagcctgcaaaatacaaagtgggattgcagcctcacactttggggttggcttgctgttctgagtccccatccaggagtgagtttcacatccttctgggagtgaactgttgtgctattcaggaagggatctgaactcaatcacatgtgcttccattcacccaagggtgaaattgactgcacttaactgaagattcagcagctccggcgcatgttctcagacaggcttttaacagacagggtgcaggtagttccgggattcagtcttgtgatttagggctcagtgctggtggagtgagggtgggctggaaaggaggtagttccctggagataactcactgccatcttaattctgaacagatatcaaacactccttcagaatacaacacccttcacatttgagacacagactccctattctccaattcctaaataactcaacagtctctaaatttctgatgccagaaattcagatgaccataaaccaggcaggggcataaataaatggcagcaaaccccatgtaaaggaagaggaagcaacagacattatggctaattggagaatacatattctgtcaacaggcagccaatattttactctagctaatgggcactgatgtgtgtctatgagcccagaattgccaggtctcttaatttttaaagaaatataaatgtgagtgtgaaatctataaaatttaaaatgctggctaaataaaaaatgtctgtccatgtacatatttatttaatatcaatctcactgttgttggctgagtatcctgggaagcagatctgagaagaataataggatgaaggaagtttattcgggagtgttcctggatcgacatctgtggaagggaagagaaaaagaaggatcagggagagggacaagttaagccgtgttgtggtcttaacaaaggcttcagcagaccttatatgaccttataggcaggcatgatactgggataaccctttagaattcttccccttttttgactagaaggccaggcctctgggtgctcacattaaccaactatcgggtcatatgccctgggtcggcggggctttagacaggggcaattttcagaaaagggttgagagcacccggggtaataaatcccttagtcttaagggaccaggggccgggaacagtggctcacccctgtaatctcagcactttgggaggccaaggcgggtggatcacctgaggtcaggggcttgagaccaccctggccaacacagtgaaacccagtctctactaaaaatacaaaaattagccaggcgtggcggcaggcacctgtattcccagctacttgggaggctgaggcaggagaatcgcttgaatccgggaggtggaatttgcaatgagccaagattgtgccactgcactccagcctgggcaacagtgcgaggctccgtcaaaaaaaaagagagacctgggtagaataccaagtgtctactacagaccactcttcatatagctcagattcacttcctcgttattgttgttgttttgttttttgtttattttattttatttttgagagagacaggatctcactttcttgtccaggctggagtgcagtagtgtgatcacagctcactgcagccttgacctcctgggctcaactaatcctcctattttagcctcccaagtagctggaattacaggcatgtgccaccacgttcagctaatttttaaaacttttgtagagaaaaagctatgttggctaggctagtcctgaactcctgggctcaagcaattctctccctttgccctcccaaagagctaggattacaaacatgagccaccacagctgacctcagatttacttctctgtgtacgttcagggagcaaaaacttcaggatttagggtctcttctcttgggaggtctcagggcctctttttccacagctggtcttaagaccacagtaagacccattattgtcctctactgaccattctagatgctcctcactctcagctagtaccttcactggtccagatggtttgcctggtgttaggacatggaaggggcagagtccctggtcaccatggctttctcaggctcaagtacattatggctgatgtacttgtctataccattaatgctgggcaagttagtacatataagaacccatgtagttcacaaaggtactatacatactcttcctttcttttatcgtgtaacagcagccttaccttctcctgataatcagggtcctacaaggatgctgactctccttgcttgtttacagactctgggcccatgagcccgaagtacacaggtagcagctgcaacttagagttcagtaggattcttgctatgccccctggtggaaacatttctccttggtgaaaaggcactaaataacccagaaccgcagaagtggaaagcgtgtatttcgagttgggtccctgggagtgaaggtaaaagggatcactcctgcttcttccccttggttcttgcattcatgtattcttccttttgggacacagcaccatataaagggcattgatgtaaaatgtccagtgcaccctggaggatggctccctatccttgcacagactcctctctgaattggcacttcagttgtcccttcaataggccattccttcacactcaggatggtagcttctggttaaaatggtatttgatataactgtggatcctgtggtcatgtggcctttcttgtatctcatttgttattgagtgggcccattggtctcatgtgatgttttgtgggatcctgtgccagttaatgagacactccttaagccctcaaatagtggtgttgactaaggccctagcagcagcaaaggcaaatctgtgcctagaatgtgttcatttctgtaaaaattaatccctgtgccttctagtatgaaaggggcccagtgtattcaacttgtcaccaagtggctgcttgtatctttaagggatggtgccagattggaaagtagggttgctctctcttgctggcatgacggacatttgacagcaccagtagctgaatcagcattggtcggttccctgcattgcctctagccctgtcactgtgcctactctaatcatatgcccattgtgccacattggggctgctgatggcagagcctggcagatgtcaactaacagggtcactttatgtacctcatggtttagtgcctcttctgtgatggatgccctctggggggcattaacaatgcaatacatgtatcttgactcttcatgcccattcccttaggtccacccatctgcttctacccacgactttcttttcctcgatcttttaatctttccccttccgggtccaagtcaacgctgcctagggtctatatataatcttaagccacgtttttgttttctttccatataaggtagatggctaggtgcactgtctgaagccataggaaagtatctcctcattgttgtctttcagcaccactcctgaatggggctgtcatgtggccatggtctattttcagcttgctctactcaccaagatggcctacctgtaaaccaggctcagatttttttcttctctatcagctggtcataagggccacaggtgtgtgctaacagaaaggtgctggagcaaaagtagtggatgacatgggagactagaccacctgctcaggtagcctacttatgcccttcagcatttctcatggccaatcctggatgtaccacttccatctgcagtgaattgctgctaggtccacctgttcttataacatgttgaacctgacagaaccttgtgctgggcatttgtggctgcgtggtcacttgatgaccctgataagggcttctgtctttaccagggtccaaaaggaactctttttcagatagtgtgtaattttctggttccagagtcctaggaatctaaatatgattctcctattggcatttgtgtgacctccacgtggcttttttttcccacaaatacctccaataacataggagtcattgaatcatagggccaaagtggttgggctgtttacactgcaggcaaatctgttacagaacactttcctattccaggtgtcactcaaaactgacagccttctctgtatgtgggttgtaacacattttggaatatggaatatgttgtctctaaaacctgaagagacctaccaggctttgtgcttccttcattgcaggagttccctagtgcaataatttgttctttactctgaaagaagttgtggcatgcccaatctgagatatcaggcccctgaatctttgtagatttatctttatcttccattttgtagataagagttcatgtgcgttaccaaagccttcaatgtacttgtcatttcttgctcatctagtcatattttcatgatgttatcaataaagtatactactgggatgttctttaagatgtccagacaatctagatctttcagactatattatggtggaggaaaggataattaacatagccttaagtcaagattgttcatgtgtacagtttttctgttccaagtgtgtgcaatctgcttttgatcttcttttgtgatgaaacagcactcatttgctaggtcagtggctatgtacaatgtacttgaggccatttgctctagaaaaatatcatagcagcttaggtttaggctcttgattgagtcatgctctggtatttgtcaggcttttgtggcatccagactagtgaatcaaatggtgatatgatggagactggcagccctgcatccttcaggtctttaactgtgctgctaacctctgccattcccttaggataaaacaaattttttgatttactctctatctttggtggggtaggggttcggttttggagctttctgcttggtcttccctacttgatggctgttaccccagagactaagaaaccaacgtggaagttgtgctaattgccatatttgtctattccaattaataaatggtagtctgtgaaaatgactgctaggtggatcagtgaaccccaaaggccaaatgtaagccaaacgtagaccaagagtccactcagtacctggcctctacatgtctctactctaacagagaagctatgttgatatttcagctctgggtatcaatgtcaattgggaacttgtatctgccagtctcccttcccactttacagtggcattagtaggtggccgtagtgaagcagcatcgttgtctggggtgatacctgaaattctttgtctcacagccatggaaaactaagacatggacacacaaagagtaaggttgagagtggaagtttaataggcaaaagaaagagaatagctctctctgctgcagagagaggggtcccaaatgggttttctgggtctatggtgaaatgcaggggttttacagtgagcctgaggaggcggtgtctgatttacatagggcacaaaagattggttggaccaggtgtgccatttgcataaggcatgaaaacctggttaggactaggtatgccattgcagaaggcatgagaaactggcctccccaaccctaatctttttttatgcagatggttctctgccttgctagtgccatgttgcttattcctttactgtacacatggtaacaaaagggaaaatggtgcctccatgttgaccatgcctggctcccttgtagcccttttctgttgggacagctcccagcattcacccgtgcaagcttccaggctgcttatctatgtttgcaacttgattttccaggctgcttttcttgggctgctttttattagaagggaagccttgatgaggactcttttactctatctgcctaaataatttctttctatctcctgtatcaataggacctcttgtaggaggactagacgtctaaattatgattctcctattggtacttgtgtgggagtcaagattaccttgtaccttaggcatggcgttgcagggtccttcctactgatgaactggcttttccttcaattaatggattgcaagcctgaaaactagctcagatccagaatttgggcaacggattattactaaattgtgtctatggggctaaattcgaagtgttatcagagctgcctacattccttggctcatggctgcatctgacacccttggttgtctaaacacagacagatactggtgtctagacacagtgactcttgctttaacacaactccctctctttttgagtctcctgcctccctcctccctttatcaggaccctagtgattacactgggactgcctgaataatctaggataatctccccttgtcaagatccttaacttaatcacaaaatccctttgtcatgtaaggtgacatcttcataggtctgggattaggacatggaccttttggggaatggtacacactagactgccttttttcccaaacccatgaacatatatagctgaaaaacctgggattccttgctgaaaggtaattcacagcagcaactttggggaaataaagtattttctaaaatttctgaagttcagataagttcatcagactatagtatctctccccatgatgcctaaggcagagctgtcaagagtttttcccctcgtatgaatgtaacttcacttgtgtgtctaacatgctgggccagagatgaagatcagcatacaataatttgtcctcatctcacaacctcatcttttttttttttctgagacggagtctcgttctgtcgcccaggctggagtgcagtggctcgatcctggctcactgtaagctctgcctcctgggttcacaccattctcctgcctcagcctcccaacgtagctgggataacaggcgcccaccaccacacctggctaattttttgtattttgagtagagactgggtttcaccatgttagccaggatggtcttgatctgctgacctcatgacccgcccacctctgcctcccaaagtgctggcattacaggcgtgagccacagcacccggcctctcgcaacctgatcttctaactctagcctttggctttgatatgagttgccatcagagctggatggagcaggtcagaatccttcaaactcaatgactactgaagaaaagaatgagaaactctgtctagagagacgtaggattgcatacctttgcttaagctagtgtaagcttgattttggaatcagccagtgggaatacttttctgtggctgtaatttttttttttttggtttatgtgtatccgaggttagtttgtttaccagtttatttctgtattcaatgtgtagacatctaataatagcaggtgaatcatctctttggttttcattctgtaacactggagttacatgactgagatttcctttgtttggttgtaggtaaaaattaatggacccaaatgcttaattaaggcagctctaagattaaatgtttatttatgtaatataagaacagcctatatatttcacataggcctagtatatacattttccccttcaaaactcttctatatttattttagaacttttttttctgaatttttcaaatcaggaccaaggggcaaatgttttctcatattaagacagcaacatataaatgtatttttagaaagtaaaaaatatttttaatggtcaaaactaggtaaatggctaggtccttattttaaatgttttggagattaaaggacagagaatattctggactttctcccctgcctgttcagtcaatctcccccttttcccattgatgcgactccactccaagcactgtaaaagagctgggggctataaagataaataagacatagttcctggcataaataagtttagcaaaaaaaaaaaaaaaatcaaaatattaaaaatagtgttaggagtagctgccatttaattaacttgacttaagagctttatgagaataatcttatttaatcttcagtatgttcactgtcctttattcccctatacactgtgttctccctgctctcttaaggagcttagatcccttgcttcatcctcagttcccttgagtttttctctcccttctcagcactcatcttaaagagcccacattcaattccacaccctacctgctccttgcctgcacatatgctactgtaagtggctggaggaacatccacaaccaggcttactggtctctctttaaatttatggtcaccgtttgaagggaatctttactgctgctattaccggaaaggggtctcgatccagaccctaagagagggttcttggatcttgtgcaagaaagaattcagggtgagtccatagagtaatgaaagcaagtgtattaagaaagtaaaggaacaaaagaatggctgctccataaacagagcagccccgaggatctgctggttgcctgtttttatgattctttcttgatgatatgctaaacaaggggtggattattcatgcctcccctttttagaccatctagggtaacttccgacgttgccatggtatttgtaaactgtcatggcgctggtgggagtgtagcagtgaggacgaccaaaggtcactcttgtcgccatcttggttttggtgggatttagccagcttctttagtgcaacctgttttatcaggaaggtctttatgacctgtatcttgtgccgacctcctctctcatcctgtgacttagaatgccttaaccatctgggaatgcagcccagtaggtctcaggtctcggcctcattttacacagctcctattcaagatggagttgctctggttaacacgcctctgacactgccagataatcataccatattttcctagttcctttactgtcctggaaaatgattttcatatgaactcctcctccctctcccaataccttctttcctagatggtcttagctgatggcagaaaaaatagatggagtcagaagacaaattccatgaagtccttcccggaaatatacccagctactggactctgtgcaaagatattctcctcttcagtgactgtggaggaaccagtcttgtttctagctaagggcaagccctccactcaaacaataaatgtcacctgagttgcctattctggaactttcatagagccattgacctacttctctcctgcctcataaagtttcctctcctgactgaatcagcctcattggcataaaactaatcagtgcccaggtaccaattctactctactgagcctttctttggcccatatgttgctctgaaatttttggactgtatcatattagcaaagtgattcttcgccatcttaattcatctgctctgaaatctagaatcaggaaactctaaaaatgcatagagaagcaaatatagatactgtaaaatctacattctaactacatgccctttagttccagaaaagttcttcttcacctatttaatctttctccagatgcaattttaaaaaattcttacattcactcccctaataattattgagcaatttctatggacaaggctctatttcaggcattcagtaaataaacagacacatcacataccctcaaatagcttatattctggtgatggggagaatattcaataataaattaatatgtcatgtggtaaaaagtattatgaagataaagcaggaaagggggctagcaagtgacaggtggtgtaataaggatatgcgttattattatataataagaagaatacgaagtaaactccatgatatttgggacttattattcacctccattgcactaacactgataaaaataatggcacatagtaagcacaaggtaaatattgtgtgaatattttgagaatgaatgaatgaatgaatgaatgaatgagtgatggtgaggaagagaacccagttaggaggttacaataattcaggtgatagccaaatgatggctaaacacaggaagaaactttgcaaatcatgagaggagaccatagtctggatacatttaaaagatagaactggctgggtgcggtggttcatgcctgtaatcccagcactttgggaggctgaggcaagcagatcacatgaggtcaggagttcgagaccagcatggccaacatggtgaaaccccctctctactaaaagtacaaaaattagccaggtgtggtggcagacacctgtaatgccagctactcaggaggatgaggcgggagaattgcttaaacctgggaggcggaggttgctgtgagccgagatcaccccactgcactccagcctgggcaacaagagcgagactctgtctcaaaaaaaaaaaaaaaaaaaaaaaaaatagaatcagtagcatttgctgaaagattgtctgtggagagtaggggcatgattgaaggagagaaatcaaggatggtgccaaacctttcgcctgagcaactggaatggagtacccattgatttaagtgtggaaatctgtggtgtggcaggtgtggtagccaaaattaagtttctttgggactgtaaatcaagtctatttctacatcttcctctccctctttcagtttactgagatacctaaagccaagcactgctgtgtatccaaggaaaaccattcagagtcattctactgtggaaaacatccatactggttccattcttctctctcttggccagacacagaggcatcctgtgttgatggctgcctttcttatggccaaggaaggctttttccttcaaattcatcttagaggctttattttggttcaagaaagtgaaagataattgaaggggatgaaacaaggaaaatagtgtttgttgtacatttctgatgatggcaacagcttgaatcaatttgctgtgtttctgtgtctggctggtcacagcagccggatccagaagaacacattgcaattgccattcagcatggcctcttgcatgcaaacctgacctcaaaaaagcttaaccaagtcttgttatttgaaacaacacacacacacacacacacacacaatcaagtgatcaaaaatatggtataaatctatttagtaaagagtgttctggattataatgatggtaacagaggagataactcagatgtaagaaaggcaaagaaacttgtaaaattaaaaaaaaaggcagcagcagcggtattttttttttaggattgtaaatgtcccctacatatttttgcttttcttgagaaaaatgtgcaagatcctttccagcaagtttggggcagtaaaatctacaggaaagatgcagagagagagagctctgctggtttccatagtatgtagttaattctccttttactctgttctaaatataatcctgctcatttgcatgccaatccccagaatgctttgtaatttcacaactcttggctagtggtctcagcacttacgctttaagaacaaagcaaaatgtttagggcgtgcctttggcccagtctttttattcccccttgtgttttgcaagagtatagggaggtgatctttgcttggcattcatcctcctttgcagagtatcacagaaataaagtggagactgctgtggacttttcttgcgaagactgcattcagtccaattaaccataaataaccagaagcttggattaactcacttgagagggagtgtttaaggggggctttgtgtgtccttggattatgtgaccagtctggttcgtttcgggtttatggaaagcccaagccggagtattctgtattctctttctgtggatgccttatatagtttctttatcgcaagcacgtcttcactttaatgacaagatgtctagaattgccatcagtgggctgccttatggaaacgtgaattcaagattcaacacagctttagtcatgcttagtgacatacaggatttctatttaatagaacattaagattgacaattggggagcggtgggaaaattgtcttcaaagggttttataattttttttgcatagcaagtctttttttggttccttaaattttatgtttggaattatttgtcgtgagagttgaggagctccctcacccccagccaccactcagaccccacccacagtggcctctccaaatatgtctccctttggccgtttgattttagcaggtagctaaaggacaatgtattccatcgccgaagggccatggttttgcttgtaataacatataaaccttcgtctgtcagccctgcctaaagtaaactcgggattgtgagcagtgcacgtggttcattactgatggggagcaatagcagttctactccaaatccatggctgcgcaccaggaacgtgtctgggctactgccttcccactccacaggtgttttctactttttactcacagagcagcattcatgttctttctttgattctgagactcagtcaggcagtggagtttctttaacaagatactacttggatattttttaaatacagggaatggttgagtccactgctaccgtgccccttgcagcctctgagagcgagtcacggctttccattttctaatgtgtatgttccgggtctggggaccccagcaggcccgccaggttgcagagtcggaccagtctccggcgtctgaaggggctgcgccgctgtttaccaccccgcgagcagcagaggcggcgcccagccctcctctcgaacaaaggcgcggccgccgcattcgacccgcgccatggcagaggagagcgggtgccgggagggaagccgggaaccgtctccattctgaaactagggcggggaaggtaggagatccgacgaggagctggctgggggcggcggcgcccgcaactcggccccgcggccgggagggcgtagctgatgctcccacccccgggactcagcctccgctcccgaaaagcccctcgcgccccctggtggctgtggagcagcctgactccgcagcactcgcgaatcagaaaaaaaaaaaaaagaaagaaaaagaaaaagtgggtgaggcagatgcaaagaggaaaatcaatagggataagagagaagagggaggagtcgcagatcagccattcttgtcttatggggtcccagctggcgcagcaaaagaaaaaaaaaaacaaaacccgggcgtgaacgcgggtggaggagggtgtgcgtgggggggcgggggtgaaagggggaccggggagatttactattgtctctggcagccgccgcgggagcccgggaggggggcggaggcgggcggaggcggcggcgcggccagcgcaccattcactccacctgatctcggggcgctgtgcgctgaggaaggcgcgggcgagccggagcagaagaaggagggagggagccagccgctgcagccaccaccgccaccatgtcctaccaaggcaagaagaacatcccgcggatcacggtgagtccgggcgccgctgctccctccctcctcgctcgctccctgtccgctgcgctgcgggcggggtcggctcggatcccgccggcttctctggcctggtccccggggagggacggagacccggggtccgggtggcggagcgcggcggtcagtccagccggcgccacacagactgagcgaccctggggtttggggaaaacaaaacaaagaggaaacccaaacagtggcacggagaactttggattatttatcctcccttcccaccgccggtagttccccaggagcgcggggctcgcggctctcccaggaccactgctccgcctggagtgtcggtttttgccgccccaggttgaggtgtgctttttgtctaaggatccttttggccgtgctgggtttggagagatgacacctttccccaggggtacttggcagcccgaccgcgcccctctcccagctccagccccacggctctgacccctgcgccgcgagggtggcagggtgtctggaccacctgtcctcgccgtgtccccttcttgcctgcgttcagtccgactcatgtttcaatgtatcgtttatgggactggacagctaacgtggctgcagtgggaatgatcaactttatgtgtgtgtgtgtgtgtgtgtgtgtgtgtgtgtgtgtgtgtgtgtgccttcgatgcactttacatttttcatttcttttctccctcacatcaaagaaaaggccgagtttttagagcagattttagtttactgtcgcgggcgcacgctgtatgcatgcagtgttcaacccattgtgtgcaagacggagacaccgcgactggcgggtgtcagatgcgctagggtgtgcctagggcggggtggagaggggacgtgccattatcaggtacagaagccgcgtcttcaccggcgcccagcaaggctgggattccgtggtgatgcgctgtaatgatgcccccaaatagtaggcacatatggcaggctgggatggtcatttacaaaaatagaataaataaaaactaacgttttttagtttagcacgaagcagtgcggttgtgctttgtctatagtgaattggatggtgtgtgtgtgtgtgtgtgtgtgtgtgtgtgtagtgggggaatgggtggctactccatctttgcaagctgaacaaaggaagtgatcagctggcccctgggaggctctgcagccgccctagggcagagctttacctgccacagtagttgatttgcagggtccgccaggttttgttgtgggcatgagtctgtttgcacttgttcccttaggcttggaacatcctgtgcgtttgcgattgagatgcagaaccttcccctctgcaggcaggaagaagcctcccttgcgcctactatgttttattgtcaaatggtttatttcttttgccgcaccatacctttttcatgcaactgagcttcacttcacacaaatgcaccccacccctaccagcttcccagctggtgctggggaagaaacactccccagggagaagagttgaggccagcagggatccttttgcctggtagaggctttgggttttaactgatcctcctttaccactacctgatggcattcactttccattattgaagaaacatcgtgggtcttttacaatgcacagtattgtctagtgctgactgtcttgtctttccaaagagctgtggaaattatcatccaaaaaaagaaagaaagaaagaaaaaagaaaaaaagaaagagaaaaagctgattgggacaaaagctcaatttttacttatctccccaactcaggagattgaaccacagctctcatgctattctatgctggaggtatgccacatgtatctgccacttgctttaacatccagtatatatttgctagttttcctgtttgggataggcagagaaccgatattttttttccctcctagactgcagtggttcttcttctggactcagcctgtgacatgacattgagagccacacccattcttctaggtatcatttaagccacctttaaggaaagataaggaaattcagcattgataacttgccttaggagctccagtaaatgtggttgtgccccaatcccaggaccagatttgcagtggattcccttttgtctctggttgaatgatcttccctggggtacatccttcattttcagtgcggcttccatcctttctctctgtgtgtggggcgtggtgctgcatagcagcctctgccttgaagctggggctgtatctccagcagctgttaacaggagtagacagtggttgtgaatttcttcaaaccaggctgccttgaattcattggttttaacaaccaaggggatgaaaaggaagggcatggcaggaggcggatgttggtctttggggataaggaatccatttgtaaattttctcatgcttcgtttttgcatttccatgaacaaggaatctattttagaataaaatatttatgtatgtttgcatgtctatagaagattatagttgtctatatactgtgaaggttgaggtaccttttctagatatagttgtaaatataacaatgtagacatagatattcatgtgcagcaaatatgattaaagatctaagtataacatataccccctaccatcaattctagtacattttaaaaatggtaacatggaatttgaattgaattttctatgccacctctattcctttctgtgaaggcagccccacccagtagctgaagtgtcactacaatctgaggactagtgggggcagtctttcttggcctggtaccctttgccttcctgggaactactttctaccactgttttgggtccaagataggattggttgtttttgttttgttttgttttttcctccttccacctatttttattgccctcctgagattaaggcattcttactatccttgttttattggtttcctgtggtagggctggaaatgagggggagatttctgtgtccctgttggagttggctcggagtagctacctttctcccgagtagctcccaagacttcagatcttcattgtcccctctcagggcagctatgtggattatctgttctacctcaacacaagccttgcttctaattatcagagactggcagttttgggggttcgacagatcacagcaagggatcttcactgtctcgcgatgggcctggtttacagatacataatgattatcacttaaatggattaattgatttaaaattgttcctaataatagcccatacctgttgagtgtttattttgtcaggtattatgtttttttatgccttacatgccttgtttcgttgaatccttgactcagtcaatactgtctgagagggactatagttacccctattttacaagttaaaaaaatcttagaaaataaaaaataatttgctcagggtcagagatttagtaagtgttggaggccagacttaaacctacatacccaactgaaattaaaatgcatgtccctcaccatcacactctttttggtgtctccgcctctgcctctctaccattgctgttacttgacattggtagggcaaatggtttccagaccatctgcactgctgggaggcatatttttcttgtcactgtcaacaaatcccacaacatggtctttcctaccttttatattaagtacatataagaacacgtttttgaaatagtagtcaccatcaattctacaggtaggaacttttgataagttacagttattgttttcctctgacatacgttacaacttgaagctgaccacaggaatgggccaggtcctaatacttaggcacttaggttccagtgttttatatgtattttcatattagaacctccacagataatcatttcccagttaaggaaggacattgaaatatggttaggtgaagtcagttatttagagttgcctggtgagaatattggggcaaagctagcaatcaaagctaggccttgtccagcttcaaagctgaggctgccatggtgcagcagctgcctcttggaggcacgtgcagctgagatgttgaaagttgtggaaacagctccagaattccctctaggagacaaattatagagaactggtcttttccaaccactgattggatttctgtaaacattgtcttgcagataatgcatttgttttgcattgaaagtttggttgtgtgtgtggtatttgggaattgctggaagacgtatccccagttaggaatacaacttgcaaagttcggtctagggcgtgtagtcagagctctgtgatctcccttgaaagggtgtgattgtgagtgtagtaggtgccactggaatttattttctttttcggagaagtgaagggaccttatgaactggagtaacacccagatctctgcagcagttaagctgggggcctagaactagactagagctagaagaagggacaaatgcaatccgacctttggatctacacattcctcttgcttcaatgggtgtcatttaagaattagaggaaaatattaggagatggagaactagagttgaggaaaccaaaagaagaggagtcacagaaaaccagctctctctgtgcaaggcatcttgaaaggggaattccagagtcaaagacagaagaaaaatagcaaacacttaagaatggaaagcatcttagatatctgatcatggaagtctcagcccagtctcagccctgcctaaagtgttcatttgttattttaaattttgagcaggtatgtgctgattcttagccaggttattccttttcctcaaatactaggagaaggcctcaggtatagaaagagccctgaacattagtagctgtgaccaagccagctgggcattgggaggaattctgaagaaatagatttcctgagagaattcaagtctatgtggcaagaccctcagtttgtaaataaaaaaccttcctgcttattgcactgagctactaagaggctcaaatagtggccatgaaagtggtctgtgaactctggatgtgttcaagagagcagatgctgatttatatttataaaatctcaactactttggaatgtggaaattaataaaagaagacttgacaatggtctggtttagaaagagactacttaggaaatgattttgtaaaaataagagttttccaaaacaaaaataaacagcgttatataaaaacttttttgttgttgtttagttacgttacagtgttcctaagaattttatgcttgtcatctctgacagtccgacacaggccattagaccgcctttgaacttttgatacagagactctcccttaacctgaatagagggcattttcctaaattaattgaactctgtatcattttttagtcctgatcaccttctagcctagagtgacacatgttatgaagatcctttcagctgtttcttcataactcgttttttagtggcttgactgctcttttttcttcagttggaaaaaaataaaactaaatttgaaaagaacaacaaccaaaagaaaaaaaaacccctcctgtcctaatgggccctctgttctttacctattgacatattttatagggccatttgtgtttgcttattacatttgaaaaacggcaaaatgtttacagtagtaggaatgagtctctaaggtgtaaatgttttcatcctttgatgaaatcagtgcatctaatcagaaggagacaggaaatttgaatatgtcattacctcttgtgatggatatatgtgtttgtttgtttgtcttttgttttttgagacggaggtttgctcttgttgcccaggctggagtgcagtggcgcgatctcagctcacggcaacctccgcctcctgagtagctgggattacagacatgtgccaccatgcccagctgattttgtatttttagtagagacagggtttctccatgttggtcaggctggtctcgaactcccgacctcaggtgatccacctgcctcagcctcccaaagtgctgggattacaggcgtgagccaccgcacctggcctgtgatggatgttaataggagaggcgaactgctccctggttactccctcctcaaatcaatgctcaactttgccttttctcccactttctctaggcaaatgagaaacaaataagaaagaccttggaaaacccagagaaatcgactcctgtattttcagactccttttgctgtgaagtccctctttcatcaacatatgcctatttcaatatacgaaacacaggtatcctcccatccctcaaaaaaagccaaagctagtttggtggaatagaatgaacctctcaatttggcctcttcttttggttccagtccctacatgaagcccagtataaaaactacttttcttgaggaactttcttctgttaattagattgtagggaacacagtggtaagaaatatgggactaagcatggtggagctattattgttaactgtcttagtaaaagctacatggattatctcatttaactcacagcaactcttatagctacagttattaaccatcattttgcattctggagagaggctcagagaaactaagtaatttggctaaagtcacagagctgaaaaagcaagatcctgggattgatccctgcaaaggtgaattcgtttcataggcaagaaagcagtagttccataggcacaggtgactacctcctcccgccattagccattatctccagctgtccacacctgttagctcctaaatgtgggtcagtattcacagggtggaaggattggggatggtctggccaaccctgtcacatcactattggaacaacaagtgagttgtgtgtcctcttgacagtggttcatgcattgcttctgccagctgtctgagttagcttctggcttttgcccaggagcatgtatgagtacagggtggaaaagcagatgctgtttttctgccttgcttcagagcagatctgggtctaaggccctttctcactctctatccctgtcttcttcccagacatagccaggctgtctgtttcccttcagtcacgcggagaaacattaacaggacacacccagcactttaagctagatggggaagctccacagtagaatggtccaggaacccatttggaacatctggaattcaaggacaacatttctcatggcctaattactatttcttttctctggaagtgctggacaatgagattttaagggtaaaacgagattttattttttaagagaagagttcctcggactagaagagcaaaagaaccatcttgttcttggatgcggaataaggaagcgaaccctggagggagtatcagcacactgtgcttcaggcctgcctttgcctctaatttacttgtcactttgggcaaacccttattatccctctcagattctgcatcagtaaaatgagggcattgaaccagatgatccttgaggtccctgccagtgcaaatgaccctgtgagccagcccctcctcactttgttccaaattcacagagaggagttctaaggccttcctgtgagggaaaagagagtagggagaaagtggatgagagcgaccattgttggctgaaactcagagggaccagccaacatctgtgttggatataagcggctttggttgctttttacacttaaaatcccagtctttttctcattcagggagtagacttaattaatagattttgtgcagaggagaaatggaataatgatgactgagatcctctgcctagtagagcgttagtattaattcagatgaacattattaaagtgatatcatgattcatttgctgtcacatacagtctttctttaggataaggctactattgataagggcatgaaggcgataattgcccaaaatctagactggccaaacaaacaagaaaacaaaccaaaaacaactcggagtctgtatctgctcaccaggctcttttttcagctgctcttgctaatattttaaatatgatggctgccatccaatggaaataatctacccccaaaggcccaatcatgccatgtacatgccatgaggatagggatggtttttgttttgttaccactgaatctccagcacttaatctttggttgtcacatattaggccctctgtatttgctgaatgagtggatatatttaacacttacctacaggaatgatttcaagagagaagatcacctgaaagtgtaccaatttgttcttgtacataagcttccctttgacatctttctagaatattaacttctaaataaggccagactcttaaggcataggatcactgggccaagagaaacatgacagctctttagcagaacaagcaagtcattgtaatgcagggcctgacctgggcacatgtgccagaaagtccatccatcacttggacttctttcttgtctggcctccagtcctctttttcttccagcttctgcatctgggctcattctgagcttgtttcaggggcctacctggatacttattgcctgcaacaaagacatcatttctcttactgcaaatgatttgaaagaattaatgcagacctttatgtcgtctttcatatagaggaaactgtcaccatgactctttgaaccagaatacaacatagatcttaattgaggtctctttctgcctttgcacgtaaactacaaagtcattagagttattagcagcaactagatagaccaatctgcatttgtaaagcaaacttggtattttggaagtattggttaagaagcagctcatagttctttttgtttccctattagggctggacatttacatggaatggttttgtgtctgtgtgtttcaaaagatttttagtctcttaccccactgcacctgtcagctttctctgagctacatttggagctattcttattactcgtttttattctaaatgtaattctttggtttgaggggtggggccagttaacacagattttaccaggcttatctctgggtacaaaccagagagtttatggtttcaataggtttatgtgtaatggtaatcactagagccttttaaagggaggacaaaatgggagaatcaaagtatattcatggaaccaaaaacctttgattagaaagtgtttgaagaactatgtgtgttataagagtgtcatatataatataatcaggtatgataaaagcattttgctattttttattgcataaaagatatttattgaccataagctctggcaaaagttagtttaataataagaataattcacatttattgtaccctgtgtaaagtgctttttattcattatctcacttaattatcaaaacaacttaattaggtagatagatttttcaccaggtctttctttccattttattgatgaggaaatttagagagattaagtaatttgcctaatatcacacaaggcttaaatgatggaaccaaaattcaaacttaagtttatgtgacttagagcccccattcttaaccccacggtatggtgctaccttaaattatccctccggagggataataacttatccctctcccacctctggagtcacaagactttgattccaattggagttcacttacttcaagtccaggggtaagtccttctctgcacctgtttcctataaggtatgagtggtgtaggttatgggggacatggaaaacagttggtgcccctcttctgcaagggggatggactccttagcactgcttggcatcaggaagccctctagccctcctgttaagagcggctttgtttctggcatgtccaaagctgctccacactgttatacttacacaaacaacttgccagggagattcccaccactctcagcatctttgcattgaattagcaaaactaccaattagggattcttcctaacgtgaatttaaatgccaccttctcatttcatactccacactgcatgccccattctcttaaatatatcttaagtaagattcttttgaggtttgacttactatggctctgtaaaattcatactttcagagtctccatggagataacttttttctttatctctccttaaaaaaaaaaaaacgggatacatgtgcagaacgtgcaggtttgttacataggtatacatgtgccgtggtggttggctgcacctattgacccatcctctgagttccctcccatcacccccccaacccccaacaggccctggtgtgtgttgttctcctctctgtgtccatgtgttctcaatgttcaactctcacttataagtgagaacatgcggtgtctggttttctgttcctgtgttagcttgctgagaacgatggcttctagcttcatccatgtccctgcaaaggacatgatctcattcctttttatggctgcatagtattccatggtgtatatgtaccacatattctttatccagtctatcattggttctatgtctttgctattgtaaatagtgctgcaataaacatacgtgtgcatgtgtctttatagtaggatgatttatatttctttgggtatatacccagtaatgggattgctgggtcaatattttttttaagtctaatgccccatcttatgaataataaaaccaacacccaagtggtacccacctaattagtgtttttgctactatctgttttactgtgggacacaaggattttaaaattaactaaggctttttttccattacaaaataagtatgctggttgtagaaaaatttaccaaaatcacaaacaataaggacaataaaaataagctacaatgaaattactcagagagaaccactgtaaactttcagtatacccatctagatttttttttttgactatatttgccatttattaaaatgattccacatattgtttacgctgttttatgccttacttttcattgcacaatatattacgacatctttccatgttttaaatatccttccataatttaatttttaatagctatatattattacattccttggaaaatctagttaaatgaatctcattttttttgcattgttttgattttttccgagatctttgcattaacaacaaaaatgaaatgacagatttattgtcggttgttttttagttgaagccaaactaaaaactgcctcaggatgagaggttgagtaatcttcccgaagtcactcagctcacgagtatcagactacagattgaaatcccagtgtctttactcttagccttatattcttgtcaccactcattccttcattagttgtgccattttacatggaaaactctgctttctctcatttcctcccgctcttgaatgagcacatttgttttctcaccgccacctttgccttcctccctgtcttgctgaggctgttgacatttgtagaggtacactgtgtcttgggacctgaagctacgcagctggagaggaaacatggccagttcttccccactccttactggctcaacctataagcttggaagctggttttaattttacattttctgtgtgtatgtgtgtttgtttttaaaacttttttccacttaattctttcaaggagacctttatttgaaatcatgcactttttcccgcaaagcgaatctgtgcctcaaatcttgatgagattactttgtttggggatattgataaattcatagtggggtttttggtttatccaattaaattggtttaaattatggccttatagagagaaagggcctcagaaaacttagagggttttaaggcaattgaatataatctgcttctagggacttcatcctgggtttattccacaaagaaggtatgttctgtttgtttccttttcatttcacttacttcattgcatgctctatctcagaaccctttttgctatgagaaattgtgggaaaaaacagccttgcttggctaggggcaggaagagaaaagggacctgttattccaaccccttcatttgaatgattgagaaaatgtggatcaaaaagggaaaataatttgccaaggtcatacggtaaaataggtttaaaaaagtatgaggcataggactcatttttccttgctcttctgataacttttgttatgagaagttatagtgcttttctcgtaattttgttgaggaaggcagagagtgagggggagagtgaattatgtcccctacccagtaattaaagtcttaaccctcagtaccttacaacatgactgtattggaggcagggtcttcagagaggtaattaagttaaatgaggtcattaggatgggccctaatccactctgactggggagttttataagaagaatagattaggacacagacacgcacagagggaagaccatgtgaggacacaaggattaggggagtttgatctatataccaaggagagaggattcagaagaaaccaagcctgctgacaccctgatctcagacttctagcattcataactttgggaagataagtttctgttgttaaaaccatcagcctgtggtactttgttatggcagccctagcagagtcataaagggagaaagtgaagaacaaagaatgaaaaaattaaaaacttaaaacttgagaagttctcagagagcagaaaagggagccccaaataaaatttataagaaattatggcaggccagagcccatgctaactgattttcaaccataattgtgtatatggcatttcattcaattctattaccatgccgagatcatagttattattaacccactttacaaatggggaaattgaagctcagaaagttaatttacctcaagttacatcattattaactaactggcagaactaagtccaaattcacctcttgtcagccttgaaaaccctcacttactgtactgttctatctccttttaagaaggttaatgtaagctgcttaggaaacattacttatcaagttatttaatgttaggagaaataaaaaaatgtactccaaagtctcagtgacctggaatccacttaattgattagacaggaaatatttggcccctgattttaggataaaaagagagattggggaaatttaaaaagatagcataattagatttcagtacagtcttccccatggctgcactttcacatgtctaaatgaacagctacacataatgaagaattaatgttcatagtgatgtgccgtgggccgtgaagacatctgatccatcagagagaatcaacaactgtcactaggttgcatttgctaaagcaggaaaccagatccataaatctataacatgaggagacttggaagctgtctatgtcagagttttacaaagacataatttcagtgattagatagataaatatgcaatcaatccaaaagaataatcaaaataacctgagctgctggtaaacccagatgttatgttttttgtttttatttttgaggtggagtctcactctgtcacccaggctggagtgtagtggcgtgatctaggctcactgcaagctccgcctcccaggttcatgccattctcctgcctcagcctcccgagtagctgggactacaggcgcctgtcaccatgcctggctaatttttttgtatttttagtagagacggggtttcacagtgttagccaggatgggctcgatctcctgacctcgtgatctgcctgcctcggcctcccaaagtgctgggattacaggcgtgagccgctgtgcctggcccacccagatgttataatatgggaactatgaagcactttcaatattgaatgcagatggctctgtcgaagctgccttctcactgttttaaagttgtgaagtctatcaatcctgaaatatatagattaaatttacttggatatttagtaatgacacagtcaaggtaagaggtggacaggcattgttttcaacagatactgggatcgagtcccagctaactgtatattagctgtgcatatttgttggttctacctttagagtagaatattaagccaaccacttctcaccatttttcatcactgtcatcaccctcactcaagcctctgtcatcttactccaagaactcttctaacttttctctgtggtttcactttgcctacccctaaattcgttctctattcatgataaccaggtggtcctctaaaaatgtaaatcaaaccaagtcactcccctgctcaaatatctcctattacacctcaactaaaacccagaccatggctcttgaggtcccatgtggagtggccctgcctacttctctggtctccagtcctgccactgactgtcagtgactcagcatcagccatcctcccattatgacactttcatgtccagctcaaagcttctgtacttgttgtttttttttttctccctaggactcagattattcacatctgttcaggagacagctccttagacatgccctctttgaaaatgtaaccaaatgtcccagactctcttcccagcctccaccgtccccttatcctttttctaaatttcacttatcactgttgaaattacgctatttatttagtaacttacttattctttgcactttcagccactgcagtgccttattttattttgttcactattgtatcaatagtactgtgaacaggaggcatttacaaatattagatgaaggaatgaatgaattaatttagactaatgtttctttccctgggttaagtggtttggcgagaacagttgtcaaggaaacagggttatcaaaaggctgttagtctgtctgctccatgatcctagggactctgtgtcataccccactgtatcaccaaaacctagctcagtctacccctgaatgaatggaatgataaatgaaagatgaagacttggggcaacaggggaagagtgataacacataggtgaaaactggctgtgtctgagatgactgacaaagatgataacttgtttgctattttttggacaaaatttaatacatgttacaacatacatcttgctttgatagacataaaacatgtaactgtaaacttcagtctgaaacatttctgagcagagacacatcacaaaagagtagactattccaaaagaagattattcacctgttgttagactcatagaatgttaaatagtgatcattgggaagagaagtgggcagctttatggctttgcaggtaagggatgaagtcttggaggttctaagcacagagaatgtattcccataatgttaacatggtctttgccgatagtaagcggtcttgaatacattccaggaggtgcctagtatgagtaaagccttagatctttattgaaggcgaagaaaccttttgttctaggattaactacccacttgtctctgatttttgagttctgataatttttaagtggtgtctcgtttgtatttagttcaagtgtttgtttcattcaaggtctgcctgacctcttgaagtccttgttctcagagcatctgcagttttatctatcaatacaacttgaagaagttcagggccaaagaatcaaaaatagcctctgctttgataaccacctctctatccaatgaaagcagagttgcgggtgtataggtttttagacagacagatggaagcctgtaaccaagaaaatcagtcatcaccattgtctgctttgtcaagaaggaaccagaaaaaaagagcgaactcttccctttctttccttacccatattcttttatagaaggtgtgtttgggttgttgtagaaaggtagttaagatatgtggtatgaatcaaaccaacctaaaaagaaatgaaaagtcaagttacttttcagggataaaggagagggaaggtaggcactaggtggaaggctttgacctgagaagatttagggagattctagcttctaaaggaactcacatttattgagaatctgggcttcatcctcacagcattcctttgaaaaagatattattttcctcgctttacagtcaggactccaaagcccttctctttcccaccattccatcaggctaactggcactgattcatcacttgaattcttggactgctttaacaatgaggaccctctttgcactcctgtatgatagacctaatctttgaggtctggactacaaggcagagcaaactggaagacatctgtggtctttgagacaattccttccttccacactctccatggggccctcttcatggccgcctggtgtgactggagcaccacagctgagtgttctgttagacttgcacaccacggacagttttaggaagttacataagccagtggttgtgtgcttatgaccacaatccccaagaagctcccacaagctttaaaaatacaatgtcagacttgaagaagaatccctgtggcctccacaaatagatggggagctattgcctgtcatttgaaggtgcttctcacacattccaaggcctgagcccgcattcctcctctgggagttgcattttggcgggctttcagatttggtgaaaaggtttcttgtttctgagaagcaatagggtgggaattcactcgacgtctttgtcattgtaaaggccctgtcaaagccagctgtcagtcagaaaagatgaaaagagagagctgcttcttaagagggagctgggtaccattaacggcacagcctcttggaaaggcgaaggggatcacagaactttgaccggaatccttggctcccgactcccattctagggatctttccacccttcttttctgcctttcagttggcacagccattttcagcgtggcattaactcaagcccgtccactaacacctgacctttctcttaaatcccaggccaccatttcagtgacctgctacattgctgtatggttgaccagtacctcaaaattattcttagtcttacacttcaattttgttagtcctttttctgtttcctgtgtctattaatgggtcctctgtagacatgctgctttaaaactcagtctggtttggcacgtctgcatctgcgtcactttcccttcctcttcagttacttagttgattgacactttcttctgcagtatgccattgcattttctaatccatattcttcctgtcacactggaccacagcaattaccacattcttttacttttttataattttctttattaagttccttttaaaagttataaagtacattacgcatatgcaactagagaaataatgtaaataaatagaagagagagaagaaaaagtttaaaaggacccctacaacctctctctgcatcctttccttctacaacatccaatgttaataatatgatgtgcatccttctggaactttcttccagatcagctcacacaaaaatataataaacatatttacatacagcattttttgtttgctttgacaagaactacatcatattttgcatattgctccagaacttacttattttagatatttcttcagttcatgatatagatttaaaggtggccataataatcataatccatatttgtggtgatatcatagtttattaaatcacatcccattgttggctattcagggcctgggctgggtatttcctgcttgcatccccagatatcctctccacctttgtctaccctgctccatactccgtgtatggtgtgccttagttggtttctttgcccttgggcttctggttgcatttagctcttagggcaccaataggagattagagggagagtgaacaatgaagtcggggtattttcccctgattccttcctatcactaggtcattgtggggcagctgcatgtctctgctgaaggttacggctcctgccaggcagccctctccatacagctacagtctccacttccaataaccactccctcccctttccctcttctggccttggcaatggctccctgatgctggtaggccctggatgctgcatatccatttatttgccctaaacactgcccacactttgttaagtaatttctttgttaaattctccttaataacttcttaataattttatctgtttcctgctggcacccagcatgctaaaggtcttttcttattttgttttgttttttttccccctgccacttgctgtttctaagtttttccttcctttatctccagcatgggcctctgtcagcttgattttttgaccctatgattgactattttacttattttttgaagatccttctagggctactacatagtaaaggtcaaacttcctagttggcagccgtttgcatcccttattccagtatcttaagctttggaagaaggagggtgcctaactccacaatctcttatagagatgcatttcttgcatcgataccattggttctcccaatgattggttgtgtaatattggaccatgagctaacctccctaagcttccatgtcttcatcaatgcaataggaatgacagtagcatataattcatagcacttgaagattgattgaacaacatgtacttaaagcttctacctgttttcagcaaataagaagttttcagtaaatggtaattatgaattattgtaacacgctgtgatcataattgccgttggccatacccacgtgtacaaatcagctatttaccttagattcacttaggcaaggcctctgtggatcctttaatctctgccagacaaaagatttttctgcctgcctctctcctctctctctctcttccccccacctttcttaattaatagactttgttttttagagaagttttaggcttacagaaaaattgtgcacaaagtacagagagctcccatagactctttctcactccctcctcacccccaagtttcctctcttattaacaccttacattggtgtggtatgcttgttacaatagatgaaccaatattgatacattgaagagagtccagtttacattagaactcactcattgttgagtagttctacgggtcttaacaaatgaaaaatgtcatgtgtctatcattgcagtatcgtctaggacagtttcactgctctgagccacttcagtgctccgcttactcaccagttcatcccctccctgttcccctaccccccgccccaactggtaaccactgatcattttactgtctttctatagttttactcttcgtcattttaggtcacattactatttgcgatcctggcttacttttctaactgttttatctttacttctctattcaccttctgtattcaacttcatggctagtagttacactagcatatgtttcaggaatgaattattaaactcgtttacccttagaataaagacttaggttgaatttaggcacttcttcctgatggaataggcatttggcttttgcacaggcccaggggctcaagggacaagagatcctgtttgattgaagctggatgtcacttctctagtccgcatatgtaagagagcttccacccatggcacgtgtatttgaggcctaaaaaggaacaatgcaaagcaaaacaaacaagtaataaaacacaaaactatcatataaatccagaccaaagagggacatgaattagctctctaaagcactgacttggctttaatctgtactggactttatactctggtcctgagctacagatttctcaagcagcttgtataaaatggtaatagctgccttgtatttgtactgtaatttggatttgattttaacagtacatcgatattacaagagcagtagaatagaagttgtagcaaggtggtaggagcagtagtaatatgtgtaatacctaccacttaggagtcttttttttttttttgagacggagttttgctctgtcaccaggctggagtgcagtggtgcaatctcagctcactgcaacctctgactccctggttcaagcgattctcctgcctcagcctcctgagtagctgggattacagggatgccaccacgcccagttaatttttgtatttttagtagagacggggtttcaccatgttggccaggatggtctcgatctcctgacctcgtgatccgcccgccttggccgcccagagtgctgggattacaggcgtgagccactgcgcctggccaggagtcttttgtgagtaccaaccctgcatcatgtctttaactctcacagtagccctgtgaggtaagcattattatctatactttacagatatataaatgtacctttttagaaagatttaccttcactcagctgaagaagctgaggcacaaagaagcatcaagttagttgcctaaaaatcacagaataacttaatggcagagatgctaatgtagccctggcttctggactccctcagttgctacctacagttctgggggtagcttcaaaaactgctattaggctggttttcttcccaggcaggaacctttctattttttccaaccaaaagcccagttaaagatttgccatatgtcttcacttacccatatctggtttcctgttttctgataaggcatctttgttcctacacctgaccctaccccaccctgcctctttccccatccacccaagcttcggacccagagcatggtccccagtaatctcatccttctactgtactgcctgatgtgggtggtccccgtcactctactttgagtcctactcttgcttctcacaggcccatgtggacacatatggacctatacttcaatagcagagatggttccagctgtttcataagatcattttagggggttgtggaagaaggcattaaataacatggaatcacataatgacaaattttgtcccttttctagttctttttcaaatcttctgagtagatcaaggaaaaagtctccgtttactactagtttctcattaacatctccctgatccgtgataatcttcctttttaacaaaataacagatccaagatcatcctttagagccctctcgaaggcagcagaatgtagacaaaatttagtgatgtttttattgtattcattcctaggttcactgtttagttttggcaagtaatactagtttagaatttatgagactaagatagtgttttcttttaaaatacatttatataaggataatattaagcaaataacagcacagtttattgcaggctgtgtcagatatcatgcaggtagtgcacaaatgactgaggtttgagctacacagacccagctgacctttctcgttgagaatggaatctctctagggctcctcttgtccagtgctgtccctctcctccacattctcttgcttctggcgtgttatctatttgtacttatctgtgtctggaacgctgttgaagattaacagaccattatcgggagctaggattagggtgctccccacagtccattcccccatccactgtgacccagggcaggccacatcacttgtcaggccctttgataatgacatctttaaaatggttaacatgaagttctggggagggaagaatgcacatagctggctttgattctccagttcagacaacagagcagccactctgccctgattaatgctgccctgggctactgctgcctccacattgctgtttttcctaccttgtgtctgtccgtctagggctaaaccaaagataataaagaaagtgaagacagtgctttccatgtgttatgtattctgcttcgtgggttgcattttgaagggagtgccccaggttgacctacttccagcacacctcagtggtcattaagtatgtttaggtgatgaggaaagggaggagtgtttgagactctcatctgtagcagttcagaggtttggaatagccaaccctggtaaactatgcccaatttcaatgaagactcggagccaagaaactgcattgctcctcaagatgtctatcttctcccaggcctttctgtttgtctcaatggcatgcttgtcatcgagggtcctagaaacacacccatgtactggagggagcgtgggtgggaggcagctttaagaccttactgccctctctacagtcctgctggaagagtgtagattgttatctcctcacaagggcttatttccagaggaaaaatgacctggaggggccatgggaacttgccctgtggggttgggtttaaaaggggaagtcttggctgaccttggctgctggtggcaggagctgagaacagttgctgaggcttagctggggactggcgtctctggaattccctttatggcaaggtctgttatattttgattaacaaagtgttagttcagtccttcttgagtatttgtgagagaggagttttacaatggctggttataattgtaagaaataataatgatgatggtagctcacacatattgagcatttatagtgtgccaagcagagttcaaccctttatatatagtatgccccacaatccttgtttgcaccctcagaaaaaggtatcattgtccccattgttcactgatgaggtaactgaagcccacccagagaggtgaagtcatttatccaaacacgggtagtgttggtgctagaagtcaagctcatgtctgcatgtctcacccaaggcaacatatttaataacagagccaggatgagaacttgagtctcctgagagcatatttagtaccttttcctaaataccaccttgagtcaactggactatcttagaatgtctggtttttcctctcttcttgaactgatgctgctttggggaagaaaaacaagatttcatccatgcagtctatccatcctgatgttttcttaagagtgaaagtgttttaggaaatcaaatctaattgcccaaatgggaatttattttaaataaccacctgcaccttcatctggattttaaaaggatcttgaatccccactgagaaggtcacagtctgtgctttgttaatgcaggtaacaaaatatttgattttgggagtctcatccttcattttatatcctctttataggattatagtttttactctgagctgctggaatgtctgcggagtgtggaacagatgtgtcttaagcgctgttctcagtctgactttattgactgggaagaagtccatggagggctttggtttctctgagaggcatgttctcattacctcagatagacaaaggtggtaatttatgttctctaagttgaagactaggggaggaaaactaaaatggagaccaacatctctagtaggcttttagctcaagattctgtcttttcattccctattttactttgcatctgtcattcttaacattccttatagcatttattacatcttccagttctctctccccgccctttcctctctttctccttttctccctcctttccttcctttcttttttctttttccttttttttctttttttttttttttgagaccgagtctcactctgttgcctaggccggagtgcaatggtgcgatcttggctcactgcaatctctgcctcccaggttcaagtgattctcctgcctcaacctcccaagtagctgggattacagacgcctgccatgatgcctggctattttttttctttttctttttgtatttttagtagatacagggtttcaccatgttggccaggctgctctcgaactcctgacctcaggtgacccacccgcctcggcctcccaaaatgctgggattacaggcgtgagccgccacacctggcccccatccttcttttttcttccctcctttcctccctcccttcctccctacctttttccctccctctcttttgctttctctctctctttttacttccttcctttattcatttctttgttcctctctctttcattctccttctcccgcactgagttttttatggttagttttcctaatcagtatcataccctagtgaaggaaaagatgttagacttatatcacactttaaagtcctgtgccaagctggattgcaaagtagatccctttataaactacattaacacattcaggccattaaggggcaggtgtattgcactgattttatcagtagtggcttgaaagttactgaattcctaaagctacctacctgagagaactggacgcagtttggacactggaacgaattcagtatcaaatagagaagagagccctgtcagaaagagctgcttgtcataaggtttaaagacacttggtacggtgtcctaggagaaatcagtgatgtgccaggagatgggagacatgggtttacttcaaattggaactaatctactctgtcatttggagaaggtcactcacctctctgtatatatctccccatttggaaaatagaaatagtctctcaccaacatacttaaggcttaaaaacattcaaagtattataaataatattaatggaataaatgtaatatttattagctatttacttgtgtgctagattatacacgcacacacacacgcacactggcagccaccctgtgatgtgagctaagtattactatccactctgggctgatgaaaaaaaacgatgctctgagaggttaagtcccaactcaagatcacacacgtagttaagtggtgtgtctgattctcccagcagtggcaaaacctagctggacccaaacttgccagctggtatgcctagaaccctgctgggctgcaagacagtgacacacgtagctcttggtagctgtgcagggcctaaggcaggtcagtggcgggttgcttcaggctctgaatacgttcattttgggttccagaaacccttcagattaccacagcatgccctagtggtatcatcattctttatatatatacataattacattagaaagattgctaactttgtagacaagaccatttaacctcctcagacatcagctcatggacgcttggcagtcttggctgccaggaacagaaggtgaagaggcccactgagccatattcatcactgagggaacttttattttattttattttaagttctgggatacatgtacgggatgcacaggtttgttacataggtaaacatgtgccatggtggtttgctgcatctatcaacccatcacctaggtattaagcccagcatgcattagctatttatcctgatgctctccctcctccccgcaccccacccaccgtgacgggccccagtgtgtgttgttttcctccctgtgtccatgtgttctcattgtatgtagtgtttgattttctattcctgtgttagtttgctaaggataatggcttccagctccatccatgtccctgccaaggagagagcaacttttaatcagagatgttgggtttgttcattttgttggcttttgatcttagcatgtgttaatctatcaggctcatccatgaattcatagacaaacacttttttgtgtccagtggggtttgattttatgtgacctgggggtggtcagtggttatgtcataccccacgctcacattccccagtgccaagcctaagaattgcctttcagattcctctttgttgatgactgatttgcctaggccgccatttatagtggatcccccttccatggaaagagttaaaattggggaggatagcagggcaagctgaagacccatagaggaagcatttatttgagctctttaagttcaggttttgatatttttgctctgcatggtgaaaacaaattaataatgttaatatttgtagcccatggagaaaactcttcttaatctcttctctgaaacctacaccaggcctatgattcatctttgggctctgtttagattcctgattattgagccagaaagattttatttaattactatttgaaaagtttccaatgacaccatctcaatggtgttaattccacttggatcagtgcttactatccccctgatgttcacaggtctggatatagcatttgcccctttgctgacatttcatgcttgttgaagggagtgatgatcacaccagtggctcagggctgcgtgtccttaggctggtcatatttcataactggtctcagttcagacagaaactggcccctttccaaaacccagtttagttcagttctttgctgggaagatgaagaaaatcaggaaagcattgagttatgagagggagggtactcttacagttaccaagattgttattattatgaagttcctgttgaagatgttctgtcaccttcctggacacacatagaactgtggggtggggttgggggcaggcaggagggcagtggttccttgtgctggtctgtgacttggtactgggctgcctgatggctgcataaggagcttataaaatgcagatttggtgatgtagagcacagcctgggaatatgtatttttctaatgtgtacacactagtttggaagcacagacctaggactgcctcatataattttgcagtactgttaaaatagtatatcacaaagccatcatttattttctcaaaactctaatttttggccgcttcccacaatattctgacccagacacctttacatcatgtggatataatacaacctcctgtgtcccacccttcacctattcattcaaccaatatggaatagctgtctaggatgagctccaggaactaaggtagaaatatcaaaagatacattgttccaggactaaaggagtctttggtttagtcaggagatagcttgagtaataaataaatcagctacagtagaacattgttatttttccaactaacttgcagtgggagcaggtgaaatttgctggaaggtcaggtcacacatcgtggaggaaaagccctttggagccttgacaaaggagatgactgctagatgccaggtgattatatgagaaggcagagagaacatttttgtaaatgcctagtggacagagagcctgataatgtgacaagaactgcatgttctgtcattttaaaatataggccacacatgatagaaatgagggtggacatattaacagaccagatcatgaggggcttgtatatcatgtgtggtggacctttgtatttgacctcataggcatatcttccttgccacatatgtagtttgttttggaacacttcattgatctgtatctttaaaaaaataatttcccctgacaatatgatatgatgaaatttcttcttatgcaataccttagaagagcagaggaagctaggtggtaattttctgtatcccagatggggcctaccttcaaatctcattctctggccctttcatttctgaagccagaagtcagctggttttggggctccgtcctccataaactttatatcctctttgaaagctgacgttctcaaacaggggctacagaatcagcatcaagggaatgatgaccatggttggccctgcatatgatgtctccctgcccttgaccccttaatcagtgactcttaatcctcatagtcaaatagccatggagaacattggccctgagcagtgcattctagagctgacttctcaacacaggtcttcacccctctgcttgcaatcctgacatatgtctcagtgtattttcattcaaactcaaactcttaccaaacccagcatgagtagcctgcctacctccccaacctgatttaatgccactttcttccttgaaccctaagctccttccacattgagctttttcaggttttcagagaaacaaaacttagtcctacctccaggcttgtgcacatgctattccttctacctagagaagttcttcacctccacctccatctaaattgctcttccctgaaaagacattttccagcctctaaacaagcccactcccctgtattttgtgacacgtaatataattttagattgcttgatttgttttgtttactttatttctctattgccagactttccctttaagctccataaaatcaatgacctgggaatgaatggatggatgaatggatggatggatggatggatggatggatggatggatggatggttggagttgaaatatctttgtgaagctgaattcttcacaaagtccaccctctcattctttattcatgctgtagctacactcagccagactcctgggaattgttttctcctccatgaacccaacaaagcttaatccatccctcatactccagcctaagctccattcatttaatgaaacttgtgatctgtcaggttgacactgatttgtccctctcctgacttatatataaagtatatatttactttgttaataacttcattaactttgttaataacttgcattgtttcctgtcgggtaactcaaatttcatctaagttatagtttttaaaaaggctttatttttctcataattaaagcaataaagaaatgcactcagaaaatgtgaggaatattgagtataatgagataaatataaatcctgcataatttctccactgtaagttaaatactatagatactttgccttttccccttctagcggttttattacacattttacaacattgtgtgtacttgtgcatacatttgtaagtatcctgaattttagacataaccatgatctgagcatgccctcgtgtaattgcaaatacttctaaaagcttctttccttgtacgcctaaccataagttctatttttgagaatcaccattgagtgtcaacagagtactagagagtgcactagccactgaggcatatgttatcccactttaaatatttagtgcctactgaatcagaaaatataatataaaggatgtctcccttacttgagtagatatgtttccaggtggctataatattaatacattgcagaagcaagaggtgaaaccctagaataatttgaattaagggcaaacaagaaagaccggatccccaacaaatacacctactttaaatgttgagtgcattgagcacacatatgtctttggtaaatgtgtttctactagacatctagaacaatgaattgggaaaaccttggcagatcactcttctctgaaatcatacctgtgataacaactcatgttttccttcttttctagagtgaccgtctccttatcaagggaggcagaatcgtcaatgatgatcagtccttttatgctgatatttacatggaagatggcttaataaagtatgtatatggaattcttctctttattgttttgcacttcctccttcattaatggctcataaaggaggttggattacatgaatgtagtgaaaaaaatcttaatttaatcaacagaatgaagtgagatactgagggcaaatttgggcagaaagtattgatgagcattctacgggtcatggaaaagtggaagatgtggccatcatccttaaggatactggaaaatgtgcacaaattacagcaccctaaaaatataaggctttgtgcaataggtatcaaaggagttgaagtcgggataagtgatttagaagtacaaagaagaagaaatttatttagaagtaatgctttggggtagagagagtatttaatctgaaccttgacttaaggataggacttagatgggcagagcacagataggacatagatttcatgcaagatttgcaaataaattcattagggatgtataattacattctaaaatgtatactattggatgcctgtaagtggcacagccaggtaagttttatgtgtaggtttcctacatagtgaactttaaaagaagatttgatttacatagtgtttcatcacaaaaaacaaagtacactaccctgcaaagatgttgtaaaagactgggtgtatccaacccattctattagccctgtctggcctcttttagttttatttttatatgacttaacttcattgactagttaaagattttggttacaagagatctcttgcttctctttgaaaaattggcttacatatagttttctgcaggcaaactttttttaccagcccccaagtctaggctagctttcccttctgtgtgctttcaaaacagcttgcggtcggccgggcatggcggctgtaattaagtgcctgtaatcccagcactttgggaggccgaggcggacagatcacttgagctcaggagtatgagatcagcctgggcaacatggtgaaaccctgtctttactaatacaaaaattacccgggtgtgctggtgtatgcctgcagtcccagctactcagggacctgaggcaagggaatcacttgaacccaggaggtagaggttgcagtgagccaagatggcgccactgcactccagcactccaccctgggtgacagagctaggctctgtctcaaaaacaaacaaacaaacaaacaaacaaacaaaaccagcttgtgctttcatcaatcatagcaattctgacactgttagtctcctttgagagtaaggagacttacttactctcatatcttacatatcttgtttattccacatcccaattcttaacccaggacttagcacaaaaaattttgataagagctactttttattgagtgtgtagtatgtgccaggcacaatgttaaatgttttgcatgctttctctcaatcagccagcagccctctgaagtaagtactgtactattattattctgtttcctgagatgaggagaaagcagcacatagagtgtaaataacttgctaaaagttaatgtattagtcaaataacattgaatgaatgagtgagtgaatgaatgaatgaatgaacaaatccaagaaccaaaaatatttgttcatagttaccttgccaatttacattattactttcttatattggaagtaagaaaaatggaaacaatgggaaaaccaaaatatatgacaataatttcttcaaaatataagccacaattgattttatgtttttctattaactaaaaaattattatatatagttggctctattcagaggtagcaagctctctcatttggagagaatgggaaaaatttgttaccaaatgcttcctcatttcagagctcatcataggcagcactaattgttcacagaacttttttattattattattattatactttaagttctgggatacatgtgcagaacgtgcaggtttgttacataggtatacatgtgccatggtggtttgctgcacccatcagcctgtcatctacattaggtatttctcctaatgctatccctcccctttcccccacccccaacaggccctggtgtttgatgttcgcctccccgtgcccatatgttctcattgttcaagtcccacttataagtgtgaacatgcggtgtttggtttcctgttcctgtgttagtttactaagaatgatggtttccagcttcatccatgtccctgcaaaggacatgaactcattctttttttttatggctgcatagtatttcatgatgtatatgtgccacattttccttatccagtctgtcatcaatgggcatttgggttggttctaagtctttgctgttgtgaatagtggtgcaataaacatacgtgtgcatgtgtctttatagtagaatgatttatattcctctgggtatatacccagtaatgggattgctgggccaaatgctatttctggttctagatccctgaggaattgccacactgtcttccacaatggttgaactagtttacactcccaccaacagtgtaaaagcattcctatttctccaaatcctttccagcatctgttgtttcctgacttcttaatgatcgccattctaactggcgtgagatggtatctcattatggttttgatttgcatttctctagtgaccagtaatgatgagctttttttcatatgttttttggccacatgaatgtcttcttttaagaagtgtctgttcatatcctttgcccatttttttgatggggttgtttgtttttttcttgtaaagttgtttaagttccttgtagattctgggtattacccctttgtcagatggatagattgcaaaaattttctcccatgcctgttcactctgatgatagtttcttttgctgtgcagaagctctttagtttaattagatcctgtttgtctattttggcttttgttgccattgcttttggtgttttagtcatgaagtctttgcccatgcctatgccctgagtggtattgcctaggttttcttctagggtttttatggttttacgtcttacatttaagtctttaatccatcttgagttaattttgtacaaggtgtaaggaaggggtccagttcctgttttctgcatatggctagccagttttcccaacaccgtttattcaataggaaatccttttcccgttgcttacttttgtcgggtttgtcaaggatcaaatagttgtagatgtgtggtgttatttctgtggcctctgctctgttccattggtctatgtatctgttttgctaccagtaccatgctgttttggttactgtgaaattatagtgtagtttgaagtcaggtagtatgatgcctccagctttgttctttttacttaggattgtcttggatatacaagctgtttttcagttccatatgaaatttaaagtagttttttctaattctgtgaagaaaatcaatggtagcttgatgggaatagcattgaatctataaattacttggggcaatatggccattttcattatattgattcttcctatctgtgagcatggatttttttcccatttgtttgtgtcttatttccttgagcagtggattatagttctccttgaagaggtccttcacatcccttgtaagttgtattcctaggtattttattctctttgtagtaattgtgaatgggagtttgctcatgatttggctctctatttgtccattactggtgtataggaatgcttgtgatttttgcacattgatttttatcctgagactttgctgaagttgcttatcagcttaaggagtttttgggctgagatgatggggttttctaaatatacaattatgtcatctgcaaacagagactatttgacttcctctcttcctatttgaatacgctttatttctttctcttgtctgatttccctggccagaacttccaatacgatgttgaataggagtggcgctacggccataccaccctgaacatgcctgatcttgtctgatcacagaactttttacaattgagccttaaatacaggtttagaatccatcttcacatggtgcttcagggatctacaaccagggttgaaggtgtaagatgattccttttcgccatttctattagaaagactgaaaggccacttgccaaggatgttgtaggaggaatttaaccatcagatgtgtgtgttggtggtggagagaaggttgagttaaatgatcataattcaatcctgaaattttgtatgtctccaacaacattcttaactcacagagcataagaacagaaataacctcctctaactatcacatagttgtttgtctgtctgtgaatatttgtggaatacttgttatgtgccaggcaattttttgagatattggactcatgctatgtcacacggtatggtactcattatcaaggcccaaatcatcatgctgtcttcccccgggaccttttagtcttttaggggaactgagatatctgtatatatgcaaaggacctagcattaccaaggagtggcatatcaagtattatattcatagaacaggtgagattcagagaagggagtggactgattattaattatagtagctgacatttattgaattcttagttacctaacagtgttttatgggcttaacatatattcacatttaatctgcagcacaaccctatggaggaggcatctttattacattttacagaggaaagaattgaagcatggtaaggtaatttggccaaggttatacagctagtagctagcagagccaggattgtgaatccagatagcccacatccagtctcactcattattagacttggattttgctagaaacttgatgaaggagggaagatggaagctgagccttgagggattaatgcggccttcgttggtggagcagtgacgaagggggaagccatttctatttcaggcttggtattaaactagttgtcaaaatggatgaaaacacacacacaagccaggcaactcttcatgcccttggttctcaattttccttaaaggagaacctgtgagagagaaaaatgagaacagaattggccagtatctgaactagaatggacttaggatcagaggctgcattttaccagtatattttgaattatggtggctctggaatggcccagtggtgatgtggtaaagttgaactcttagagatgtcaggaatactttattttagtcgcagaacttggagtttgagaggccagtggtagacttcttactgccccaagagagtgtctttcttggctgtccgtggataaaaggggaaaatattcatgcaatggacagtgaggtacagatatcccaaggtaggagatttttaatggtcatatagaggcttatgaatcataggtctccctgttatccatagtggacatgtttaaccagctattttaatcaaaaatgtgataccacgtataagccaagcaatactggctgatctataagcagcattgtgtggggactagttgtatttgtcactttccttggaggcttgcctttgagatactcattggcttccttctgcctgagtctcccccctattcctccctaagatgctctgaagcttcctgggcgaagccgtgtctagtggcggttctcataatcactcagctcggctaaaagcttctactgggacactgaccatgtcataaaggcagctggtgctggaggcatctgcatctttgacttcctcctggtgaatctgccatcagctgtgattggctgataaatggtcaggaaagggtggaattgggagtgaagacttaggtgggaaataacccagacagaatcttttgttaggagcaaagatgaccccacttaaaagatagctgagttcccatacctgttctttaaatgatttactattatcttcttcagtctcttctaacagtgcactattttatactctttagattcttctccaaatgttatttctcaccttaacttaaagaacaaaatgaaaggaataataaaaatatttatatgaaaaaagtattacacacactatattctagacactatcagacccctggggttatagtactaaaccaggacacgtggtcccaccgaatggcatatcagatcattctgtgactataaacattgttttctgtgtatatctatctttgtttatagattgctaagcttgtgagtcacttgcaaagtttaatttgataaatacaagtaacactgtttaaaatccttataccactatatttgtcttggaaattgcacttttaaatgaccaagtgtttgatcatttttttgtttgtttgtttcaccagacaaattggagacaatctgattgttcctggaggagtgaagaccattgaagccaatgggaagatggtgatccctggaggcatcgatgtccatactcacttccagatgccatataagggaatgaccacagtagatgacttcttccaagggacaaaggcggccttagcaggtggcaccaccatgatcagtaagtcttcatattttacacactcctgtttctcagaagtgtgtgtttaatgaatgtgttatctccagaactctcttactataacttgtatacttgtcccagttcagtttatagatgtgttgcctgatgggacctgagaaaagcagattgagctgaggaaatgggcagctccctgtaactaaagaggagattcatgaggctcttggtcatggcagcacctgccctcttgtctaccttagcagcaggcgctggctcctgcaatgagtggagaataggaaatagcatctctgggctagtaagaggtgaaagtagacttaaaaagttatggatagaagatgaaacattatttcaaaactgcccacttgggtctgagaaaggagggcagagcagcgtgaatggagctaaggagtatcacggagagagggattatggagaattacatttctcggaaattttgtaaacttcagtgggtaaagctgtgtctggtggaggttttcaaaatcgctgagcttggtttaaagcttctactgggacgctggtcatgtcataaaagcaactggcgctggaggcatctgcatctttgacttccacttgcatttagtgcttatggtctgcgctgtattttgaccaattcatatctttaacatttggcaagctgtaggagtggtttctcttgtttttaaattttgttttgttttgttttttctattgcaattccaaaaaaaatctagggagttgcatgccattggattactgaaccaatagcattccagggcagtccttcctgtcccaaaggaatcctgatgaattgggccccatcccagtgctggccccaaacttggtcaggcagagagcactgtttattttaacaccatatacatcccctgagaacacaggacagcctgagctgtagaattattcactgtcttttacttccttttgacaggagcataagcagggttcagcttcagctagttgggtgtggaagcccagaaaaattgcaccaaagccataaaaggtgcaattcagggtgcaattctccagctgaagggtggaagcctgctgacttctcagcagctgcctgctgatgaaagtcctggtgttgccccagacattagtaatgtagctccacgcatttgctttccgataagtgcactcaggctgcttttgatagaagactacgggaatgagtgatcttggcttggctttctgccatctgggcaaggagttggacctgtttggcatccttgagatttgtattatgcttggccatctgcattagggaagtcagattccccgtgacgagagtaaaacttacaaagaaccacaaaagcaattgtgtccttcatagataaattaggaaacctagagatgcaaaaagaaaataaacctcctaatcccacatcgctgttagagtttggctgtatattgtacacatttttaaaatcctatttggccaaactaggatcacagtatatgtattatattttaaccttccatttttgctaaataatatgtcatgggtatctttgcattcatttttgttctaccccaacatttaaagtggattcctagtcatccattttataaagcatttatgtatttaacctaacttctctattgttaacaatttcaattgtttccaatttttcacttagataaataagtagcaaacatccttggaaccaaaattttgtatacagcctcatttatttccctaggaataattcgtaggtgtgggaataaatgttgggttaaggtttgaaaaatgtccgggttttttatgtatatttcagagctgctctctggaaagttgtccttagctgtactttgtccttacttgtactttgcctcagctgttcaggggaactatgaaagtgtaacttttgccttttcttcatcaactgtagatgccattgtttaaaaaaaatgtatccatggttgtgggtgaaagagtagatttgggcctcaaagaaaccagattcttgacaagaagtttccatggaaataagatctgcgggcccagtatcaggtttatgtaactgacaccagctttgtcctatagcagagagcctcaatgtcttatgccctaacttagctttaaacctcgctttcgcccttggaagagagtctgacctttttcactagcagtgacctccccacagtactagtaataatgacacatagtaggcactcattgatggctaacatttattgagcacttaccatgagccaggcattagatgaagtactttacatgcattttcccatttaatcttataaattcagaagaaaggcactagtaacaccctgactcccaccccacttggcaccaacttaaaggaaagaaaactgagatttagggaagctagtaatttgccccaaatcacatagctttgtgacatttaagtgatcagcattcttgaaactatcagggaaccccttcaaaagttaattccatgctcaggaaatagagattctgcagtcacagctaagcaagcaggagcaggcctgggcagaggggagcaaaggctgtgtctgagagtgactcatctggggtctctgtcattcagttgaccatgtggtgcctgagcctgagtccagcctgactgaggcctatgagaaatggagagagtgggctgatgggaagagttgctgtgactatgccctgcatgtggacatcacccactggaatgacagcgtcaagcaggaagtgcagaacctcatcaaggacaaaggtgagcccggacatgccgtcctccctcctctcttagcttcttcttgccagtccttccaacaccatccactcatttcagtcactgtcttttacttggagcctggaaccttgagtgtgagcactggatgtagggataacacaatgttccaggcactttatttacttcttacaggatccccatgagatagtgattgttttccccactttgcagatggagaaactgaggctcagaataagcagcccaagatcatagcattagtaagcagtaggtgtatccaaattctatgctcttcacctccatgcaatattgcccattctgaagaggaagaaactgaggttaggagaggctaactaatcttacataaggttgtatggctagtatgacctatgagattagggatttttaacctgtatcatttttgctgtagagatcaaacccttactatcatataacaatggcatccttagacaaggctaaggcatttctaggagcaaggatgtattggtactcaggctgggagcttagggtgtgaaaacatgttcatgtatatgtatatatgtttctgtgtgtttgccagcgtgtgtcctctcagtgagtacatgatttaggttccactgtcttcttagattcctccattctctgcttctttttgatcaacagatattgcaaacccctcccccccacatacaggcacacatatgcacaatgtgctcagcattgtaaggcggcctgggggtcttagagaagtgtaagtaatggcctttgctgaacacccaaggcaaaagaaaacaggctcatgaagaacaacagaataaatgtcatagtgtgcaagaaccattaccaaaggagtagtctagacacaaatgctaggagtccactggaagagtgtgccctgggatggcagggaaaggatgaccccctcagaggatgatattttctttccatcccctccttaccccacaagccctgcaaaatctttggtgacacagaatgtgagattaactccttctttctgtatttgcgtttatactgggcatctcaaccggcgtagaaaatcgaacggctttaacactcacttctttatcaaagagcctggatcattccatggataatgtagaggcttttgggaagggtagtgtttgggaagactgccctgagttgaaccactctgggtagggaagttctcaaattacaacccagttttggcccagaatactgtgggctgagaaggctctaatggttagagaccaaaattatccccctttcctcaaaatgattctcagttccccagtcccacctatttctgtaaatcactgtattagtagtttatttggggagagatctaaatagatctttacatataaaccttacaacttaagatatttaagcacaaggtaaaacctgcccattagttccctaagggtaggatctgtatcttagttctcctttctgatccaacaccctgcacagtaaaatgaactgatcccaggagatccattaattggaaaccaaatatgtgccaagcctggtgctaagagctctgtatgtattctctcctttaatattcacaaccactttatgaagtagggtattgttatttttccatttaacaggtgaggaaaccgaggtctggagaggttaagtatcccaagctcactgaactagtatgtggtggatttcagtggtgcagcccccagggtatgaacacaactggtgtgctagagtgattcttaatgccacctactactgccttgagcaataacaaagtttattgaccttctgggctaggggatgctggacaggggagtttagaaagaggcacagaagaagagaccattctgctatgacatctgttaggaattgttgattttatggggcaagggtgggcagagcaaaatgctcttgaagaatataaatatctgctttatgttggacaggagcccgggtaatgcagctgggtgctatggtcgatggaagtgggagcaaaggatggaggacagtcatgataatgttgtctttctcttgtttttcctcctgtccctcttttgcaggggttaactccttcatggtttatatggcttataaggatttgtatcaagtatctaacacagaggtaacaacccatttgctatgtggtttggggtatctggatgggtttcctattgttgttgatgaccttggcccttgtaacatgaatcactgtggtcactgtgggagaccactgggccagaatgcttcttgaagcctttgcagtccacgctacattttaaataaggtaacaggcagggtgcccatggcaagacagacagggagctagagtttccactggcagcagctttcttaaacggcaagaggaggaacatgcctaaatttccatctaccaaacaagctccaaacccctcataagcccagtgaaagtgtgaggctcttcgcctgcaggaccaggagggccttctgctgattggaataatcctactgccttgcctctgactctccccctaagaaattcatgacatgcgtttgctttagacagaggctatgttttcagaggaaatacaagaaatgaattcccatgcctcctgcttagaggtgaaggtatgtctgccttcacaggttaagagataagggtttcagtttttgtgtttgtttctggcctggctgtagtggttttctagagcatttgttgagaagaattctgagactgtctctcagctcaatgggaaaataattccattaaaaatgtgtgctagaggcagaggagaggagttggtggtactttattatatatttgctctgccagcctagggaacatggtaggttctttatatagtcagagtttcctgggatttctttggactagcactcctctttggtcatgcctatgtaatatatatttctgccctagtgacttatttcctctgctttatcccatctgttttagcttgggctctggtaattggcccttctgtggggctgctaaaagtgcttgcaagagtgacaaagactcatttctatttcagctctatgagatcttcacctgcctgggagagctgggggccattgctcaagttcatgctgagaatggggatatcattgcccaggtaacaccgtgcagctccctggagcgtgctttgggtctgcattccattttcttcttcatttcttcagtgctgcttgagctctcaatatgtgcaaggcaccatcataagtaccttgctaaagacagaacctgctccaaggtacctcacaatttaggtggaagaaacagaggggaatgtagacaagcaatgaaactagaagatgaggtaaaacagaaagagggctggccattgttggagaatcagaaaaggcatcctggaagaggaggatttcaaattggaacatttaatgggagagcatttgctgattctcttctgaaaatgtgtcaaagctacaagacattctctgtcataaagaaagaccgtaaggcagcatttctcagaagccagagattggatccaagtctgtggaactcatagccttagataatagagaatttaggtctcatgaggagcaaaggtctcactggattcctagaaatcatattgagaaacttgaggaaagagtgacgaaagtgagggccccaaggcccaaattgatcatttgtaaggaagaaggaagcagttatctctccatctcctgggctgcttaatggaatagatggacagatgtgtcttaggaagggttttgtttctcagaaacatctcaagattggcctttgctaggaggagacagcccgaaaaaaaaagagtgagctttcttcatccatttgataatgttggcaacaagaaaccgttattcattccttcaaagagtatttcctgagcactttgtgccaggcagtagctattgaagtgagccaaaacagatgcattccatagctcactaatacttgggctgtgcttttattttagaagttgaccagaacttggtgaatgtggtcagcaggggtgtaggaacaatgtctaggcctcccctcatctcggaccattagtttcctgatagcaggtgccgtttggtgagcactgactactgtgtgccaggaactagtaaattttctggtgtattctcatttaattttcacccaaccctttaaagatgctatcatcctccctattttatacatgagaccatccaggctcagaaagattacgtcactggcccaaggatcacagcaaataactaggaaaacgaaatctttgcccctaaggtgatatacctcagtgggtatctttactcagagatggcatatctgggatcccttgcctcccaagcccagctgcaggcttgtgggcaggcagtaccccagccatgcagggctccagctgttgtgatttcagactctccatgttgtcttgctggtgggggaggtgaggtaagtgtacagtttcctctcaccatgaccaaggaggctaattagtcaggaccctgacagcactttcgcccacttccaccacacacccaaagataatgaaatcattttctttagagagcccaaatgccttggtcccgtgggaggcaacccagtgatattagaactgtactcctccctttatccaagttttcagggcagcagccagaggtcccagccctgctttcagcttccctggaaaccaaactctctggcagttaattctagcccctgaggaggcagatggacttcaatccaaagtctgcgttctcagtttatttcctcttgtgaatccttagagtggaagtttctctggtttcccctcccgctgctatttccctaccttgggaagatctgttctcagtcaggaaaagagtaggggcatttttccatttggatgagtttattgtgtgtgtttattaaattcagcttgagcagaaagatttttatcacattgtttaaatgaaggcagctgctatactcagaatttcttgctgcacttattcaaaagtgagtatatgagagaggaatctttgcctttgggtacaaacaaggatgattttcaagaatttcaagttggcaaaacagtctaagacgacagcatctttagccattcgttcaacaaatatttgttgagcatctactatacgccaagccttggacggggaagatgtaaaagacagggttcctttcctcatggaccaagctacagttgtgtcatgacccaaactgtgatgtaactgtagctgtgatgaatgccacaacaggcccactgctatccccatgtaaggtagcatcagtggggctttactgctgttcttaatctctcagctatagggacatcatggcttcagaataggacttcctagcctgaacagtgcattagaatcaccaaatttttctaattccaggtattctggaattaggaaaagtcagtagcagagttcaggcaagtgtattttgaaaataatcccctggtgatttaaatgtgcttggaagccacctcttgagcttagctttgtcctgtgcattatcctggtgcactcaaacaagacagaagcacaagtgtcacctaagacagagattctttagttggagaccttaacccttgtgtgactggaggcaatttagagtagaaactcactagactttagaagaaatttaattcagttcaagtttcaataagtgagaatggtaagaatgaaaagtggaggtgcttttctggaaaaataagcctgtaacctttctttgttttctgtagagctggagatagtgaccatttcacttctcatggttgcttttagtatgtgcattttcctttctactcctcttttagagatttctattactaaaaacaaaaaacagaacgttcttttccaggtggtaagaatccttacctttctaaatgcctcacagtttcaaagtgagactaggcttgttgcattcaccatttttcctatgtgtctcacacattaccagagtactcccaggtcactaggccaggactgctggtgcagaggttcatagggaccagtcttaataatttcagagtgaatgccagtaacgctgaagaaatggtggcttgggatttctgccagttccaatcagttcatgtgtgtgtgctcactgcccagctacctgcttcttccataaagaggctagaagtctgaggaattttgccatcaaccacaagggacatgcacttcttctgccatgtccacaacttggttaaacagaatttcaccaagacactaacttaggtaatgctgtttggaggcactattttgtttcgttaaattttgaatccattcatttaagccatagatttaaaacatcaaaactcctgagtggcttattaaaatatgcatttctaggattcaacctgacatcttctgatatgttaggctaggatgggtgagaaatctgcatttctacaaaaacaattcaggcaattctgatgtaagtgatgagtggcccacacttcgggaaacatagcactaaattataagccccgtgaggtcaggggctaacattgctttaatgcaggtacttacccagagcctaggaggaagcagttgctcaatacattttgttgagtgaaatggcttaaagagcatgagtgaataaacaaatgagataagcaagtatagtttcagaggcagctgagactgagagagatgaacaataagtgacctggtatgattcttgaagggcagtatagacaaaaaatagtctaacagacaactatctttcttctaataaaaacaaatcacccttgaatgttttttctttttatccttttagttgagtctaccctatattgcaactccaaatataggattaatacatctgttcaacatacgcatatttattctttagatctttagatcagaacataccagcgtaatttttccaaatctcacttgagcttattgaagaactattttcttttttcatttcaggagcaaacccgcatgttggaaatggggataactggcccagaaggccatgtactgagcaggccagaagaggtaagttacaggggatgaaggtgcacacacaacgcatgaataaacattgttaaaaggcgacgagaatgtgagtaccaggttgcagtattggaacatttcttccaaagaccacttctgattgactctaactcaggagcccgtgagaaaattagaaaggaatgtaagagacatgcttatttctgacccctaatctccctacagataacacaagttggagtgtccttcacagctattcaggagtgttaaatttctaatccctttcttaaggaaatctcagtgtgaatctcatagacatttccacttattcccttatttcgagtcctgcaaaatattggcatatagataagatgttgaatgggttttttatatacattatactcatcaatttgtataaggtgatgattatgtccaggtatggaagtttctcatatataaaatgaatgcttatttatgtctgtacttagcagccaaacaacaaatcaaaggtgactagaggctggttccatgtctccgagatgtcagcagcttcacctactggcacggagcacagagctgggaattggctgcccatgtacctgaaagcacattggctttggaagggcagcctgggtctagcacctagagcaaagtcaaggccctccatatcagtgaagcgagtcctgtttctgtcctgtcattccaaaccctacaacagggagaagaaggaatcataaccagaaatgattcccatatcctgtctcttttagagtcttatttaaaatataaatagaacacatatagaaaaaaatgtttctatcctaaggaggcaatgaattttcacaaaccagatacacttagctagtgttacactagttatactagtataactagcacccatagaaggaaacagattatcagcacctcagaaactcctttgtatctagtgatatttttattgccatttaaataatttataattttgtgattagggttccagtcacatacagcatccctgaagtctgtctccttaataatactaggtcacttctatggaatgcattcatctggtatgtgctgattgcatacgttatctcagttctcgctgccgctgctctgtgtggttggcattgttgcgcaggtaaagaagctgaagctcagagaggttaagcccctggctgatcacacttgaaggactggaaaatggtttactcatcgtgaagagaccagggtaatcagcattgtttttgaagtttttcttaaatgctggtcactgtggagatgtgctggcaagacggatttccagcagcagccaggggatttcagagcaaagtctatttttgttccttggtttgttttttcaacctccccttagccttaccaccccaccctcctccttattcctgtctcctttttagtaaaaaagcctctcagccgcaaacctctatagccgtggaaggccatttgggtgaagttggagggtgatgtaaccttccaaagatagtcatgttgtcaaagtgctgaaaaacctgtagtgcttgggaggaatgagatcaaagggaccaggacagaggtcctgggggagctgaagtggtcagcatgggtgtgaagtgggaggagtgatcataggaggagccagcccctgttcaattcaagcatacccagacaccacctcaagtgatgctgttcagagagctgggaccccaggcatagagacagccgctccagagtacaaaattctgggtgcttcaggaaggtgtccatattcacatatgaccaggggcctccaaggtcccatccacatgcaataaagtgcagcttgggggaggccagctcagccagccaagttcttaggtctgtctgctgagctacacccacaatggacagtgactggtttgcattatacagccattgggcatctgcaagctatttttggtattttttttaagtgttgggctccacaggctaaccagaatgtcatatccataaaaaaatgaagtgttgccaattgaatggaagaatgtcaaagtctctgctctgtgctgaattggactaacttacacaagttgagagtagaccacttgagagtaacacagaccctcaactggttagaaaatattatcaacaataatatcagtagccaaccctcaaggggcacttaccttgtttccccattaggaatgagctaactgctttataaggatgaactcatttaatcctcaccacagcccaacatgtcagatcctattatcctcaatttacagacaaggaaactgaggctttgggaggttgtgcaatgtacccgaggtcacctagcttataagtgtcagaaccaggactcagaaccaggccatctgagagagcctcagctctcagaccctgctttgttaataaaataagggaaaacttctaatttcttaataaatgccactgggttggttagcatatttgaaaacatgaattctacattagggtaagatgggagagatcaattataaaacaagtctttgtgttgagaaacctgggaattattttcgtaagaaatgcctcctaaaattaaccctttgctgaccacttactgctgcaggaaaggatttgaggaaccatgatgcctaactgccttggctggttattttagacataatggtttgctattgtgtttgcccagagattctgtcctgagaagattgaggagcaaaggctttcattcagatgtcacctttgtgataaccacagaggctaaggaaaaagtacttaccctctgccagacattgctctcagatgacaatgctgtgctatactattttactagtgagggatagaggcactgggaagctgagtaaagtgacacagttaggaagtggtagatctgagatgtggatataggctatctaattccagatcctgccaaaattatccataacctttgtgcagcactgcatcctcacagttcgtggaggtgggagccaccagtttgagaggttcatgtttctattgactcctggagactttttcttgcagctggaagctgaggctgtgttccgtgccatcaccattgccagccaaaccaattgccctctctacgtcacaaaggtcatgagcaagagtgcagctgacctcatctcacaagccaggaaaaaaggtgatttgtgtttccaagatctcggagcccctgatggcactgtgtggctccttccctctctggttgtcctgtgtaatataaatggtgcctactttgctcattgccttgctccctaggaagccgctctccacatcctgtgtggatgggaggatcctgggatttctcccacttggcatttaagtaaactgaggctcaggaaggttagatgagttgtccaagatgacacagcttgaaccagttcttctgagactttgtgcatcttacttctccccttgatctttgattttcagttcaccttgtctgagttttataaacggacatatcagtcaggattaaattgggtgcaaaattcaaagatcctgctcaaactggcttaaacaaacacaagtgaataaccgattgtaggtgtttcaggtatggctagattgaggggcctcaacaatggtattaggtgtttgtcacgcttactcctttcttggctctctttcctctgtttggtttatgttcagtatgaacagttacagaatagatgctgagaggcccctgttgtcctcaatttttggcagagagcatgatgggaaagtaaaatacaccttttccagcaggtcaagcaaaagtccctaggagcactgtgactggtctggcttgggtcatgtgctcatccctggaccagtaaacaccccggggatgatataatctggccaggattgaggccacagtgcagatgcaggtcacacctcctgagccactgagactaacacaagttattttagagaaggggttgagtgggtctccaaagcatattggccaccatggccttcatgaccctggctgtgtccctgctccctgttgacttctgcttcttttctccactggtgttaacttgggcttcctttgcttgccttgtgcttagctaaagttttcagagctttcttttctgtttctggttctcatcctcagtgtcagactcgtgggctcagttgtgaggctgggtaagggacgagtgcaggtgagaagctgcagatgtgtggctctgtgttgggttgtgagaggatttaccaggcccagtgatgtggttgctactgctgcgtgccagtggccattctggtagtagagaggcccaacatgggtgattcatctaccaaactggcctgtgaaactccacgtgtgagtgattgcagtagctaaaaatagtctcagctgacgctgatggctgagtgttcagatgcctggccttctggcacagggtgaccctatttttcttacaagaggggaggctttcacattgtctagacactcttcctagctgacagattctggggcacctccttccttcctctgttcttcgtaggcctgctgttttctccttagcttttagaagtttcaactgacatggagtggttgctccactgggtatgagtcattgggcgagaaccaggaaagcagcccagtgctcctcactcattcttggagaaaagcaaagaaaagaaaaagaagaagtgtgtaggaactccttgtgccctcacccagtgccgcacacacacacccctgccaactgtgaccacccaccgccctcatgccctctgctgaggctgcattctgcccgggacccattcttagggtgacctagggccgctcgggacagggtgttttagttatatgctggtcttattttaaacttcatggacaaaaattcctaaccctgagccttttggcacataattctctggcgagcagaactagtacagctgtgtctccggggtggaatgggggtattatttcagggatgaaaaactggctgctgagattgaagtcagtaaacaactcatggaccgtcattctcagggaaacacccaagagcattctttgcaagacaaagtgtagcagggtttgcacttccctcctgagcaggatatggttgaagtctcagtgtgtttagtcaccaatcatcagggctctttaactatatggctgctcagaattaatattagaaagctacaatttaatgaggaacagctatgtgccctgcactgacataaatactttaatttttttattgtgtagaattctcaaagaactctgagaaataggcatttctcagaaatgccttttttcagatgaaattgcagcacaacttgtccaggatctcccagctgggagagctggtattcaaatctaggtgtaattactatcttagcttcttttactcttccatgctaaacatagtccagagggagatttcttccacttttaagattctatttctttcaatagtagttgagtgcttgctgtgactttcatttcttcatatctttatggtcctgtatcctttagtgtgtaagtatttttggagagcccttgaattctcatcacttggatttttttttactctcacccccaaaagcagggctgtccaatgtgaatcattgccatcgcttccttcttttgcctatggcagacattactaattaatcatgagtcttttctactgagaccccgcgcattattagaatttttcccttcatggaattctaggcaactattaccagttgaatggagttgaaacaaggcaaaatctatttgtgatcctggccatagagtgcaaacttgtggagaatttaactgtggaagttggaggaccaaagttaaagaagtgcagggctgtatagggtagctttggccccagattttggcatagagaaacttggtaccaaccacctagctatgagctagcatttgctttctatatcactattccttcttcttaaagaagctaaacagcttagatcagtgtatattccaatagcctttatcccctctccatggtttgggtagttaggcctctaatttttgaggcagaatccaagaagctagtctcatatttgatgtgtcctaggttattgggtgacttttaccaagtcatcatgttaggagtaacaaacatgataaaaaaaaaagtcataggccgggcgcggtggctcacgcctgtaatcccagcactttgggaggccgaggcgggcggatcacgaggtcaggagatcaagaccatcctggctaacacggtgaaaccccgtctctactaaaaatacaaaaaattagccgggcgtggtggcgggcgcctgtagtcccagctactcgggaggctgaggcaggagaatggcgtgaacccgggaggcggagcttgcagtgagccgagatcgcgccactgcactccagcctgggcgacagagcgagactccgtctcaaaaaaaaaaagaaaaaaaaaaaagtcatgagagtctctaatccacaggaatggattttactttgtggaaccaaagcatatcattataatgggagcatctagcaattcccagtggtgggtgcacatttgggactttgggcccctactgtgggaaggcataacaggtaaagaaagcgatatttaccaaacatcctctaggtgccagatgcttcacgtatgccatatcttttcattttcacaagcctaagaagtagacatcatcttgtttcatcaatttcagaatatatctatttcagccttggtatacatggaacccattactagagcaagaactggagcattttagtatttctgaaatgaggatgaatcttgaaatcaatatgtatattttattttcttttgcctcaaattttaatttgcctcaaaatttgagaattaacactgcatctaacaaccaatggcttcttttaatctagagaatacaaacttggtcacatttagcagataggaaagcaggggctttaaaaaggtgggaacatggacttgaacccaggtcagtctgactctgagacacagtcctgggtaggcttaggagctaaattaaataggcttggcccagtgcagcatatactttatgctaaccccttgtctgtttcctgccccttctaggaaatgtagtctttggtgagcccatcactgccagcctcggcatagatggaacccattattggagcaagaactgggccaaggcggctgcatttgtgacatccccacccctgagccctgacccaactactccggactacatcaactccttgctggccaggttggtgcaggaatgcccagcagcaggcgttttgtgaaaacatctcttgagtccagctgggggttgaggacaggagcagtcccatctataaacttgaccagagtctgcagtgtgaacagtgtattgggaattcttttacagtcttgagcgtagaaagcaggctcttccccatcctgttttaaacattaatacagtcataatattaataatggtaatagtagttaaaacctattatgtaccaagctctatggtaagactacactcacaatctcatttatttctcctaacaactttatgagtgaggcactcttatcagcatttacatattaagcaactgaaggtcagagaagctaaatcatttgcctaagttcaaatagttggtcatgatgacaatcaaaattatagggagactcctttgttgctgccctctgcagacatataggatcatgacattgctcatttgagtacattttattttgctacaaaagagatgagctaatcccaccccctcactttctagatggggtaactgagcccagggaggggaagaaactcatccaagctcatatatctagtaagaggtagaggaggcattccaaacccaaatagtcagagtgcaaaccctcacagtaaacacaagactctaagctcccagtgtgcctccagccatctcccctgttcatgtggagcttttctcctttgccagcggggatctgcagctatctgggagtgcccactgcaccttcagcactgcccagaaagcaattgggaaggacaacttcacagccattcctgagggcaccaatggtgtggaggagcggatgtctgtcatctgggacaaggctgtggtaaggcatggaggtcatgggagggtggccagagccaaaacatccatgggccagatcagaacctcctgccaccagttgggctggtgacactgcgagtgcagatgggatctcgtacttgctgagatgtctctggaaccatgtggctctggcagtgtggaaaatttccttctagtgtgatgaatcctaaggcctagcattctgaaggaggcttccttatctagactgttaggactaggaaccagacatgcaactccttcatctgagtgtacgaatagcctgtacttaaaataatagtgagttaattctttttgtttggatagttttatgacttcttttgaaagaactggatataatcctttgaaatgataagcaatgagtctgtgtctagaccaaagtcatcttgcttatcaaggacgccctgtactgagggcatgtggtcattcaggcgatacaagtgattgtctctaaatgtcttctggcaagtggcctgttttattttccttgttcacatcacaaggactgacgaaagaaatagccattcaaattaagactctttcaaagattttagtaaaatcaataattatctcattattaagttgattactgctctatgtttcatttcaaaaatcctaaaaacattcttatcaaagttatgtatactaaagcctcattaatctacacagtgtaatttcactgagttttctttttcttctttgctcccaggaagctcagagctaggttttaaactcaattctttccgtaaagaggctttttggtttgaaaagagggaaaatataaatattgttgtctgttctctcacatagtgtttcctttttcatatactgcagagcagtacgtatgtatttatcctggcactatttggaatagttccaagataatatatatttttaaattaccaacatgacacatgctcagtaaagaatatttggaaactacagacaagcacacacttgaaagaaaacaaaaatatctcaattccacaacccagggaacccattgttatcatttgggtaaggttcttttgtatttattctatgcatacaacatatgcaaacacaaatacatatctaaaggatgggattataatcacatttgtttttactgtgaactctccataatcctttttgaaattagaagaagaaaatgagtaagtaaatgtaagaacatatagaaaaaaatgcatacttcaggggcagtaacttctatcttaaaccatgtgtttgaccattttacctgagtagtcacgacagcccagctaattcgagcttgctgagtgaggttctgtagctcaccagcttttcaggtggctcctttttgtatttctatgcctttgtgggttgtctttctctgagttcagaagccctgaattgatatatatgtagctatagatatagatataatttcttatatttcaataggccacagggaaaatggacgaaaaccagttcgtggctgtgacaagcacaaacgctgccaagatcttcaacctgtatccccgcaagggaagaatatctgtgggttctgacagcgacctcgtcatctgggatccagatgctgtgaagatcgtctctgccaagaaccaccagtctgtaaggcccgctctggtgggagtggagtagaatggagaatgcatgcaaggaacttggtcaggagaaatgtgtttatgtggtgtgccagggtagttagactaggacgggttgcaataataatccatcccctaaatctcagtggctcaaaacctcaactgtgtttctcctgctttccaaagcagatgggctctgcccattccagtcactcagggacagaggccaatagaggcttcctctctacatatgttttcatgattgctgagacaggggaacatgacctggtgaatggtctactggctctgaaagcttcccctagatgtggtgtacgtcactgcctctcacatggcactggtcttagccagtcctgtggctatacctaacttccggaagtcagggcgtgcaatgatcctttgtgcctggaaagggaaagaataggaaataactggtaaacagcagtgatgacttcttcacgatgagtttcacatggaggatgataattaaagtgcagtacctaacagaaacgggctcgacactgttgttaaaaatagttaatatttttaagcacttatgtttcaggcactgtgctttgaattcactggatttccatagtagtcttctacaggtagggactattatcctccgttttatagattaaaaattggaggtacagaaaaattaaataatttgtgcagcaagcgaatggtgaagctagcattgaaacccagacaagctgactctaaactgatgttcttaattattggcagtacagtaatgcctcttgctgattgagtaaatgaaggaggtagggagaaatcccatttttggtggcaatggcctttgcttaaatattgtgtcatctcatgttatttaatttggagctagagggacctaaaggccacataacctctctgcccacctgctcaatacaagacagtgatgtacagcatcctggatagttatccagcttctctttgaacactacccaagacaaaagttgacttccacttgaggaccttattaaagaccggacacttctttttgctaggaagtttagtcttgtcttagtaaatctgtctccggtgccttctacccactggatgcttgcagatgcatggtgagcttttcctggcttacctggtgaatcagcagcaaatgacactgaaggtctcaaggagagaaggtacgttcctctttctctacccttactgtggctttgcttctcacccctgcctctaggcggcagagtacaacatctttgaagggatggagctgcgcggggctcctctggttgtcatctgccagggcaagatcatgctggaagatggcaacctgcacgtgacccagggggctggccgcttcataccctgcagcccgttctccgactatgtctacaagcgcattaaagcacggaggaaggtaaaaagcattggagctctgaggtggtgcaggagctttgtgttccactcacgctcagagatagtaaccatgaacacagggcactgtgatctctagactctcacagagaaattcagtgacagtcttgtccccaagaacaactacacagacttaatgtactattaaagagggtgttgaaaatttttgttcaaagagagctttttttcccaaatgacttttcccacatttttatagtactttattaaaaataatttaaattcgaataattcaaaataaggccagtgtatttttttaaaaaataaatgactcttcaagtctgaaggtgagaaccgagaatccacaccgacacatccctgtgtcattctgtccagtgctgctccacaggggcaaacacttataacattttagctactgtattttcaataaaactttatttctctgattttatatataaacacacacagagatatgtgtgtatatatatatatataggtctatagatacatacatgtgtgcaaatgtatgcatgcgtataaaaaatggaggtgcagagaaattaaatatatatttacaatatatgtattatatttatatatacttaatatataaatatagaataatatataaatatataaataaacatttatatatttatattgtattgtgtattgtattataacaatacaataaatataattaaaaacaaaaatgcgtataaataaatatattcacatatttatatttattgtatttattgtattatactttctatacacacactatatatatatatatatatacacacatatacagatatacgtatatatatgtgtttgtatatatatgtgtattagccctaccctaggattgtggaatttgagctccacactccagtttgggcctaatagagaaggagacttccccaatattgaccctttatttctatgagtgtgatttagattctgaaaccagggaagtgttgatgatgtagagttcttggttttggggagtacagatacagtcatcacatcactagaatcattagcatctgcacatttgatgggctcggcttctgtgctggcatttgagtcactaacagggaaggaggctctgacaggacttcttgtgatgatccatcctgcacggtcaggctcctctggcagcgcgtcctcattgcctcccctctggccaaagttaagaaatgggtggaggttgtgtgccgctgccatgggtggtcttgcagtgtttgtccagttgactgtaagcccctttgcaggaggtaccgtgtttcccatggccaaaggccctagtgcctggcacaaggcctagcagagcatgtgctgggtggaagttgctggctggctccacagtcccagggcaagttcacagccacagacagaggtcagtgggtcagaccacagacactcacttcaaggcctgcccaccctggtgtgtgctgaagagtgtgagggtggagctcccatgtgatcccatcctggccaggacctgcgacctcgtgtcatgacctacccttcctatccctctgctccagctgtactgctgttcttctatttcataatcactcccacttcagctgtctgcccttgctcttctctttgctggcttctctgtcatccacaccactccccggtatccctccaacctcctccctctggcaaccccaaccccatagcaacgtcctttgatccttctgatcgaagctcatctatttagaagggccttcactgaccacatccattgtcactctatcatcacatcctcctttatttattttatactacttctcccttcctcaaattatctttattattgttaattcctagctcccaccacacactgtattcactaatatatttatgatacctagaacagaccctaaaatgctgaatgaatgaatggtgacatgctcttctctggctgcagatggcagacctgcatgccgtcccaaggggcatgtacgatgggcctgtgtttgacctgaccaccacccccaaaggtggcacccccgcaggctctgctcggggctctcctactcggccgaacccacctgtgaggaatcttcatcagtcgggatttagcctgtcaggtgagtgggacaggctcatcaaaagataagagaagggggaaggggaagatcaatgttctgaggccacagggtgttcctcagaactcaacctgaaggagttttccagcctagcactggtgtcaactttagggagaaggttactggggcaagcaggaagggtccctgaattgacaaggggtcctggtaagaaagtaagacaaggcagtcaggccgaagaccaggtttaagtggtaactgattctgcctagagatcagccctggttgggggcagggtcggggagctggtcccctctatgaattgatagtgatttccagcattagcctatgagcgctatgcaacatagtatgttttctttatttgtccagattaaaagatagcttaaattatttttatgctcaaattgcagtagcgtcttctaacctaggatttttattatattctcccattcctagtaattataataatgctaacactagctaccactgattgaacatctactatgtgttagccatgtgattagtcttacctattctttacgaactctctgatataattagaaaataatcattcagttgctccataaccagtagtcttaaaatggagaaaaataaatgtagattcgcattcctataatgaataatttaaatgtgaaggaagtaagataacaagaaaagaaagacatttaaaggtaaaattacagcatatgaggaaagggtatggaatgggagaaacagaaacatgggagaaagaggtaagggagacctaggggaagaaagacaaaggaaaagagtttaaagtttggaggtaactttgccagaggtcacattctgctagtcataagcaatttttttcaaagtttttgcctttttttttttgttgttgttgttctctggctaccttaattcttaagcttttagaggctcctttctgaatagacccaagcacacattgaaatttctttttgtgctgttgtcacaaagacctgaccatcactgctttgcactgtgggatcttgggcaagtgacctaacctttcagaacctcagttatctcctctgtaaaacagataagggcacctctctcaaaccatggtggtgaggattaaaggagataatggttaagcacggaaaacattgcctgccacaatgagtgtcacgtctttgtcattgttcttcttcccagtattattatcatgctctgggtcagatgaaatctagataagaacttggcttttcctaccagaggctagttttcggggccataagaaaagtctagaagacctgatagactggaatggaagtttcttgggaggtgaggccagcaaggcacttcatatcttgcactcttaaaattaacccagtttctctcttgcccacatccccctacccgccactctgttttttttttccccctgggaatttatttccaactgtaggcacccaagtggatgagggggttcgctcagccagcaagcgcatcgtggcgcccccaggcggccgttctaatatcacatctctgagttaagcaagccttcctcaaagagaggggcagaagcaagaagagattgttttgaagccaaaatggtacaccgatatttaagaaggaaagcgaatccaaacggttgtgatctaaagaatcaataagcctcaagccttatgtttctccaatgttacgctcgcttgcctagctttacgaatattgctttgttttctgtttatgcatagccttgatttgtttgactcccctccccccatttacatgcatgcaatcagacaggccactaaggtaaaagagtctgctctatcatagtgttgagagcgtgtgtagtgctgcatcttatgacaaggggacagacaagctgggacgtcagggaaatgaacaaaagggacgcaggttatttggggtgagtgggtggtgggagcctggagcaaggtggagggtgcagaggggctggggtagggcatgtaggagggaggtgggtgggtcaggtgagtggaaggggtgttgtatattgtgttgatgacgtacgttatttccatggaagatagccgctgtggcagctgtcacatcaccacagctccctagggtctgccgagaaggcaggcagtctttgggttctgttctttgtcacgtcccctacaagtaaattttgtttctttgaacgtttattaaaatgccaagacccaaccatttcttccacctgcttgattgtgccagtgtttgctcaggcctctttcttagtgttgctttcaaatccttctctttcctgggttgggaaggccaggcagggacagagcaaatgacacttctcttcctcttgccctccctgcctctttggtgctcttaaaagccagcagctgagaacatagcacaggcccacgtggtgagggcacccacagcttaaagacgcttccttctaaacacggcgaggtcacctctcactcttctgtctttgcaaaccgagaagagtggcatgcttctggcatcccaagtcaggattttagctcagatgaggcagaatgaagggcctctcttacaggcagtttgtgtttgattctctcgatcctggcacatccatgataaataggagtttttgaaagttggttttattaggtgttccctaatttttaccgtaataggtcatctcagcttatatgaaagtcaagtggggaactgggaaagccaaagtcagtcttgagcagagggagcacattttgtggacctggttccacctttccattccaaaccacctgtttccccttccattagcagaaactctgggggaactttgtgtctcagtcctagaatctccccaagtgagtggaagtgacatgatgcagtcttcctcatggggcacctgaaagaaattagtgtgggtgcttcgatctaccttgtctgtcagagttgaatatctctttccctatcatgctgcttctgaaaattcagttttggagcaagtcctgtgagcaagataagaatctatagaaccaagatgctcattttcagaagaaatatgttcaacctgggatcagacttccatgctctggggaatccaagtggtagcacctgtaaccctgtgtactaagtgctttgaagagaagagcaggcctcagacaccttttaattgcttaggagaaaccattgtctctgactgcaggtttgaataagttgaagaccagagaaaagtacacactgggctacaaaggaatttggagatagccaaggaacaggatttcccctagcaagctaccttctgttcaaatcatgaaaaaagactatttccccttagaatagggaagcttgctattttaaagctcttgtagtgcttttcttttaagggagatgtagtaaaagggaaaatgtagctcttagtttacacttcaaagatgtgggggtctttcagagaactaagaataacagttttatgtgcagagagagtttgccagatctgaagcatatacctcattgactaggctgttactttgggataggttgcagtaccagccacagccagcagatagaggaaaagacacacataaactcgcttctgagcgtccacttctgcactctctgctctgctgttactcagcccctgagtctgactcatctctgcacaacctctctgtgccatgaagataagtcttccatggccaaatcggtcatccgcactgcccttgggacttccgaagtgaaccattccaccagaacctttgattctgcacaagatttccttgctctgggaacaacccccaaatgcccttgggaggaacaacatgagctcaggaagcctctctttcttcacttaccattactaactctccaagcatagaaatccctgggaattgcgagaataactcccactattttaaaatttatattcagatttgtttcgtttcataagacacatcaaacaggcctatacaaaaggtttaggaaaagaaaacaatggtgagtcccggccctcttcgaattcactggcacctcatgcaagtgtaggaaggcacgctggatcgtctatctgattccaaagctgtcctttgccatctcatcccttggcctgccccccaaccctgaggatgcccctgccatccccccaacctcctcatattgcctctgaacccagatggcaatccatcccggttctctctgagggccacgggcttgggtagtggaaagggtgtttgggaaattgttaaatcagttacccgtagtagagctatttcttgtacttctaagttttctagaagtggaaggattgtagtcatcctgaaaatgggtttacttcaaaatccctcagccttgttcttcacgactgtctatactgagagtgtcatgtttccacaaagggctgacacctgagcctggattttcactcatccctgagaagccctttccagtagggtgggcaattcccaacttccttgccacaagcttcccaggctttctcccctggaaaactccagcttgagtcccagatacactcatgggctgccctgggcagccagcattcattgtaagttccctctttgaaaactggtgtgtgggtgttcagttctgtgtctggtgggtatggacagacagtaatctcctgtgatctgtgctagctgtgaggcagctctggaacgtgaagagctgtttggtttgaaccgtgaacaaaactgtgttttgagtttagctgacattaaagaaaaaagttcatcacgtgactgttaatgtaaacctggttattaaaataactatgaaattac
